United States Patent Application Publication US 2017/0114356 A1 - sequence listing, part 57

SEQ ID NO: 76911 - DNA, 1062 bp, Zea Mays
caccattacaagtcctttttcataaaacaaacccatacccagtgtcacacatcattcttttaaaaagaaacatgttttaattctctaggcaaggctatgcctcattagttctttttgtaaaacaggtatcaaggaggataatcaaattccaaggaatggcaatgcatcaactgtttcatcactcaactcctatcacctaatgcagcatataagtgataaaagttttaaaacaacaaggaggtggcaaatgcaccggggcttgcctgggataacactaagtcagtgttgttagatgacgtccgcttggggagcatctctcatccgatcctggtacttgatcagatcatccaagcttcaggttcattcatcatcttcacttgagattaatccaactcttgccctccacatcacgtgattaattaacgtaccacaactaaatcgcctcgaacccgagagatcgacaacaacctccgggttgagacgttccaccaagcacccggcgggcgttacctttagaacttcgagctcttcgccctccaacaccggaaagtttctccgaggcggacgacgcaccatggttggctgcttgagaacaagctgcaggggcatggggatggagacctaggtaccatggatggagagacgtcgaccatcaacagagggggttaagtgcagaggtgttttcaaccaagggaaaaagaccaggcgccattgggggggatcctgcaggggaaaaactcgaccatggagatccagggcggccatgggagagctaggcatcggtctgggcgtctatggagaggagcaagggatggagcggggagcaggacggatgccgcagccagaggaagtcgaggccgacggtgtccatggctgggggcgggggcgatcgccagggaggggctgtcgctgggcgagcagctctgtcaccggtggctgtactggatgctgtcacggcatgggaagagaagcaggaggctgccatgcgtccaagcgccaggagaccaatctagaaatagcgacgtctagaacaagccagggaaagtggagaggataagatag

SEQ ID NO: 76912 - DNA, 1045 bp, Zea Mays
caccattacaagtcctttttcataaaacaaacccatacccagtgtcacacatcattcttttaaaaagaaacatgttttaattctctaggcaaggctatgcctcattagttctttttgtaaaacaggtatcaaggaggataatcaaattccaaggaatggcaatgcatcaactgtttcatcactcaactcctatcacctaatgcagcatataagtgataaaagttttaaaacaacaaggaggtggcaaatgcaccggggcttgcctgggataacactaagtcagtgttgttagatgacgtccgcttggggagcatctctcatccgatcctggtacttgatcagatcatccaagcttcaggttcattcatcatcttcacttgagattaatccaactcttgccctccacatcacgtgattaattaacgtaccacaactaaatcgcctcgaacccgagagatcgacaacaacctccgggttgagacgttccaccaagcacccggcgggcgttacctttagaacttcgagctcttcgccctccaacaccggaaagtttctccatggttggctgcttgagaacaagctgcaggggcatggggatggagacctaggtaccatggatggagagacgtcgaccatcaacagagggggttaagtgcagaggtgttttcaaccaagggaaaaagaccaggcgccattgggggggatcctgcaggggaaaaactcgaccatggagatccagggcggccatgggagagctaggcatcggtctgggcgtctatggagaggagcaagggatggagcggggagcaggacggatgccgcagccagaggaagtcgaggccgacggtgtccatggctgggggcgggggcgatcgccagggaggggctgtcgctgggcgagcagctctgtcaccggtggctgtactggatgctgtcacggcatgggaagagaagcaggaggctgccatgcgtccaagcgccaggagaccaatctagaaatagcgacgtctagaacaagccagggaaagtggagaggataagatag

SEQ ID NO: 76913 - DNA, 728 bp, Zea Mays
tatccacaactaaatcgcctcgaacccgagagatcgacaacaacctccgggttgagacgttccaccaagcacccggcgggcgttacctttagaacttcgagctcttcgccctccaacaccggaaagtttctcctccaagccacatacacaaacacgcaaaatacatcatctagatacaagtatcagcgaggaatactcgcaaaagaaatgacaagtcctcaccgaggcggacgacgcaccatggttggctgcttgagaacaagctgcaggggcatggggatggagacctaggtaccatggatggagagacgtcgaccatcaacagagggggttaagtgcagaggtgttttcaaccaagggaaaaagaccaggcgccattgggggggatcctgcaggggaaaaactcgaccatggagatccagggcggccatgggagagctaggcatcggtctgggcgtctatggagaggagcaagggatggagcggggagcaggacggatgccgcagccagaggaagtcgaggccgacggtgtccatggctgggggcgggggcgatcgccagggaggggctgtcgctgggcgagcagctctgtcaccggtggctgtactggatgctgtcacggcatgggaagagaagcaggaggctgccatgcgtccaagcgccaggagaccaatctagaaatagcgacgtctagaacaagccagggaaagtggagaggataagatag

SEQ ID NO: 76914 - DNA, 2198 bp, Zea Mays
gataatctgagtaaatacaacaaggtactattgtggaagtcggctacaatgatttatgcacaattgcacagtgcaatgtttacatactaatagtaacaaaacaaagatctactgtaggatatctctaactccaaagtagagtagcaaaagcatggcttatctatttttatccatgagatggtttagtcatttactaatagcttaagaacacccagtcatgtgtaactcttgccatatattacggagtcaaatagaagaccaacttcaaattaattatgaaaatacaaattcgtgaaaaatgtcataagttggctacatccctgaaactcaaaagcatagaaaattgtgatttatgatatggcccagccgcatagagtttattttaggaaacactgagttgattggttgtgattatttggtagcaaatagtccctttttgtaatggtagcagtagttaccttattgagcattacggctctatagtttctatgtttaggaaaaagattgtggggaaataaaagaggaagaggcagaagagaaaagggacattcttgttccacaaattccagtctcaggcgtcgccgacgataaacggccggtggttccgtcaaccgctaccataggtcgccggcgagctatcccggtgccgccccagcctactcgatctgggctgcggcctggaactcgttcctatcaacgggaacacccatatcaacagattcaggtggttctggtgcatccctgcccatggcttccgctgaggatcgcgtggggcatctggaggcctcggtcgcgcaactggcggttgctgtgcaggacatccagtccaacatagcagagctcgccaaggttgtcgccgactcagtgcagctgacgggtggcgaggcatcgggggtagatggccggcaccgtcctcaacaacagggacgccgggacggacgagacgccgacgcgatgggcggtgagcgtggcggtcgtcgcgggtttccacacgcgccccgttacgacttgccgttgttcgatgggtcggaggacccattgctgtggctgcgtcagtgcgagcagtatgggcggttgcatgacattccaagggaggagtgggtgcagatggccggcatgcatctgcgcggcgaggctcaggaggttttggacaattgggaaactggggatcaattcatttcttggccggagttctatgacaccttcttgcagcgcttcacacggcattcaacctcgggaccgctgggagatctggcaaatttgaaacagcacaacagccgagcagacgtatatgcaagggagtttcagcgacttcttgcccgcacaccaaggttgtctcggcaggatcagatcgagctctttaccgcggggttatcgtccaccctcgcggccgaggtccgtcgggatcgcccccgggacttggatgacgccatgggtttggctcgtgaagcagaacggcgggaagatctctttcttgccaaggtgacccaggccacgcggtcacgcgggtctcgtagcacatcttgggcattgggcaccgatccatcggcaagtaatcgggcgacggcgccgtcatccagtgccctcccggtggcgcctgggggatccaagctggaagggggtcgagcgttgacgacggcttcacagacttcagggactgttcccactgctccaccatattgtcgtcgtctcagtcctgcagaaatgtctgaccgaagggagaagggtctctgttataactgtgatgaggtttactcgcgtggacatcgttgtcagcgcctgttccatttggaagtgctcagcgagggtgaagaggatgattcactggaggaggaaccaaccctatctgctatagccatgaagggtctgaaggccagtcgcactatgcaggtcattgtagtcatgggtggacaacgtctggtgggcttagtggatagtggtagcacccataactttattagtagctatgctgcttctgtggtgcagatcacacagtcgtcagggactggacagcaggtgcaggtagccaatggcgctcggttgccatgtcttgggcggttgaaagatgtccagttctgcattcaaactcacatcttctcagactcctttttggtgattcccttggaaggttttgatgttgttttgggggtgcagtggctgtagaaattgggtgatatcaactggaattttgattccct

SEQ ID NO: 76915 - DNA, 2713 bp, Zea Mays
acggcccaccttccagacgctcccccggaaactccgcccactcgcacaaaccaagacaaagttgcgatgctccatgctccacgtcacgacgccgcatctaaccctccggcgactcatcgccggcgagccggtccgccacgccatagcctcgtcctgaagcgcacttaatcctacgtctcgttcctctctcgcccccggtaccctccataggcatgggaatggggtctgcgagagggggcgcagggggatggctccccggcgagcggtggcggcgggtcatcttcctcgctctggcggccgtctcgttcctcatctcactcatactcctcttcctatccgcgccgcgtctccgcctcccaagtgtcgtcctgccttacaccaccgcttccgcttctgccgtccgccgcgggcccggcgagccgccctgcctggtgtacctgctgaccggcgcgcgcggcgacgggcgccgcctcctcaggctcctcctcgcggtttaccacccgcgcaaccggtacgtgctccacctctccgccgacgcgccagacgacgagcgcctgagcctcgccaccggggtcgtcgccgcggcgcccgccgtgggagcattcgagaacgtggttattattggcaatcccaccgccgggacgcccgtggggtcctccggactcgccggcacgctccgcgctgcggccgtgctgctccggctccacgctgactgggactggttcctcaccctcaatgccgccgactaccccctcgtcacacaggatggtagggcaacactggcatctatgcatctctaaggaaaaaaaatctccttggttcaatctagtaggttacaaaagaacgacactcggtagtcttcttcctttattatatggaaattacaagtagtcttctagcgatgacattgaatggaaatgtaagttctctttgtttgtcctgactgatatcaaataacaaatactcataacatggaagagctgcacaaccagtcatgagtcaaccatgcacatttcatacgattccagttgcctattagtcacactgtcagtcttactttgcattgatagttgtactgtcaggaataatagattgaggctccccttatttattgataagtaatgcacatgccaaaacttgtgctgttgctatacttatatctgttaaagtgtgcacccaaacatataggtctgttgtagagcctgtgccaaatgatgttcatgattacaaaatttctgttatacatcactcttgaatgctataatatatcatggttattctggttctccaaataacttttatcttctacagaaatctgcttcggtgcttcattaattattccagcaagtcatcattgtgtgattatcctcattaattgatggagatcattataaatctttatgcttttccctgatgcagacctgattcatgtcctttcttctgtcccaagggatcttaacttcattgaccacaccggtgacgttggatcaaaagaacctgagaaagttcaacaaattatagtcgatgctggaatttacttgtcagggaggaccaacttctttcgaggaacacagaaacgagcagctcctgaggcttttaagttctttacaggttctccatgggtcatattaaaccggcaatttatagagtactgcattcttgcttgggagaatctccctaggattcttctcatgtacttcaacaatgtaatacaacctcaggaagggtatttccagacagtcatctgcaactcactggacttccgtaatttcactgtgaacaatgacttgaggttcatggtgcaagatgattccgctcagaaaaagtcccttttcacgagcagggaacattatggtcacatggtggatagtggggcacccttcgcaaggccgtttcaggagaatgatcctctgctggaccagatcgacggcaatatactcaagcgttggagccatggaccagttcctggtgcttggtgcacaggaaggaagaggtggttcagtgatccatgttcccagtggggcgatgtgaatgttttgagaccaggtcctcaagcagtgatgttgcaccaatatgtaaatcggaccttagaagaagcaaagtctagcagcaattcatgcaggcggtagcagcattggcgtctagaacctcatgtcccatggttgaaagctttgagctttttccgcttatccactaagggttctccactctgctgaataaatagctgccacatgtctaagctgaaacaagcactcgtcgcacctggaacaaagccatggagggatgttcttttctgatattttcatgatgactatcatagtcacggatcaggagtttcactttggtctgtgattaatctgtgcaatccccatatttggctcatataacacttccaggcgctgataataggctgaagcttatataactactgttgtttatatgttgcggttatttgttggacagcttatattcatgctagtagatcaagttacgaatcccttatgctcccctgttgtgaggactgtagactgtagaacaagggattttgttacttgttagtcttactgaattcatgttgtgctttggacttacataatatgcctagtcctgtattgtacctaaaatgagactccagtcatctcagtttacctttgaggggtgtttggaagcatattattttttgcagtttcaaagcaatactatggtctttaag

SEQ ID NO: 76916 - DNA, 1946 bp, Zea Mays
cacggcccaccttccagacgctcccccggaaactccgcccactcgcacaaaccaagacaaagttgcgatgctccatgctccacgtcacgacgccgcatctaaccctccggcgactcatcgccggcgagccggtccgccacgccatagcctcgtcctgaagcgcacttaatcctacgtctcgttcctctctcgcccccggtaccctccataggcatgggaatggggtctgcgagagggggcgcagggggatggctccccggcgagcggtggcggcgggtcatcttcctcgctctggcggccgtctcgttcctcatctcactcatactcctcttcctatccgcgccgcgtctccgcctcccaagtgtcgtcctgccttacaccaccgcttccgcttctgccgtccgccgcgggcccggcgagccgccctgcctggtgtacctgctgaccggcgcgcgcggcgacgggcgccgcctcctcaggctcctcctcgcggtttaccacccgcgcaaccggtacgtgctccacctctccgccgacgcgccagacgacgagcgcctgagcctcgccaccggggtcgtcgccgcggcgcccgccgtgggagcattcgagaacgtggttattattggcaatcccaccgccgggacgcccgtggggtcctccggactcgccggcacgctccgcgctgcggccgtgctgctccggctccacgctgactgggactggttcctcaccctcaatgccgccgactaccccctcgtcacacaggatgacctgattcatgtcctttcttctgtcccaagggatcttaacttcattgaccacaccggtgacgttggatcaaaagaacctgagaaagttcaacaaattatagtcgatgctggaatttacttgtcagggaggaccaacttctttcgaggaacacagaaacgagcagctcctgaggcttttaagttctttacaggttctccatgggtcatattaaaccggcaatttatagagtactgcattcttgcttgggagaatctccctaggattcttctcatgtacttcaacaatgtaatacaacctcaggaaggggaacattatggtcacatggtggatagtggggcacccttcgcaaggccgtttcaggagaatgatcctctgctggaccagatcgacggcaatatactcaagcgttggagccatggaccagttcctggtgcttggtgcacaggaaggaagaggtggttcagtgatccatgttcccagtggggcgatgtgaatgttttgagaccaggtcctcaagcagtgatgttgcaccaatatgtaaatcggaccttagaagaagcaaagtctagcagcaattcatgcaggcggtagcagcattggcgtctagaacctcatgtcccatggttgaaagctttgagctttttccgcttatccactaagggttctccactctgctgaataaatagctgccacatgtctaagctgaaacaagcactcgtcgcacctggaacaaagccatggagggatgttcttttctgatattttcatgatgactatcatagtcacggatcaggagtttcactttggtctgtgattaatctgtgcaatccccatatttggctcatataacacttccaggcgctgataataggctgaagcttatataactactgttgtttatatgttgcggttatttgttggacagcttatattcatgctagtagatcaagttacgaatcccttatgctcccctgttgtgaggactgtagactgtagaacaagggattttgttacttgttagtcttactgaattcatgttgtgctttggacttacataatatgcctagtcctgtattgtacctaaaatgagactccagtcatctcagtttacctttgaggggtgtttggaagcatattattttttgcagtttcaaagcaatactatggtctttaag

SEQ ID NO: 76917 - DNA, 2885 bp, Zea Mays
tttcctccatcgacctcgtccatatcttgtaggccattgaagtcgacgctaaagcaggaatggagagcatgagggcccattcttcattctcccgaatctcatcgcgcctcgcactctccccgctccagccatagcggcgagggccggatcggttccggagacagcgcccatgtcttcgaagtcttggatctggtgggtctaggacgcggttatggggctggtggtgagcgccgccatgaggagcggctggacgatggtgttgggaatggagggaccaccgatggcaagctgagtctgcgggcaggcccgaggtgttgacactgccttggtccctcttcacaaaatcaccacggtggcgcatgcgggtggccttcgcctgcagcgtatgtgggcagcgtacgaccaaggccatcaatcctcatgcctacaccgatggaactatgtttgttcagatttgtaatgcagttgttcaatgcaactcttgtcctcccaatttttttgtgcagtaatgtttggctggccaaaaggatttggcaatcgcttatctttgactcaataccttatgacctcgaaaaggtttgaacccgttagggactaaagatgccaaaggttgctgtggagaagttcgtgagtttatctattctgataatgggactgtaaccatgatacaatcaatctcaaatgaacttaaggataataagggtcaacatgagatatgttgttctaaaattgaaacaataaagggtaaatggcttccaactatgtggattcattcgtaactttcaagaaatggcagtcgctcactactaacagtttatctacagcctaatgaaattcgttggtagtgtccacttcatatgccataagttgaagagcataaatattctgaaagctcacggtaaaagcatcaaggatagttacatgctaaatggctatgcactaaagactaaacataggccgtgcaggtcaaggaatgcctacgagagtaactcctactagaattacttctcttgattttaacattcataagacaaaaatgcaaacagatccaagggaacttgataagattcgtcagagttatttgtattctatgttccaatactttagaatttgtttgcctatatatggtagaatcagcactataaatacataatatttatatcttccttcatgttacttgtttctaattcgttcaggcaatagtcctctgtctttttaaattttttggctcgaaattcattggtccaattttgacctcggaaaggtttgaacccgtcagggactaaagatgccaaaggtatattgttttccttctcattctactatgctataactatttctcctctactgttttttaccctacgaactgtgttgctaattttaatctacactacatctacttaaactcaattgttcagtgtcatagctttgctggaagccacatggcatattacttacatgccttcttagagtcttttagttatttcggtaatctgtattataggaatcataattaatgttgttttataacaataaatttatattgttgttttttagtcagaaaaaatgcttgtcatttggtcaattagctagcgacatgatattaagtgttgtagcgtggtcaagggttagctatgtctatgtgccatgtgttaaaagtattaggctacaaaaatccgaaaatgtcttgataaaagcaaaaaatagtaggaccattgaaaatttaaattagtatcgttgttacaagtttacccaacttcgagtataagagagcatagttcagcccctcgtctatcacttgtatgtaaggtgaactgttttgtttttctatagcccgaccaatgtgcctctaagcatattcccaacaggacttagtgtgttgaaaacgccgagtcagaaatttgcacacatttttgagttatatgtatttattttagttcatttggactttggttgtgaacttaatgctccaagttattttgaccgcagtgggtcctttctccaaagtacttaaaattttcattccctatcacgcctagaggccctatgggtctgcaaatgtgattttctccataaacatcaataaggttgtagctttaagtaatggatgggtggttcttgcatgtactcttccatctgctttgtcggaatgaagcttcagttgaatttgttatagtcgttcactggtgcaaactgttattgctttgttatgtgtcatttgtttgtaggtctggaagatgagtaggcggaacgtggttgcaatagatcctattcaagtgtactatgtggaagggatcttggagcagttggcgttcgtggaggagtcgaagcgcaaggaggactgggtcgtcaggaaccaggagcgcagggcggccaaacgcaatcgcatccgcgacgagcacaagtatcaggaggatgagccagaagcacaagaatgggctgatgagctatcccctgatgagcttgagcgcctcttgaatcatgaccatggttggttgattgccaacccccaccagttcaaggtccctagctggttcctcaacaggaaaaagtactacaaggatggtaggttctctcaggaaccactatggtctgtcactactggggtctacttgtccgtggccagcacaccaagactaccaaaaggcatggaaagactataggtgtgtcggagaatagataaagtcaatttggtgcctaccttggatatttattatctgtaggatagatgaaccgttctggtttatgaaacttttgttgcgtattccaagctggttgaattgaatgttcttaagaaccaatgtcattagaaaagttaaaagattcaataatttgaaatggttttaccacacgaatttggtatatcatagtgatgcttatcgttt

SEQ ID NO: 76918 - DNA, 2448 bp, Zea Mays
cgagagcaggagacagaggggctccccccccacccccgagcccaaacgcagctagctccccattccacccaagctcccgcagccagatgctctcccccgctcgagccccaccgccgccgcccgtccccgccgccgggtagaccgcccgatccgacggcgcccgccgcacccatgggccgcggcggcgcgcgcgcggcccccgccgccgcggtgccgccctggcacgcgctcccggacgaggtctgggagcacgccttctccttcctccccgcggactcggaccggggcgccgccgcgtgcgcctgccacgcctggctccgcttcgagcgccgctcgcgccgccgccttgccgtcgccaactgctacgccgcgtccccgcgcgacgccgtcgagcgcttccccgccgtccgcgccgtcgaggtcaagggcaagccccacttcgccgacttcggcctcgttccgcccgcctggggcgccgacgccgcgccctgggtcgccgccgccgccgccggctggccgctgctcgaggagattagctttaagcgcatggtcgtcaccgacgactgcctcgagatgatcgcggcctccttcaggaacttccaggtgctgcgcctcgtctcctgcgagggcttcagtacagccggcctcgctgccattgccgctgcttgcaaaatctaagagaacttgaccttcaggagaatgagattgaggattgctctattcattggctcagtctatttccagtatctttcacttctttggtaactctaaatttttcatgcctagagggggatgtcaatatcactgtacttgaacaattagtaaccagatgcagcaacctcaagactctcaagctcaacaatgctatacctcttgacaagcttgctaacctccttcgcaaggctcctcagattgtagaactcggaacaggaagattctctgcagattaccatccggatctcttttcgaagcttgaagcagcatttgctggctgtaaaagcttaagaaggctctctggggcttgggatgccgttccagaatacctgccagcattttattgtgtatgcgaaggcctcacatcactaaatctgagctatgctactgtacgaggccctgaactgattaaattcattagcagatgcaaaaatttgcaactcttatgggtgatggacttgattgaagaccatggtcttgctgttgtggcatcgtcttgtaacaaactgcaggagttgcgggttttcccttctgctcctttcgaagcagctgagcaggtctctttgactgaaagaggtcttgttgatgtatctgccagttgcccaatgctggagtcagtcctctacttttgcagacggatgaccaacgaggcccttattaccatcgcgaagaaccggcccaacttcacttgcttccgcctatgcatcattgagcctcacacaccagattacattacacaccagcctcttgatgcaggttttagtgccattgtggaatcatgcaagggcctcaggcggctttctgtttcaggccttctcacggacagtgtatttaaatccatcggggcacatgctgaccgtcttgagatgctctcgattgccttcgccgggaacagtgatttgggcctccattacatcctatcgggctgcaagagcttgaagaagctagagattagggactgcccatttggtgacaagcccttgctggcaaacgctgccaagctggagacaatgcgatccctttggatgtcgacgtgctcaatgaccttgggcgcatgccggcagcttgcgcgcaagatgccccgtcttagtgtggaggtcatgaatgatcctcgacggggattccccttggactctctaacagatgagagccctgttgagacgttgtatgtctaccggacaatttcaggtccaaggtccgacacaccagcttgtgtccagattctctaaggggcagctgtggtctacaaaggtactatggaagcatccattttcaatcacatcatgtaccttcaacaccttactagcataacctggatcgtctccttgaagtagcaaggctggtgacctcggtaatcctgtcataatctctgcttagctgtacaactgtttctgggagtttagggtgagagactcagggtccctttcaggtgttaataactgtagggaggacactcgatgagttacaggaactactagatagcgtcttgaggaaacttgggtttgttttcttagcgtgcctagttcttttcatgtataaaaaaatatgggatcattccaatgctgccacaatgtactgtactattggaacaattgtacttggagcctctacttttttgagttttgaccccctccccccccccccccccccccccccccactgattatgggttgctgttgctcccgcctgtgatttgtgaatgctatataaaagcttgtacgtggctctgccttc

SEQ ID NO: 76919 - DNA, 2818 bp, Zea Mays
cgagagcaggagacagaggggctccccccccacccccgagcccaaacgcagctagctccccattccacccaagctcccgcagccagatgctctcccccgctcgagccccaccgccgccgcccgtccccgccgccgggtagaccgcccgatccgacggcgcccgccgcacccatgggccgcggcggcgcgcgcgcggcccccgccgccgcggtgccgccctggcacgcgctcccggacgaggtctgggagcacgccttctccttcctccccgcggactcggaccggggcgccgccgcgtgcgcctgccacgcctggctccgcttcgagcgccgctcgcgccgccgccttgccgtcgccaactgctacgccgcgtccccgcgcgacgccgtcgagcgcttccccgccgtccgcgccgtcgaggtcaagggcaagccccacttcgccgacttcggcctcgttccgcccgcctggggcgccgacgccgcgccctgggtcgccgccgccgccgccggctggccgctgctcgaggagattagctttaagcgcatggtcgtcaccgacgactgcctcgagatgatcgcggcctccttcaggaacttccaggtgctgcgcctcgtctcctgcgagggcttcagtacagccggcctcgctgccattgccgctgcttgcaggtgaggccgcgcatccaggcccagattcgacttatagactacaaagctgctctgcgtggttcttgctttcatttccgcaaagatttgatttgacctttcggggagtttcttacaggagtatttgacaaaataaaaaaacacctctggttccttctctcctcaccttttccatttacccccacaaattttggtgtcattttgggtagttgtgacctgaagtatatctttttaggagaaactgatttgaacttctttgggggagattttgagctcagcatttggtcttttttgtgtgcttgttgagtagtatttgtaaacagtagtcgcctccagtttagatttggtgtgatctgctgtgtttgtcctgagaaatctaagagaacttgaccttcaggagaatgagattgaggattgctctattcattggctcagtctatttccagtatctttcacttctttggtaactctaaatttttcatgcctagagggggatgtcaatatcactgtacttgaacaattagtaaccagatgcagcaacctcaagactctcaagctcaacaatgctatacctcttgacaagcttgctaacctccttcgcaaggctcctcagattgtagaactcggaacaggaagattctctgcagattaccatccggatctcttttcgaagcttgaagcagcatttgctggctgtaaaagcttaagaaggctctctggggcttgggatgccgttccagaatacctgccagcattttattgtgtatgcgaaggcctcacatcactaaatctgagctatgctactgtacgaggccctgaactgattaaattcattagcagatgcaaaaatttgcaactcttatgggtgatggacttgattgaagaccatggtcttgctgttgtggcatcgtcttgtaacaaactgcaggagttgcgggttttcccttctgctcctttcgaagcagctgagcaggtctctttgactgaaagaggtcttgttgatgtatctgccagttgcccaatgctggagtcagtcctctacttttgcagacggatgaccaacgaggcccttattaccatcgcgaagaaccggcccaacttcacttgcttccgcctatgcatcattgagcctcacacaccagattacattacacaccagcctcttgatgcaggttttagtgccattgtggaatcatgcaagggcctcaggcggctttctgtttcaggccttctcacggacagtgtatttaaatccatcggggcacatgctgaccgtcttgagatgctctcgattgccttcgccgggaacagtgatttgggcctccattacatcctatcgggctgcaagagcttgaagaagctagagattagggactgcccatttggtgacaagcccttgctggcaaacgctgccaagctggagacaatgcgatccctttggatgtcgacgtgctcaatgaccttgggcgcatgccggcagcttgcgcgcaagatgccccgtcttagtgtggaggtcatgaatgatcctcgacggggattccccttggactctctaacagatgagagccctgttgagacgttgtatgtctaccggacaatttcaggtccaaggtccgacacaccagcttgtgtccagattctctaaggggcagctgtggtctacaaaggtactatggaagcatccattttcaatcacatcatgtaccttcaacaccttactagcataacctggatcgtctccttgaagtagcaaggctggtgacctcggtaatcctgtcataatctctgcttagctgtacaactgtttctgggagtttagggtgagagactcagggtccctttcaggtgttaataactgtagggaggacactcgatgagttacaggaactactagatagcgtcttgaggaaacttgggtttgttttcttagcgtgcctagttcttttcatgtataaaaaaatatgggatcattccaatgctgccacaatgtactgtactattggaacaattgtacttggagcctctacttttttgagttttgaccccctccccccccccccccccccccccccccactgattatgggttgctgttgctcccgcctgtgatttgtgaatgctatataaaagcttgtacgtggctctgccttc

SEQ ID NO: 76920 - DNA, 272 bp, Zea Mays
ctcctggagatccgcctcgacgacttcttctttacctgagcagagattgcaccaaaggcaacctggtgttttgtgaaagcaagggtgagtacacatcaacgtactcagcaaatgtcccgtttggctgtagtggactagctttatgtggggttaaggtcaaagcagattgcttttagttggtcagatatttattattaatggaagccaagttttatcatataaccaacccgtgaaccatttcctcatcgaggaaacctcattatcatcatcga

SEQ ID NO: 76921 - DNA, 2905 bp, Zea Mays
gccagaatttcacaatctcaaaataggttgataatagaattcgtttgaattttgcgtagtatccaactcctcaaaatatatgggaaccaaacaccagattatttgtcatttgcgacaggtagcttggatccataccgtcaatcgcatcagatcgtgaatccctttcctcctaccgcgctagggttttgcaacggcctcaatggcgtccaccgccgccactgtcacgtttggcggcaagggcgccgccctatcgccggccgccgtctacgcgctctccatcggcctcgccgccccgggcatcgacccttcggcgcacaaggcgctctccacccgcgcgccctcgccacaggagacccccgcgccccttgccgccgcgctcccggcgctggcgcccgccgagtcccgcgccgccgcggccgtgttgctgaacaagctggtcctcactgcgtccgactctgcctccgcgctcgtcaccgccgccacggccgtcggcctcgcaggctcgctcgacctcgccgccgcgctgccgctcggctcccgggacgaggtcgcggtggcagcggcttccgcgcctgtcgcggtcgggctcgcagcgctggtcgactgctgcgccgcgccgctcgcccgcgttgccgacgccgtcgccgcgctgtcgtgcgaagccgtgcgcggggacgccgcggccttcgacgtgcaggcctccggcgacgggctctcctccaaggacgaggccgacgtcgctgccgacatcaaggtgctcgtcttcgggtccaagcttgtcggcgctgccgggggcgcccccgccgccgccacgttcgccaaggtgcccgcgctgaacgggatcttccgccaggcggttcgggcgctgcacgcccaagtgcgcatcgagctcaacgcgcctgtgaaattggggaagaaggatgccggtcaaaccggtgagggaaaggaggaggcattggtggtgctggccacacagctcgctagagcagtgcaggcactgtgcaggttgagtgtcgcccgggcaaggctctgtgccgagagatttgctgatgctgagcttcgggataagcttactgctggcattagcgtcgatgatttgagggggatgcttgacaaggttttgattgattcagatgctgtgtcagtcttgaagggggtgtacaaccacttgctcaagttcagggactttctctcctgggaagcagctatggccatggcagtaattgaaacagacagttcaattgagaagccgcaatctgctgttgacaacgaagcagctggttcaagtgaaaaggcacaggctggtggggacaaagcaaagggtgacaagaagagcaagaagaagaaaactttggggaagggtacatctgctgtgctgatgctgcttagggaccatgtgacaaatggaagtactgttgcttccgtgaattctgtgcttgttgcagagtgggcagcctctctctcattgctctttgatcctaaatgtcccggattggtgtcccttgtggagaaagtgaaggagattgttgagagcaatgaagtcaggagattgcctaaaattcctaagggtacacgtgactttgggaaagagcaaatggcgataagagagcgagcattttcaattataactagtgtattcaagatgcacggtgctactgcacttgatacccctgtatttgagctgagagaaacccttatgggaaaatatggtgaagactcaaaattgatatatgacctggctgatcagcataagcgcactgaagagataccagattgcaaaagtatataggagagataatccatcaaagggaaggcacgtatgagataaaattaaatcacagaaagttgctggatggaatgttggagatttgtggtgtgcctcctcaaaagttcagaaccgtttgctcgagtattgacaagctggacaagcaaacattcgaacaggtgaagaaagaactggtggatgagaaaggtatatcaaatgaaactgcagatgaaattggcaatttagtgaagactagaggagcccccttggaagttttgatggagttgagaaaggatagcagcaagtttatgaataatgaagggtctgttgctgcactgaatgagctggagatattattcaaggctctggataaagcaaatgcaatagacaagatagtttttgatttaagtttggccagggggcttgattactacactggtgttatatatgaagccgtttttaagggttcagctcaggttggctccattgcagctggtggtcggtacgacaaccttgtgggtatgttcagcgggaagcaaatccccgctgttggtgtgagccttggaattgagagagtctttgcaatcatggagcaacaggagaaagaaagaaatgagaagatccggcctacagagacacaggtgctggtgtcaatcctgggaaaggaccttacactagctgcagagctcgcgagcgagctgtggaatgctgggttaaaggcagaattcaagctcactactagggtggcgaaccacatcaagtatgccttgcaatcaggcattccgtggatggtgctagtcggtgagtctgagttgcagaagggaagtgttaaattgaaggatgttgaagccaaccaggaagaagaggttgataggaaggattttgttcaagagctgaagaagagattgagtaaacccaacattcatttgaggcaaaatcaattacggcagaggcggagaatgatactgcagcattgtagtttaaagtgctggggatgtttttgttagattacccgtctagggtttggtgtcttccccatgtaattaccttctcacccctttgtaatggaccagccccaattacctaagtctattaataccacacccaaccctgattagggttagggtttttattccaact

SEQ ID NO: 76922 - DNA, 2904 bp, Zea Mays
cgcaacaccgatgtggccacaccatattgacttgacaattgctgcacttagggcttgggccctgtttggtccataactcattctagaatttcattatcagctaaatagctcctagattttgtattggtttttgccagaatttcacaatctcaaaataggttgataatagaattcgtttgaattttgcgtagtatccaactcctcaaaatatatgggaaccaaacaccagattatttgtcatttgcgacaggtagcttggatccataccgtcaatcgcatcagatcgtgaatccctttcctcctaccgcgctagggttttgcaacggcctcaatggcgtccaccgccgccactgtcacgtttggcggcaagggcgccgccctatcgccggccgccgtctacgcgctctccatcggcctcgccgccccgggcatcgacccttcggcgcacaaggcgctctccacccgcgcgccctcgccacaggagacccccgcgccccttgccgccgcgctcccggcgctggcgcccgccgagtcccgcgccgccgcggccgtgttgctgaacaagctggtcctcactgcgtccgactctgcctccgcgctcgtcaccgccgccacggccgtcggcctcgcaggctcgctcgacctcgccgccgcgctgccgctcggctcccgggacgaggtcgcggtggcagcggcttccgcgcctgtcgcggtcgggctcgcagcgctggtcgactgctgcgccgcgccgctcgcccgcgttgccgacgccgtcgccgcgctgtcgtgcgaagccgtgcgcggggacgccgcggccttcgacgtgcaggcctccggcgacgggctctcctccaaggacgaggccgacgtcgctgccgacatcaaggtgctcgtcttcgggtccaagcttgtcggcgctgccgggggcgcccccgccgccgccacgttcgccaaggtgcccgcgctgaacgggatcttccgccaggcggttcgggcgctgcacgcccaagtgcgcatcgagctcaacgcgcctgtgaaattggggaagaaggatgccggtcaaaccgatgctgtgtcagtcttgaagggggtgtacaaccacttgctcaagttcagggactttctctcctgggaagcagctatggccatggcagtaattgaaacagacagttcaattgagaagccgcaatctgctgttgacaacgaagcagctggttcaagtgaaaaggcacaggctggtggggacaaagcaaagggtgacaagaagagcaagaagaagaaaactttggggaagggtacatctgctgtgctgatgctgcttagggaccatgtgacaaatggaagtactgttgcttccgtgaattctgtgcttgttgcagagtgggcagcctctctctcattgctctttgatcctaaatgtcccggattggtgtcccttgtggagaaagtgaaggagattgttgagagcaatgaagtcaggagattgcctaaaattcctaagggtacacgtgactttgggaaagagcaaatggcgataagagagcgagcattttcaattataactagtgtattcaagatgcacggtgctactgcacttgatacccctgtatttgagctgagagaaacccttatgggaaaatatggtgaagactcaaaattgatatatgacctggctgatcagggtggtgagctttgctctttgcgttatgatctgactgttccatttgcccggtacgttgccatgaatagcataagcgcactgaagagataccagattgcaaaagtatataggagagataatccatcaaagggaaggcacgtatgagataaaattaaatcacagaaagttgctggatggaatgttggagatttgtggtgtgcctcctcaaaagttcagaaccgtttgctcgagtattgacaagctggacaagcaaacattcgaacaggtgaagaaagaactggtggatgagaaaggtatatcaaatgaaactgcagatgaaattggcaatttagtgaagactagaggagcccccttggaagttttgatggagttgagaaaggatagcagcaagtttatgaataatgaagggtctgttgctgcactgaatgagctggagatattattcaaggctctggataaagcaaatgcaatagacaagatagtttttgatttaagtttggccagggggcttgattactacactggtgttatatatgaagccgtttttaagggttcagctcaggttggctccattgcagctggtggtcggtacgacaaccttgtgggtatgttcagcgggaagcaaatccccgctgttggtgtgagccttggaattgagagagtctttgcaatcatggagcaacaggagaaagaaagaaatgagatccggcctacagagacacaggtgctggtgtcaatcctgggaaaggaccttacactagctgcagagctcgcgagcgagctgtggaatgctgggttaaaggcagaattcaagctcactactagggtggcgaaccacatcaagtatgccttgcaatcaggcattccgtggatggtgctagtcggtgagtctgagttgcagaagggaagtgttaaattgaaggatgttgaagccaaccaggaagaagaggttgataggaaggattttgttcaagagctgaagaagagattgagtaaacccaacattcatttgaggcaaaatcaattacggcagaggcggagaatgatactgcagcattgtagtttaaagtgctggggatgtttttgttagattacccgtctagggtttggtgtcttccccatgtaattaccttctcacccctttgtaatggaccagccccaattacctaagtctattaataccacacccaaccctgattagggttagggtttttattccaact

SEQ ID NO: 76923 - DNA, 2907 bp, Zea Mays
cgcaacaccgatgtggccacaccatattgacttgacaattgctgcacttagggcttgggccctgtttggtccataactcattctagaatttcattatcagctaaatagctcctagattttgtattggtttttgccagaatttcacaatctcaaaataggttgataatagaattcgtttgaattttgcgtagtatccaactcctcaaaatatatgggaaccaaacaccagattatttgtcatttgcgacaggtagcttggatccataccgtcaatcgcatcagatcgtgaatccctttcctcctaccgcgctagggttttgcaacggcctcaatggcgtccaccgccgccactgtcacgtttggcggcaagggcgccgccctatcgccggccgccgtctacgcgctctccatcggcctcgccgccccgggcatcgacccttcggcgcacaaggcgctctccacccgcgcgccctcgccacaggagacccccgcgccccttgccgccgcgctcccggcgctggcgcccgccgagtcccgcgccgccgcggccgtgttgctgaacaagctggtcctcactgcgtccgactctgcctccgcgctcgtcaccgccgccacggccgtcggcctcgcaggctcgctcgacctcgccgccgcgctgccgctcggctcccgggacgaggtcgcggtggcagcggcttccgcgcctgtcgcggtcgggctcgcagcgctggtcgactgctgcgccgcgccgctcgcccgcgttgccgacgccgtcgccgcgctgtcgtgcgaagccgtgcgcggggacgccgcggccttcgacgtgcaggcctccggcgacgggctctcctccaaggacgaggccgacgtcgctgccgacatcaaggtgctcgtcttcgggtccaagcttgtcggcgctgccgggggcgcccccgccgccgccacgttcgccaaggtgcccgcgctgaacgggatcttccgccaggcggttcgggcgctgcacgcccaagtgcgcatcgagctcaacgcgcctgtgaaattggggaagaaggatgccggtcaaaccgatgctgtgtcagtcttgaagggggtgtacaaccacttgctcaagttcagggactttctctcctgggaagcagctatggccatggcagtaattgaaacagacagttcaattgagaagccgcaatctgctgttgacaacgaagcagctggttcaagtgaaaaggcacaggctggtggggacaaagcaaagggtgacaagaagagcaagaagaagaaaactttggggaagggtacatctgctgtgctgatgctgcttagggaccatgtgacaaatggaagtactgttgcttccgtgaattctgtgcttgttgcagagtgggcagcctctctctcattgctctttgatcctaaatgtcccggattggtgtcccttgtggagaaagtgaaggagattgttgagagcaatgaagtcaggagattgcctaaaattcctaagggtacacgtgactttgggaaagagcaaatggcgataagagagcgagcattttcaattataactagtgtattcaagatgcacggtgctactgcacttgatacccctgtatttgagctgagagaaacccttatgggaaaatatggtgaagactcaaaattgatatatgacctggctgatcagggtggtgagctttgctctttgcgttatgatctgactgttccatttgcccggtacgttgccatgaatagcataagcgcactgaagagataccagattgcaaaagtatataggagagataatccatcaaagggaaggcacgtatgagataaaattaaatcacagaaagttgctggatggaatgttggagatttgtggtgtgcctcctcaaaagttcagaaccgtttgctcgagtattgacaagctggacaagcaaacattcgaacaggtgaagaaagaactggtggatgagaaaggtatatcaaatgaaactgcagatgaaattggcaatttagtgaagactagaggagcccccttggaagttttgatggagttgagaaaggatagcagcaagtttatgaataatgaagggtctgttgctgcactgaatgagctggagatattattcaaggctctggataaagcaaatgcaatagacaagatagtttttgatttaagtttggccagggggcttgattactacactggtgttatatatgaagccgtttttaagggttcagctcaggttggctccattgcagctggtggtcggtacgacaaccttgtgggtatgttcagcgggaagcaaatccccgctgttggtgtgagccttggaattgagagagtctttgcaatcatggagcaacaggagaaagaaagaaatgagaagatccggcctacagagacacaggtgctggtgtcaatcctgggaaaggaccttacactagctgcagagctcgcgagcgagctgtggaatgctgggttaaaggcagaattcaagctcactactagggtggcgaaccacatcaagtatgccttgcaatcaggcattccgtggatggtgctagtcggtgagtctgagttgcagaagggaagtgttaaattgaaggatgttgaagccaaccaggaagaagaggttgataggaaggattttgttcaagagctgaagaagagattgagtaaacccaacattcatttgaggcaaaatcaattacggcagaggcggagaatgatactgcagcattgtagtttaaagtgctggggatgtttttgttagattacccgtctagggtttggtgtcttccccatgtaattaccttctcacccctttgtaatggaccagccccaattacctaagtctattaataccacacccaaccctgattagggttagggtttttattccaact

SEQ ID NO: 76924 - DNA, 3502 bp, Zea Mays
ctccttcctccgatcccggggtcacaccgtccgaagcccaaaccaagcccagaccgatcgaccctgtccaaagcttatctaggttttcggttcctccacaggatggccgatcccgccgccggaggcgccatggtccccgctgccggaggcggcagcgtgtgggcgaacggcgccccccgcttcggcgacatggtctgggccaaggtgaagtcgcacccgtggtggccgggccacatctacagcgtcagcctcaccgacgacgaggaggtgcaccgcggctaccgctacgggctggtcctggtcgccttcttcggcgacaaaagctacgggtggttcgagcccagcgagctcgtccccttcgaggagcacttcaccgagaaggcggcccagggcggcagcacccgcagtagtttcgccggcgccgtggcggaggccgtcgacgaggtagcccgtcgcagcgcgctagcgctgctctgcccgtgcaagagccccgacgccttccgcccccaccccagcgacggcaacttcctcctggtcgatgtcccggcattcgacactgacgctgactaccaccccgaccagatccaggccgcacggcagcggttcgtgccgcggaaggcgctcgactacctgctggacgccgccgtgactcagcgggacgcggcggaaaaagcggcgcgcaccgtgcctgggatggagatggccgcgctgttctcggcgtaccgtcgcgcagtgttctcgccgatagacaacacctacgcccaagcgttcggggtggatcccgagctggcgcttgctgccgagcagaaagccgcggcagagcgagctcaacgagcgcggccgctcaaagggggccccaggaagacggcggaccaggccacaccggcggccggccgccggaggggaggcgccggcggcgccgccgccaggctcatggagaagatcgtgcccggagcgcccgccatgaagaccaagtccagcaagaaggaccagtacctgctcaagcgccgggacgcgcccgaggcctccgcacacagccagccgcagctcccagacgcgccgccgccggcacccacgctcgcggcggaggacggaccacctggcttcccggccagcggcgacccgcccacaccgccgctgcccgggagctccgtcgctgacgaggacttcatgctgcagaggcgcgtcccgctcgtcgatgtccctcccgccgtccaggcccagccgagcgagggccccgccgcgcccaagaacgcgaccaagctcaagaagccccgcaagcgcgagcgggaggaaggccccgatgcaacccccgactccgcggacgccgccggcgaccccaagaagaagaagaaaaagaagaagctttccgacgtggacggcgctggcggcaaggtcgccttcgtggttgagggccgcgacgtgcttgatctgacgcagagctacgagaacgacccacccgaggagttgaagagcctggacaagcccagtgccgccgccactgacggccagtcgcccaagaagaagaagcctgccccgaggcctggcgcagggaacgaccccaccaaagccggcgtcaagcgcgggccatcggaccgccagggggagctggccatcaagaagaaagccaagctcgataagatcaaggtactgtccagtgagaagaaggccgccggtctggagcagaaagacacggcggcggcggcggcgcagcagcaggcacgggctgcaggcgccaaggacaaggccgagatgggcgcagccaagaagaaggagccggcgtcggctcgcacagtcaggaccccgtcgccgacagcgctgatgatgaagttcccgctgaacagcacgctgccgtcggtggcgtcgctcaaggcgcggttcgcgcgcttcggcccgctggacgtggacggcatccgcgtgtactggaagtcccacatgtgccgggtcgtgtacaggttcaagttcgacgcggaggccgcgctcaggtacgccaaggccaacgccatgttcgggcaggtggacacgcagtaccacctccgcgaggtcgaggcgggggcgggccgcgagccgctggcggcgccggaagcagccccgcagcagcgctccgagctgcggctcatggagaccgctgcgttcaggcccggcacctccggcaacggagctccgctgcccatgtccagggccggggccgcgccggcgcgtccggccgtgggggtggggcagccgcccaagtcgatcttgaagaagagcaccgacgagggaagctctgggaccaccagggaggtctcccgtgtgaagttcgtgctggacggcgcggacggtggcacgctcgcgccgccgccgagcgtcggcggcaatggcaatggcgcagacgggggctcatcaatggtggccaaggccgctaaatccgtcgggttcgctccttcccaggctctgcagccaccaccgcgcacgctgcagccgcccatgcgcccggcgcaccagcagcctccgcgcgccgccgtcacgcagcagctcccgccgccgccgctgcctcagcatctcccgtaccaccagcacccccgcggcgccgacgggactccgctggcccctcccccaggtcagctgctggcatacccgcctcgtggccacggcgagggcccctccgcgcttcctgggctaccgccgccgctgccgtaccagcctcgccccaccggcttccccggtggacagcagctggggtacccgcctcgctccggtgacaacctgccactcctcgctggacagccgcagttcccgcctcgtcccagcaacgccaaggctggcagtgagggtccagcgtggaggaggggggagaaggagttcaaggaggaggtgtggaggctgatgacggggatcgccaagatggtggagcctctcacggacaagaacggcttcttcccctaccacctgttccgagcgcagtgagcctgctcccagttccccacgggctcgcatgcacgagcgcagcagaggtggggtcgccgcagctgagctgcatggagctgccgcgttgtatccgtcgggtcgggccccagggccagtggtagcaaaatagccgtaatagcaaccgggccggagagagtgaaggctggccggtgcctttgttcctttggtaacgtatgtgtggtttcgtagtactctggtttatgctccgtcgtgtagactctgggctgactgggaagtagacttgtacaataggatgttgtagtgcttgttttgttttgtttttgaaatcatcttcattttctatttaataataactgcagtattatcgatcgaaaaactcgggctagtttagaagccacaaaactggagaggattaaagattgaaaaactctaagggctagtttaggagccacaaaaccggagagaattaaagagactaaaattcactacttattccattttgaataagaaagggattttaacccctctaatcctctctgacttttagacttctaaactagccttaaggtcaaac

SEQ ID NO: 76925 - DNA, 883 bp, Zea Mays
cgatcccggggtcacaccgtccgaagcccaaaccaagcccagaccgatcgaccctgtccaaagcttatctaggttttcggttcctccacaggatggccgatcccgccgccggaggcgccatggtccccgctgccggaggcggcagcgtgtgggcgaacggcgccccccgcttcggcgacatggtctgggccaaggtgaagtcgcacccgtggtggccgggccacatctacagcgtcagcctcaccgacgacgaggaggtgcaccgcggctaccgctacgggctggtcctggtcgccttcttcggcgacaaaagctacgggtggttcgagcccagcgagctcgtccccttcgaggagcacttcaccgagaaggcggcccagggcggcagcacccgcagtagtttcgccggcgccgtggcggaggccgtcgacgagatccaggccgcacggcagcggttcgtgccgcggaaggcgctcgactacctgctggacgccgccgtgactcagcgggacgcggcggaaaaagcggcgcgcaccgtgcctgggatggagatggccgcgctgttctcggcgtaccgtcgcgcagtgttctcgccgatagacaacacctacgcccaagcgttcggggtggatcccgagctggcgcttgctgccgagcagaaagccgcggcagagcgagctcaacgaggaggcactgcgataagctggttgggtccgcatgtacacggtgaaggggaaggcactgcgctccacattgatccattgtggtgctccttagctattggtatttatataagcatgtatacgatatgtcagaatagatatgttaatcagagcattcagagtaactggtttggttagactgtgctccttgagggcttgtt

SEQ ID NO: 76926 - DNA, 1188 bp, Zea Mays
gtgctttcagcctcgatgggtaccgctggaggtctagagcaatcagtatttctagcacggcgtctggctaaactggaaatgctgaagcgtcgtggcaagggcccgccgaagaagggtcagggaaggcgtgccgtcaagaggagcaagtagtcgagctgtgctaccctatcaatgctcatctctgtttctggagcttgccttgttcttacattgctgtaacgtactaccagtgatttgtcgggtgagtgggcgacgacagatgcaaaaaaaaacccaccttttctatcaagtttagcttacagatgttttttttttcatcaaattgcaatgaaaccgccttctatgttggatggctgatgtgcttacagtagagttcatgatgctgacacctaattaagtaccggctacagtgtttcggtgataatttccaggatggaccaggtgcctttcggtccgtcaagattaggatgaaataaattcgggatctgaattaatcattctcaattgtacgacatgtatggcgtggcacgaatgaatcaaccgaggtcaaacatcgtcggagcatgcattatcgtggtgtgatgcggcgtctagaactcgccgcgtacggcgtcgatgcaactgccgccatggaacgcgcctggtgcggcgccacggccgcccccgtcgcgcctgcgaggcaccgggaggctcatcacgcacgcgaagacgctcgccgcgccgtcccgagcgagcgccgcggccacggcgcgcgcgccggccgggcggcacgcgttgcacgccggcccacggcacgggcagtgcggcgcccccgccgatgcgctgtgtgaaccccggcagcgccacggcggcgcctagctcctgcccggcgcagaacggtgcggccctgatccccgtgtaccggctcgcgtgcaggctcggcgcgccgtcgaaccgcagcacggcggagaggttgtacgtgatggccgaggccgcggcgtcgaatgccagggcgcggagctcgcccgacgcgatgtacgggacgacgtggtgcggccggaggagcagccgcgggatgagggacggcgcaaggacgagcacggccaggaacacgaccaggggcgcgaggcaagccgcagccgtggctgccactactgccacgcactgccgccgccgccgactcgccggcgacggcgtctccgtggacat

SEQ ID NO: 76927 - DNA, 3682 bp, Zea Mays
atgcgcggcgaggctggcaatgacggcggtggcggggatacccaactcctggacggcgccacacctcggttaggttctccttcgagtgatgacgacggaacacagagtgaggcgtatgattgggcgctgtacgacgaaacacagcctctggatggtgctgagacccagtttgtagaccaggtggaggaggagggtgtggctggcgattggacggagacacagttggagagtggcgacgaggatggtggcagtggcaatgaggatggcggcgatgacagtgaccaagtgaagacacaacaacaggtggaagatggggaacggggcaatgatggtggtggtggggatgataatgctggcaattggactaagacccagttggatgaagtatgcgaggtgtatggagcgaacaactttgttggagacatggttgaggcccagttggttgaggaatctgaggaggaggatgatgacaaggatggattaactgatgatggtgagcatgatcttggtgagtgggggaagacccagttggttgaagactctgatgaagacataggtgacgatgagttgagtgatggcactgttgtcctaagtgacaatgagagcttgtcagaagatgagaggggcacaaagtcaggaacggataaaagggatgcaaagttgggaatggaaggaagcatcgaggggttaaatggtgggattaagaagcatgatgataacaataattcggtagattctgatgcatcaacagatgaggagggtgacacaagttcaggtcaccttcagatgaaattaccttctgttcatgttgcatcagtaaggacatgtggaatttctgaacctcggaactctctgtctgtgaactgtatgaagcaatggaaacagaaggcctgggtcaacacaatacatcccctgccgaaaattgtagatgaatctacttcgtgtagcacctccgttggttgggttgataacgactcccatggttatgtacagaaccatgatcaagacggagcaaaaagcagagacaagtgctcaacagctaaaaaactttttgccgacacaacagtggaggatggtgaaaacaacagcagatgtattgctggattaagctatgtgggatcacaagagcctggtgatctgtcacaagcaaatgcttttgatgttgtggacagattgatttcaatcaatggtggattatcatctcaagaaacgaccccaaataaattggaaatagcaaagccatgtgtttcaagtaagaggggaactttaatgttggctgagaaggtcgaccttggtagaagttccaatgggaaagcagaaatatttaaatttgtggatagccttgaggatgagggaggaggtgactttttcagtaaaaacaaagacatcttgttgctgaaaccaattggtagaggaaaaccaaggagtcattttacaggagcaaagaaatcttccccaaaactttcacggggagaaaataaaacaggggaagcgttgaacaaaagaaattccaaactacctgggaggttggaaaactattcctttaacatattcaagactattcaaaagtgatgtagagagtaagcggccttctgaaaacaggactaagaaaaaccttttgaaggtcttagatgatctatcaaatgacaaatcattggaagaacaggaaaaggctgatgtagttttgaatgatgttggtccagatactcaaatggctgttgaagcaatggatgccctggtacaatgttcacctgctaaaagtttatcttctgaacatcaatctgtgctcaatagagatatgatagctgagaagtctagaatagctaaaagtcattcgaagaatggttctcctcagagagctagcaacatacaggaaggtgtcacaacacgttctaaaaaaggaaaagtaactgacttcagtgccaaacctcagaaagaaagactaagaggatctaagatgcaacaaagttctgagtctatagtaaaagtgaaacataagcaaacaaagtctgtgccagagaagagcaaagtttcaaagaaatttatcagtgaaaataagtaccatgagacacctgttgctcaccgaactaggcattgtggtaggaatgatccttctgcatttatcgagttatctaataaacacttgaggagaggtaagaaaatgacaggtgacaactccactattgggcaagtgcaaaataaccacattgcaaccgaatctggtttgagttattttgaaaaagaaagcacagagcagacttgtacaaataatgatcaagatcttcagcaacctaggtatggaagcacacaacggacaagtgtaaataatgttcgaaaccttgaagcacgcagagttgaatcaacaactgttgttacatgcagagattccccatcacatcccaaacggcaaagaacacctacaaaaatgatacagtcaactgctccagctgctgcaagtcatgaaataccatcagaattggcaagaccatgcaagaaaaggcggattttcataagaagtgtttctgacctgctaaagtatgcaaagagagaaccttcccatgggaaatcagcttctatgctatccagcatcatagaaaagtcattagctgcttatcctgtacttaattcttctataagagatgacaggaaaacttctgatgtcattagctctgcacagagactgaaggaatcctcccatattgagaatacaagcaaatcaccaaaaacgaatcctcaggttctggacagtgctatgaaaacaccgtcaaaagtggttaatgaattgtcacccacttttagtcctgtgaatccatcaaaaggctcaagtaggagcttgttaaaagcttctgttgcgagagaattgctgaagctagatcctgaaaatgtactatcaaatcagcagaaaaaagattccagaagagggaaggataaggccaatgccagtattttattcagccagcatttggatgacgatgttatcaagcgtcagaagaagccgctagagagggtaggacgatccataatggagggaaagggagtgcctcctgacctgctggtaatctcgtgcgaagaagactacgaagcttgtgcgccactactcgagaaaggtgctagtgttttcagcgtggagcttctactgaacggcatagtcatccagaaactggagtacgagaggcaccgccttttcatggaccgagtcaaacagacccgctcgtcgcggtggttgaaggacaccgtgcaaggccggttcgtccctgtacccaagcgtccccgggcctaggcagctcaagaccaatgtatatgtaagccatgcgaagctgttcttgctcgccccttggcctctctccagctgtaggcctgtgtaaatgtatgtgccggccgcaggtgcatctgccctgctgccgctgtgctggttgcttgatgcgggcctgatctttctgtttctctcccctgtatgttgtgcattataggtgttcatatgtattgtagcctgtttcttttttctctctctctctctagctcttctgaacatacatatgtttacccgacacaactgaaccttagtggcgatgagattgtcacgacggtggtaactgaggattgatctccttgttaagccggatggcgggagacaacatgtacaggtttatgggccatgggtcgttataataagtgatagtgg

SEQ ID NO: 76928 - DNA, 3970 bp, Zea Mays
atgcgcggcgaggctggcaatgacggcggtggcggggatacccaactcctggacggcgccacacctcggttaggttctccttcgagtgatgacgacggaacacagagtgaggcgtatgattgggcgctgtacgacgaaacacagcctctggatggtgctgagacccagtttgtagaccaggtggaggaggagggtgtggctggcgattggacggagacacagttggagagtggcgacgaggatggtggcagtggcaatgaggatggcggcgatgacagtgaccaagtgaagacacaacaacaggtggaagatggggaacggggcaatgatggtggtggtggggatgataatgctggcaattggactaagacccagttggatgaagtatgcgaggtgtatggagcgaacaactttgttggagacatggttgaggcccagttggttgaggaatctgaggaggaggatgatgacaaggatggattaactgatgatggtgagcatgatcttggtgagtgggggaagacccagttggttgaagactctgatgaagacataggtgacgatgagttgagtgatggcactgttgtcctaagtgacaatgagagcttgtcagaagatgagaggggcacaaagtcaggaacggataaaagggatgcaaagttgggaatggaaggaagcatcgaggggttaaatggtgggattaagaagcatgatgataacaataattcggtagattctgatgcatcaacagatgaggagggtgacacaagttcaggtcaccttcagatgaaattaccttctgttcatgttgcatcagtaaggacatgtggaatttctgaacctcggaactctctgtctgtgaactgtatgaagcaatggaaacagaaggcctgggtcaacacaatacatcccctgccgaaaattgtagatgaatctacttcgtgtagcacctccgttggttgggttgataacgactcccatggttatgtacagaaccatgatcaagacggagcaaaaagcagagacaagtgctcaacagctaaaaaactttttgccgacacaacagtggaggatggtgaaaacaacagcagatgtattgctggattaagctatgtgggatcacaagagcctggtgatctgtcacaagcaaatgcttttgatgttgtggacagattgatttcaatcaatggtggattatcatctcaagaaacgaccccaaataaattggaaatagcaaagccatgtgtttcaagtaagaggggaactttaatgttggctgagaaggtcgaccttggtagaagttccaatgggaaagcagaaatatttaaatttgtggatagccttgaggatgagggaggaggtgactttttcagtaaaaacaaagacatcttgttgctgaaaccaattggtagaggaaaaccaaggagtcattttacaggagcaaagaaatcttccccaaaactttcacggggagaaaataaaacaggggaagcgttgaacaaaagaaattccaaactacctgggaggttggaaaactattcctttaacatattcaagactattcaaaagtgatgtagagagtaagcggccttctgaaaacaggactaagaaaaaccttttgaaggtcttagatgatctatcaaatgacaaatcattggaagaacaggaaaaggctgatgtagttttgaatgatgttggtccagatactcaaatggctgttgaagcaatggatgccctggtacaatgttcacctgctaaaagtttatcttctgaacatcaatctgtgctcaatagagatatgatagctgagaagtctagaatagctaaaagtcattcgaagaatggttctcctcagagagctagcaacatacaggaaggtgtcacaacacgttctaaaaaaggaaaagtaactgacttcagtgccaaacctcagaaagaaagactaagaggatctaagatgcaacaaagttctgagtctatagtaaaagtgaaacataagcaaacaaagtctgtgccagagaagagcaaagtttcaaagaaatttatcagtgaaaataagtaccatgagacacctgttgctcaccgaactaggcattgtggtaggaatgatccttctgcatttatcgagttatctaataaacacttgaggagaggtaagaaaatgacaggtgacaactccactattgggcaagtgcaaaataaccacattgcaaccgaatctggtttgagttattttgaaaaagaaagcacagagcagacttgtacaaataatgatcaagatcttcagcaacctaggtatggaagcacacaacggacaagtgtaaataatgttcgaaaccttgaagcacgcagagttgaatcaacaactgttgttacatgcagagattccccatcacatcccaaacggcaaagaacacctacaaaaatgatacagtcaactgctccagctgctgcaagtcatgaaataccatcagaattggcaagaccatgcaagaaaaggcggattttcataagaagtgtttctgacctgctaaagtatgcaaagagagaaccttcccatgggaaatcagcttctatgctatccagcatcatagaaaagtcattagctgcttatcctgtacttaattcttctataagagatgacaggaaaacttctgatgtcattagctctgcacagagactgaaggaatcctcccatattgagaatacaagcaaatcaccaaaaacgaatcctcaggttctggacagtgctatgaaaacaccgtcaaaagtggttaatgaattgtcacccacttttagtcctgtgaatccatcaaaaggctcaagtaggagcttgttaaaagcttctgttgcgagagaattgctgaagctagatcctgaaaatgtactatcaaatcagcagaaaaaagattccagaagagggaaggataaggccaatgccagtattttattcagccagcatttggatgacgatgttatcaagcgtcagaagaaggatagattttgccgcacaaagaatatgctacaagcaataactatgggcaagccagtagttacatcaatgtggcttgaaaattgtgcacaagcaggctgttttattgatgaaaggaaatatattatgagggacgaaaaaaaggaaaaggagataggtttcagcatgcttatatcactggcctcagcttgcaaacaccctcttcttctgggaaaaagagtctttgtaacatcaaatgttaaaccaagtcaagtagtgatgactagcttggttaagtcatcatcagggcagccgctagagagggtaggacgatccataatggagggaaagggagtgcctcctgacctgctggtaatctcgtgcgaagaagactacgaagcttgtgcgccactactcgagaaaggtgctagtgttttcagcgtggagcttctactgaacggcatagtcatccagaaactggagtacgagaggcaccgccttttcatggaccgagtcaaacagacccgctcgtcgcggtggttgaaggacaccgtgcaaggccggttcgtccctgtacccaagcgtccccgggcctaggcagctcaagaccaatgtatatgtaagccatgcgaagctgttcttgctcgccccttggcctctctccagctgtaggcctgtgtaaatgtatgtgccggccgcaggtgcatctgccctgctgccgctgtgctggttgcttgatgcgggcctgatctttctgtttctctcccctgtatgttgtgcattataggtgttcatatgtattgtagcctgtttcttttttctctctctctctctagctcttctgaacatacatatgtttacccgacacaactgaaccttagtggcgatgagattgtcacgacggtggtaactgaggattgatctccttgttaagccggatggcgggagacaacatgtacaggtttatgggccatgggtcgttataataagtgatagtgg

SEQ ID NO: 76929 - DNA, 4045 bp, Zea Mays
gtcttcctccgaggatttctgggggttcagttgaatccccatccgccacactaagcccggccctacctgtgttgcgatgcgcggcgaggctggcaatgacggcggtggcggggatacccaactcctggacggcgccacacctcggttaggttctccttcgagtgatgacgacggaacacagagtgaggcgtatgattgggcgctgtacgacgaaacacagcctctggatggtgctgagacccagtttgtagaccaggtggaggaggagggtgtggctggcgattggacggagacacagttggagagtggcgacgaggatggtggcagtggcaatgaggatggcggcgatgacagtgaccaagtgaagacacaacaacaggtggaagatggggaacggggcaatgatggtggtggtggggatgataatgctggcaattggactaagacccagttggatgaagtatgcgaggtgtatggagcgaacaactttgttggagacatggttgaggcccagttggttgaggaatctgaggaggaggatgatgacaaggatggattaactgatgatggtgagcatgatcttggtgagtgggggaagacccagttggttgaagactctgatgaagacataggtgacgatgagttgagtgatggcactgttgtcctaagtgacaatgagagcttgtcagaagatgagaggggcacaaagtcaggaacggataaaagggatgcaaagttgggaatggaaggaagcatcgaggggttaaatggtgggattaagaagcatgatgataacaataattcggtagattctgatgcatcaacagatgaggagggtgacacaagttcaggtcaccttcagatgaaattaccttctgttcatgttgcatcagtaaggacatgtggaatttctgaacctcggaactctctgtctgtgaactgtatgaagcaatggaaacagaaggcctgggtcaacacaatacatcccctgccgaaaattgtagatgaatctacttcgtgtagcacctccgttggttgggttgataacgactcccatggttatgtacagaaccatgatcaagacggagcaaaaagcagagacaagtgctcaacagctaaaaaactttttgccgacacaacagtggaggatggtgaaaacaacagcagatgtattgctggattaagctatgtgggatcacaagagcctggtgatctgtcacaagcaaatgcttttgatgttgtggacagattgatttcaatcaatggtggattatcatctcaagaaacgaccccaaataaattggaaatagcaaagccatgtgtttcaagtaagaggggaactttaatgttggctgagaaggtcgaccttggtagaagttccaatgggaaagcagaaatatttaaatttgtggatagccttgaggatgagggaggaggtgactttttcagtaaaaacaaagacatcttgttgctgaaaccaattggtagaggaaaaccaaggagtcattttacaggagcaaagaaatcttccccaaaactttcacggggagaaaataaaacaggggaagcgttgaacaaaagaaattccaaactacctgggaggttggaaaactattcctttaacatattcaagactattcaaaagtgatgtagagagtaagcggccttctgaaaacaggactaagaaaaaccttttgaaggtcttagatgatctatcaaatgacaaatcattggaagaacaggaaaaggctgatgtagttttgaatgatgttggtccagatactcaaatggctgttgaagcaatggatgccctggtacaatgttcacctgctaaaagtttatcttctgaacatcaatctgtgctcaatagagatatgatagctgagaagtctagaatagctaaaagtcattcgaagaatggttctcctcagagagctagcaacatacaggaaggtgtcacaacacgttctaaaaaaggaaaagtaactgacttcagtgccaaacctcagaaagaaagactaagaggatctaagatgcaacaaagttctgagtctatagtaaaagtgaaacataagcaaacaaagtctgtgccagagaagagcaaagtttcaaagaaatttatcagtgaaaataagtaccatgagacacctgttgctcaccgaactaggcattgtggtaggaatgatccttctgcatttatcgagttatctaataaacacttgaggagaggtaagaaaatgacaggtgacaactccactattgggcaagtgcaaaataaccacattgcaaccgaatctggtttgagttattttgaaaaagaaagcacagagcagacttgtacaaataatgatcaagatcttcagcaacctaggtatggaagcacacaacggacaagtgtaaataatgttcgaaaccttgaagcacgcagagttgaatcaacaactgttgttacatgcagagattccccatcacatcccaaacggcaaagaacacctacaaaaatgatacagtcaactgctccagctgctgcaagtcatgaaataccatcagaattggcaagaccatgcaagaaaaggcggattttcataagaagtgtttctgacctgctaaagtatgcaaagagagaaccttcccatgggaaatcagcttctatgctatccagcatcatagaaaagtcattagctgcttatcctgtacttaattcttctataagagatgacaggaaaacttctgatgtcattagctctgcacagagactgaaggaatcctcccatattgagaatacaagcaaatcaccaaaaacgaatcctcaggttctggacagtgctatgaaaacaccgtcaaaagtggttaatgaattgtcacccacttttagtcctgtgaatccatcaaaaggctcaagtaggagcttgttaaaagcttctgttgcgagagaattgctgaagctagatcctgaaaatgtactatcaaatcagcagaaaaaagattccagaagagggaaggataaggccaatgccagtattttattcagccagcatttggatgacgatgttatcaagcgtcagaagaagatagattttgccgcacaaagaatatgctacaagcaataactatgggcaagccagtagttacatcaatgtggcttgaaaattgtgcacaagcaggctgttttattgatgaaaggaaatatattatgagggacgaaaaaaaggaaaaggagataggtttcagcatgcttatatcactggcctcagcttgcaaacaccctcttcttctgggaaaaagagtctttgtaacatcaaatgttaaaccaagtcaagtagtgatgactagcttggttaagtcatcatcagggcagccgctagagagggtaggacgatccataatggagggaaagggagtgcctcctgacctgctggtaatctcgtgcgaagaagactacgaagcttgtgcgccactactcgagaaaggtgctagtgttttcagcgtggagcttctactgaacggcatagtcatccagaaactggagtacgagaggcaccgccttttcatggaccgagtcaaacagacccgctcgtcgcggtggttgaaggacaccgtgcaaggccggttcgtccctgtacccaagcgtccccgggcctaggcagctcaagaccaatgtatatgtaagccatgcgaagctgttcttgctcgccccttggcctctctccagctgtaggcctgtgtaaatgtatgtgccggccgcaggtgcatctgccctgctgccgctgtgctggttgcttgatgcgggcctgatctttctgtttctctcccctgtatgttgtgcattataggtgttcatatgtattgtagcctgtttcttttttctctctctctctctagctcttctgaacatacatatgtttacccgacacaactgaaccttagtggcgatgagattgtcacgacggtggtaactgaggattgatctccttgttaagccggatggcgggagacaacatgtacaggtttatgggccatgggtcgttataataagtgatagtgg

SEQ ID NO: 76930 - DNA, 4187 bp, Zea Mays
ggggagagtcggtttcgttccgagatttcccttttctctctccgctcaattcgtttggattggtgcgctgcgcccaatccagttgggcgaagacatctgtggttcgattgagtcattttcgtcttcctccgaggatttctgggggttcagttgaatccccatccgccacactaagcccggccctacctgtgttgcgatgcgcggcgaggctggcaatgacggcggtggcggggatacccaactcctggacggcgccacacctcggttaggttctccttcgagtgatgacgacggaacacagagtgaggcgtatgattgggcgctgtacgacgaaacacagcctctggatggtgctgagacccagtttgtagaccaggtggaggaggagggtgtggctggcgattggacggagacacagttggagagtggcgacgaggatggtggcagtggcaatgaggatggcggcgatgacagtgaccaagtgaagacacaacaacaggtggaagatggggaacggggcaatgatggtggtggtggggatgataatgctggcaattggactaagacccagttggatgaagtatgcgaggtgtatggagcgaacaactttgttggagacatggttgaggcccagttggttgaggaatctgaggaggaggatgatgacaaggatggattaactgatgatggtgagcatgatcttggtgagtgggggaagacccagttggttgaagactctgatgaagacataggtgacgatgagttgagtgatggcactgttgtcctaagtgacaatgagagcttgtcagaagatgagaggggcacaaagtcaggaacggataaaagggatgcaaagttgggaatggaaggaagcatcgaggggttaaatggtgggattaagaagcatgatgataacaataattcggtagattctgatgcatcaacagatgaggagggtgacacaagttcagtaaggacatgtggaatttctgaacctcggaactctctgtctgtgaactgtatgaagcaatggaaacagaaggcctgggtcaacacaatacatcccctgccgaaaattgtagatgaatctacttcgtgtagcacctccgttggttgggttgataacgactcccatggttatgtacagaaccatgatcaagacggagcaaaaagcagagacaagtgctcaacagctaaaaaactttttgccgacacaacagtggaggatggtgaaaacaacagcagatgtattgctggattaagctatgtgggatcacaagagcctggtgatctgtcacaagcaaatgcttttgatgttgtggacagattgatttcaatcaatggtggattatcatctcaagaaacgaccccaaataaattggaaatagcaaagccatgtgtttcaagtaagaggggaactttaatgttggctgagaaggtcgaccttggtagaagttccaatgggaaagcagaaatatttaaatttgtggatagccttgaggatgagggaggaggtgactttttcagtaaaaacaaagacatcttgttgctgaaaccaattggtagaggaaaaccaaggagtcattttacaggagcaaagaaatcttccccaaaactttcacggggagaaaataaaacaggggaagcgttgaacaaaagaaattccaaactacctgggaggttggaaaactattcctttaacatattcaagactattcaaaagtgatgtagagagtaagcggccttctgaaaacaggactaagaaaaaccttttgaaggtcttagatgatctatcaaatgacaaatcattggaagaacaggaaaaggctgatgtagttttgaatgatgttggtccagatactcaaatggctgttgaagcaatggatgccctggtacaatgttcacctgctaaaagtttatcttctgaacatcaatctgtgctcaatagagatatgatagctgagaagtctagaatagctaaaagtcattcgaagaatggttctcctcagagagctagcaacatacaggaaggtgtcacaacacgttctaaaaaaggaaaagtaactgacttcagtgccaaacctcagaaagaaagactaagaggatctaagatgcaacaaagttctgagtctatagtaaaagtgaaacataagcaaacaaagtctgtgccagagaagagcaaagtttcaaagaaatttatcagtgaaaataagtaccatgagacacctgttgctcaccgaactaggcattgtggtaggaatgatccttctgcatttatcgagttatctaataaacacttgaggagaggtaagaaaatgacaggtgacaactccactattgggcaagtgcaaaataaccacattgcaaccgaatctggtttgagttattttgaaaaagaaagcacagagcagacttgtacaaataatgatcaagatcttcagcaacctaggtatggaagcacacaacggacaagtgtaaataatgttcgaaaccttgaagcacgcagagttgaatcaacaactgttgttacatgcagagattccccatcacatcccaaacggcaaagaacacctacaaaaatgatacagtcaactgctccagctgctgcaagtcatgaaataccatcagaattggcaagaccatgcaagaaaaggcggattttcataagaagtgtttctgacctgctaaagtatgcaaagagagaaccttcccatgggaaatcagcttctatgctatccagcatcatagaaaagtcattagctgcttatcctgtacttaattcttctataagagatgacaggaaaacttctgatgtcattagctctgcacagagactgaaggaatcctcccatattgagaatacaagcaaatcaccaaaaacgaatcctcaggttctggacagtgctatgaaaacaccgtcaaaagtggttaatgaattgtcacccacttttagtcctgtgaatccatcaaaaggctcaagtaggagcttgttaaaagcttctgttgcgagagaattgctgaagctagatcctgaaaatgtactatcaaatcagcagaaaaaagattccagaagagggaaggataaggccaatgccagtattttattcagccagcatttggatgacgatgttatcaagcgtcagaagaagatcttggcacgcttaggagtttgtgaagcattttcgatggccgatgcaacacactttgttgcagatagattttgccgcacaaagaatatgctacaagcaataactatgggcaagccagtagttacatcaatgtggcttgaaaattgtgcacaagcaggctgttttattgatgaaaggaaatatattatgagggacgaaaaaaaggaaaaggagataggtttcagcatgcttatatcactggcctcagcttgcaaacaccctcttcttctgggaaaaagagtctttgtaacatcaaatgttaaaccaagtcaagtagtgatgactagcttggttaagtcatcatcagggcagccgctagagagggtaggacgatccataatggagggaaagggagtgcctcctgacctgctggtaatctcgtgcgaagaagactacgaagcttgtgcgccactactcgagaaaggtgctagtgttttcagcgtggagcttctactgaacggcatagtcatccagaaactggagtacgagaggcaccgccttttcatggaccgagtcaaacagacccgctcgtcgcggtggttgaaggacaccgtgcaaggccggttcgtccctgtacccaagcgtccccgggcctaggcagctcaagaccaatgtatatgtaagccatgcgaagctgttcttgctcgccccttggcctctctccagctgtaggcctgtgtaaatgtatgtgccggccgcaggtgcatctgccctgctgccgctgtgctggttgcttgatgcgggcctgatctttctgtttctctcccctgtatgttgtgcattataggtgttcatatgtattgtagcctgtttcttttttctctctctctctctagctcttctgaacatacatatgtttacccgacacaactgaaccttagtggcgatgagattgtcacgacggtggtaactgaggattgatctccttgttaagccggatggcgggagacaacatgtacaggtttatgggccatgggtcgttataataagtgatagtgg

SEQ ID NO: 76931 - DNA, 4291 bp, Zea Mays
attttcccggccgtgcgcccctctcggtgagaggcgtctccctcctcctactccacctccccgccctctactgtctcgggggagagtcggtttcgttccgagatttcccttttctctctccgctcaattcgtttggattggtgcgctgcgcccaatccagttgggcgaagacatctgtggttcgattgagtcattttcgtcttcctccgaggatttctgggggttcagttgaatccccatccgccacactaagcccggccctacctgtgttgcgatgcgcggcgaggctggcaatgacggcggtggcggggatacccaactcctggacggcgccacacctcggttaggttctccttcgagtgatgacgacggaacacagagtgaggcgtatgattgggcgctgtacgacgaaacacagcctctggatggtgctgagacccagtttgtagaccaggtggaggaggagggtgtggctggcgattggacggagacacagttggagagtggcgacgaggatggtggcagtggcaatgaggatggcggcgatgacagtgaccaagtgaagacacaacaacaggtggaagatggggaacggggcaatgatggtggtggtggggatgataatgctggcaattggactaagacccagttggatgaagtatgcgaggtgtatggagcgaacaactttgttggagacatggttgaggcccagttggttgaggaatctgaggaggaggatgatgacaaggatggattaactgatgatggtgagcatgatcttggtgagtgggggaagacccagttggttgaagactctgatgaagacataggtgacgatgagttgagtgatggcactgttgtcctaagtgacaatgagagcttgtcagaagatgagaggggcacaaagtcaggaacggataaaagggatgcaaagttgggaatggaaggaagcatcgaggggttaaatggtgggattaagaagcatgatgataacaataattcggtagattctgatgcatcaacagatgaggagggtgacacaagttcaggtcaccttcagatgaaattaccttctgttcatgttgcatcagtaaggacatgtggaatttctgaacctcggaactctctgtctgtgaactgtatgaagcaatggaaacagaaggcctgggtcaacacaatacatcccctgccgaaaattgtagatgaatctacttcgtgtagcacctccgttggttgggttgataacgactcccatggttatgtacagaaccatgatcaagacggagcaaaaagcagagacaagtgctcaacagctaaaaaactttttgccgacacaacagtggaggatggtgaaaacaacagcagatgtattgctggattaagctatgtgggatcacaagagcctggtgatctgtcacaagcaaatgcttttgatgttgtggacagattgatttcaatcaatggtggattatcatctcaagaaacgaccccaaataaattggaaatagcaaagccatgtgtttcaagtaagaggggaactttaatgttggctgagaaggtcgaccttggtagaagttccaatgggaaagcagaaatatttaaatttgtggatagccttgaggatgagggaggaggtgactttttcagtaaaaacaaagacatcttgttgctgaaaccaattggtagaggaaaaccaaggagtcattttacaggagcaaagaaatcttccccaaaactttcacggggagaaaataaaacaggggaagcgttgaacaaaagaaattccaaactacctgggaggttggaaaactattcctttaacatattcaagactattcaaaagtgatgtagagagtaagcggccttctgaaaacaggactaagaaaaaccttttgaaggtcttagatgatctatcaaatgacaaatcattggaagaacaggaaaaggctgatgtagttttgaatgatgttggtccagatactcaaatggctgttgaagcaatggatgccctggtacaatgttcacctgctaaaagtttatcttctgaacatcaatctgtgctcaatagagatatgatagctgagaagtctagaatagctaaaagtcattcgaagaatggttctcctcagagagctagcaacatacaggaaggtgtcacaacacgttctaaaaaaggaaaagtaactgacttcagtgccaaacctcagaaagaaagactaagaggatctaagatgcaacaaagttctgagtctatagtaaaagtgaaacataagcaaacaaagtctgtgccagagaagagcaaagtttcaaagaaatttatcagtgaaaataagtaccatgagacacctgttgctcaccgaactaggcattgtggtaggaatgatccttctgcatttatcgagttatctaataaacacttgaggagaggtaagaaaatgacaggtgacaactccactattgggcaagtgcaaaataaccacattgcaaccgaatctggtttgagttattttgaaaaagaaagcacagagcagacttgtacaaataatgatcaagatcttcagcaacctaggtatggaagcacacaacggacaagtgtaaataatgttcgaaaccttgaagcacgcagagttgaatcaacaactgttgttacatgcagagattccccatcacatcccaaacggcaaagaacacctacaaaaatgatacagtcaactgctccagctgctgcaagtcatgaaataccatcagaattggcaagaccatgcaagaaaaggcggattttcataagaagtgtttctgacctgctaaagtatgcaaagagagaaccttcccatgggaaatcagcttctatgctatccagcatcatagaaaagtcattagctgcttatcctgtacttaattcttctataagagatgacaggaaaacttctgatgtcattagctctgcacagagactgaaggaatcctcccatattgagaatacaagcaaatcaccaaaaacgaatcctcaggttctggacagtgctatgaaaacaccgtcaaaagtggttaatgaattgtcacccacttttagtcctgtgaatccatcaaaaggctcaagtaggagcttgttaaaagcttctgttgcgagagaattgctgaagctagatcctgaaaatgtactatcaaatcagcagaaaaaagattccagaagagggaaggataaggccaatgccagtattttattcagccagcatttggatgacgatgttatcaagcgtcagaagaaggagtttgtgaagcattttcgatggccgatgcaacacactttgttgcagatagattttgccgcacaaagaatatgctacaagcaataactatgggcaagccagtagttacatcaatgtggcttgaaaattgtgcacaagcaggctgttttattgatgaaaggaaatatattatgagggacgaaaaaaaggaaaaggagataggtttcagcatgcttatatcactggcctcagcttgcaaacaccctcttcttctgggaaaaagagtctttgtaacatcaaatgttaaaccaagtcaagtagtgatgactagcttggttaagtcatcatcagggcagccgctagagagggtaggacgatccataatggagggaaagggagtgcctcctgacctgctggtaatctcgtgcgaagaagactacgaagcttgtgcgccactactcgagaaaggtgctagtgttttcagcgtggagcttctactgaacggcatagtcatccagaaactggagtacgagaggcaccgccttttcatggaccgagtcaaacagacccgctcgtcgcggtggttgaaggacaccgtgcaaggccggttcgtccctgtacccaagcgtccccgggcctaggcagctcaagaccaatgtatatgtaagccatgcgaagctgttcttgctcgccccttggcctctctccagctgtaggcctgtgtaaatgtatgtgccggccgcaggtgcatctgccctgctgccgctgtgctggttgcttgatgcgggcctgatctttctgtttctctcccctgtatgttgtgcattataggtgttcatatgtattgtagcctgtttcttttttctctctctctctctagctcttctgaacatacatatgtttacccgacacaactgaaccttagtggcgatgagattgtcacgacggtggtaactgaggattgatctccttgttaagccggatggcgggagacaacatgtacaggtttatgggccatgggtcgttataataagtgatagtgg

SEQ ID NO: 76932 - DNA, 4393 bp, Zea Mays
ctccccgctcccctggcttcctcttttccgccgccacgacttccgcgcgcgcagcatcgccgccgccgttctcgcgcacaacggatcagagattttcccggccgtgcgcccctctcggtgagaggcgtctccctcctcctactccacctccccgccctctactgtctcgggggagagtcggtttcgttccgagatttcccttttctctctccgctcaattcgtttggattggtgcgctgcgcccaatccagttgggcgaagacatctgtggttcgattgagtcattttcgtcttcctccgaggatttctgggggttcagttgaatccccatccgccacactaagcccggccctacctgtgttgcgatgcgcggcgaggctggcaatgacggcggtggcggggatacccaactcctggacggcgccacacctcggttctccttcgagtgatgacgacggaacacagagtgaggcgtatgattgggcgctgtacgacgaaacacagcctctggatggtgctgagacccagtttgtagaccaggtggaggaggagggtgtggctggcgattggacggagacacagttggagagtggcgacgaggatggtggcagtggcaatgaggatggcggcgatgacagtgaccaagtgaagacacaacaacaggtggaagatggggaacggggcaatgatggtggtggtggggatgataatgctggcaattggactaagacccagttggatgaagtatgcgaggtgtatggagcgaacaactttgttggagacatggttgaggcccagttggttgaggaatctgaggaggaggatgatgacaaggatggattaactgatgatggtgagcatgatcttggtgagtgggggaagacccagttggttgaagactctgatgaagacataggtgacgatgagttgagtgatggcactgttgtcctaagtgacaatgagagcttgtcagaagatgagaggggcacaaagtcaggaacggataaaagggatgcaaagttgggaatggaaggaagcatcgaggggttaaatggtgggattaagaagcatgatgataacaataattcggtagattctgatgcatcaacagatgaggagggtgacacaagttcaggtcaccttcagatgaaattaccttctgttcatgttgcatcagtaaggacatgtggaatttctgaacctcggaactctctgtctgtgaactgtatgaagcaatggaaacagaaggcctgggtcaacacaatacatcccctgccgaaaattgtagatgaatctacttcgtgtagcacctccgttggttgggttgataacgactcccatggttatgtacagaaccatgatcaagacggagcaaaaagcagagacaagtgctcaacagctaaaaaactttttgccgacacaacagtggaggatggtgaaaacaacagcagatgtattgctggattaagctatgtgggatcacaagagcctggtgatctgtcacaagcaaatgcttttgatgttgtggacagattgatttcaatcaatggtggattatcatctcaagaaacgaccccaaataaattggaaatagcaaagccatgtgtttcaagtaagaggggaactttaatgttggctgagaaggtcgaccttggtagaagttccaatgggaaagcagaaatatttaaatttgtggatagccttgaggatgagggaggaggtgactttttcagtaaaaacaaagacatcttgttgctgaaaccaattggtagaggaaaaccaaggagtcattttacaggagcaaagaaatcttccccaaaactttcacggggagaaaataaaacaggggaagcgttgaacaaaagaaattccaaactacctgggaggttggaaaactattcctttaacatattcaagactattcaaaagtgatgtagagagtaagcggccttctgaaaacaggactaagaaaaaccttttgaaggtcttagatgatctatcaaatgacaaatcattggaagaacaggaaaaggctgatgtagttttgaatgatgttggtccagatactcaaatggctgttgaagcaatggatgccctggtacaatgttcacctgctaaaagtttatcttctgaacatcaatctgtgctcaatagagatatgatagctgagaagtctagaatagctaaaagtcattcgaagaatggttctcctcagagagctagcaacatacaggaaggtgtcacaacacgttctaaaaaaggaaaagtaactgacttcagtgccaaacctcagaaagaaagactaagaggatctaagatgcaacaaagttctgagtctatagtaaaagtgaaacataagcaaacaaagtctgtgccagagaagagcaaagtttcaaagaaatttatcagtgaaaataagtaccatgagacacctgttgctcaccgaactaggcattgtggtaggaatgatccttctgcatttatcgagttatctaataaacacttgaggagaggtaagaaaatgacaggtgacaactccactattgggcaagtgcaaaataaccacattgcaaccgaatctggtttgagttattttgaaaaagaaagcacagagcagacttgtacaaataatgatcaagatcttcagcaacctaggtatggaagcacacaacggacaagtgtaaataatgttcgaaaccttgaagcacgcagagttgaatcaacaactgttgttacatgcagagattccccatcacatcccaaacggcaaagaacacctacaaaaatgatacagtcaactgctccagctgctgcaagtcatgaaataccatcagaattggcaagaccatgcaagaaaaggcggattttcataagaagtgtttctgacctgctaaagtatgcaaagagagaaccttcccatgggaaatcagcttctatgctatccagcatcatagaaaagtcattagctgcttatcctgtacttaattcttctataagagatgacaggaaaacttctgatgtcattagctctgcacagagactgaaggaatcctcccatattgagaatacaagcaaatcaccaaaaacgaatcctcaggttctggacagtgctatgaaaacaccgtcaaaagtggttaatgaattgtcacccacttttagtcctgtgaatccatcaaaaggctcaagtaggagcttgttaaaagcttctgttgcgagagaattgctgaagctagatcctgaaaatgtactatcaaatcagcagaaaaaagattccagaagagggaaggataaggccaatgccagtattttattcagccagcatttggatgacgatgttatcaagcgtcagaagaagatcttggcacgcttaggagtttgtgaagcattttcgatggccgatgcaacacactttgttgcagatagattttgccgcacaaagaatatgctacaagcaataactatgggcaagccagtagttacatcaatgtggcttgaaaattgtgcacaagcaggctgttttattgatgaaaggaaatatattatgagggacgaaaaaaaggaaaaggagataggtttcagcatgcttatatcactggcctcagcttgcaaacaccctcttcttctgggaaaaagagtctttgtaacatcaaatgttaaaccaagtcaagtagtgatgactagcttggttaagtcatcatcagggcagccgctagagagggtaggacgatccataatggagggaaagggagtgcctcctgacctgctggtaatctcgtgcgaagaagactacgaagcttgtgcgccactactcgagaaaggtgctagtgttttcagcgtggagcttctactgaacggcatagtcatccagaaactggagtacgagaggcaccgccttttcatggaccgagtcaaacagacccgctcgtcgcggtggttgaaggacaccgtgcaaggccggttcgtccctgtacccaagcgtccccgggcctaggcagctcaagaccaatgtatatgtaagccatgcgaagctgttcttgctcgccccttggcctctctccagctgtaggcctgtgtaaatgtatgtgccggccgcaggtgcatctgccctgctgccgctgtgctggttgcttgatgcgggcctgatctttctgtttctctcccctgtatgttgtgcattataggtgttcatatgtattgtagcctgtttcttttttctctctctctctctagctcttctgaacatacatatgtttacccgacacaactgaaccttagtggcgatgagattgtcacgacggtggtaactgaggattgatctccttgttaagccggatggcgggagacaacatgtacaggtttatgggccatgggtcgttataataagtgatagtgg

SEQ ID NO: 76933 - DNA, 4002 bp, Zea Mays
cgcgctccccgctcccctggcttcctcttttccgccgccacgacttccgcgcgcgcagcatcgccgccgccgttctcgcgcacaacggatcagagattttcccggccgtgcgcccctctcggtgagaggcgtctccctcctcctactccacctccccgccctctactgtctcgggggagagtcggtttcgttccgagatttcccttttctctctccgctcaattcgtttggattggtgcgctgcgcccaatccagttgggcgaagacatctgtggttcgattgagtcattttcgtcttcctccgaggatttctgggggttcagttgaatccccatccgccacactaagcccggccctacctgtgttgcgatgcgcggcgaggctggcaatgacggcggtggcggggatacccaactcctggacggcgccacacctcggttaggtgagtgcgcattgtttattggctctggttctgtgagcgattggtgtaaatgtgttatttttttgtggatgtgtattgcggtcatcaggttctccttcgagtgatgacgacggaacacagagtgaggcgtatgattgggcgctgtacgacgaaacacagcctctggatggtgctgagacccagtttgtagaccaggtggaggaggagggtgtggctggcgattggacggagacacagttggagagtggcgacgaggatggtggcagtggcaatgaggatggcggcgatgacagtgaccaagtgaagacacaacaacaggtggaagatggggaacggggcaatgatggtggtggtggggatgataatgctggcaattggactaagacccagttggatgaagtatgcgaggtgtatggagcgaacaactttgttggagacatggttgaggcccagttggttgaggaatctgaggaggaggatgatgacaaggatggattaactgatgatggtgagcatgatcttggtgagtgggggaagacccagttggttgaagactctgatgaagacataggtgacgatgagttgagtgatggcactgttgtcctaagtgacaatgagagcttgtcagaagatgagaggggcacaaagtcaggaacggataaaagggatgcaaagttgggaatggaaggaagcatcgaggggttaaatggtgggattaagaagcatgatgataacaataattcggtagattctgatgcatcaacagatgaggagggtgacacaagttcagaaccatgatcaagacggagcaaaaagcagagacaagtgctcaacagctaaaaaactttttgccgacacaacagtggaggatggtgaaaacaacagcagatgtattgctggattaagctatgtgggatcacaagagcctggtgatctgtcacaagcaaatgcttttgatgttgtggacagattgatttcaatcaatggtggattatcatctcaagaaacgaccccaaataaattggaaatagcaaagccatgtgtttcaagtaagaggggaactttaatgttggctgagaaggtcgaccttggtagaagttccaatgggaaagcagaaatatttaaatttgtggatagccttgaggatgagggaggaggtgactttttcagtaaaaacaaagacatcttgttgctgaaaccaattggtagaggaaaaccaaggagtcattttacaggagcaaagaaatcttccccaaaactttcacggggagaaaataaaacaggggaagcgttgaacaaaagaaattccaaactacctgggaggttggaaaactattcctttaacatattcaagactattcaaaagtgatgtagagagtaagcggccttctgaaaacaggactaagaaaaaccttttgaaggtcttagatgatctatcaaatgacaaatcattggaagaacaggaaaaggctgatgtagttttgaatgatgttggtccagatactcaaatggctgttgaagcaatggatgccctggtacaatgttcacctgctaaaagtttatcttctgaacatcaatctgtgctcaatagagatatgatagctgagaagtctagaatagctaaaagtcattcgaagaatggttctcctcagagagctagcaacatacaggaaggtgtcacaacacgttctaaaaaaggaaaagtaactgacttcagtgccaaacctcagaaagaaagactaagaggatctaagatgcaacaaagttctgagtctatagtaaaagtgaaacataagcaaacaaagtctgtgccagagaagagcaaagtttcaaagaaatttatcagtgaaaataagtaccatgagacacctgttgctcaccgaactaggcattgtggtaggaatgatccttctgcatttatcgagttatctaataaacacttgaggagaggtaagaaaatgacaggtgacaactccactattgggcaagtgcaaaataaccacattgcaaccgaatctggtttgagttattttgaaaaagaaagcacagagcagacttgtacaaataatgatcaagatcttcagcaacctaggtatggaagcacacaacggacaagtgtaaataatgttcgaaaccttgaagcacgcagagttgaatcaacaactgttgttacatgcagagattccccatcacatcccaaacggcaaagaacacctacaaaaatgatacagtcaactgctccagctgctgcaagtcatgaaataccatcagaattggcaagaccatgcaagaaaaggcggattttcataagaagtgtttctgacctgctaaagtatgcaaagagagaaccttcccatgggaaatcagcttctatgctatccagcatcatagaaaagtcattagctgcttatcctgtacttaattcttctataagagatgacaggaaaacttctgatgtcattagctctgcacagagactgaaggaatcctcccatattgagaatacaagcaaatcaccaaaaacgaatcctcaggttctggacagtgctatgaaaacaccgtcaaaagtggttaatgaattgtcacccacttttagtcctgtgaatccatcaaaaggctcaagtaggagcttgttaaaagcttctgttgcgagagaattgctgaagctagatcctgaaaatgtactatcaaatcagcagaaaaaagattccagaagagggaaggataaggccaatgccagtattttattcagccagcatttggatgacgatgttatcaagcgtcagaagaagggaaaaagagtctttgtaacatcaaatgttaaaccaagtcaagtagtgatgactagcttggttaagtcatcatcagggcagccgctagagagggtaggacgatccataatggagggaaagggagtgcctcctgacctgctggtaatctcgtgcgaagaagactacgaagcttgtgcgccactactcgagaaaggtgctagtgttttcagcgtggagcttctactgaacggcatagtcatccagaaactggagtacgagaggcaccgccttttcatggaccgagtcaaacagacccgctcgtcgcggtggttgaaggacaccgtgcaaggccggttcgtccctgtacccaagcgtccccgggcctaggcagctcaagaccaatgtatatgtaagccatgcgaagctgttcttgctcgccccttggcctctctccagctgtaggcctgtgtaaatgtatgtgccggccgcaggtgcatctgccctgctgccgctgtgctggttgcttgatgcgggcctgatctttctgtttctctcccctgtatgttgtgcattataggtgttcatatgtattgtagcctgtttcttttttctctctctctctctagctcttctgaacatacatatgtttacccgacacaactgaaccttagtggcgatgagattgtcacgacggtggtaactgaggattgatctccttgttaagccggatggcgggagacaacatgtacaggtttatgggccatgggtcgttataataagtgatagtgg

SEQ ID NO: 76934 - DNA, 4245 bp, Zea Mays
ctttcctgccccatttcctgtccccgcgcgcgctccccgctcccctggcttcctcttttccgccgccacgacttccgcgcgcgcagcatcgccgccgccgttctcgcgcacaacggatcagagattttcccggccgtgcgcccctctcggatttctgggggttcagttgaatccccatccgccacactaagcccggccctacctgtgttgcgatgcgcggcgaggctggcaatgacggcggtggcggggatacccaactcctggacggcgccacacctcggttaggttctccttcgagtgatgacgacggaacacagagtgaggcgtatgattgggcgctgtacgacgaaacacagcctctggatggtgctgagacccagtttgtagaccaggtggaggaggagggtgtggctggcgattggacggagacacagttggagagtggcgacgaggatggtggcagtggcaatgaggatggcggcgatgacagtgaccaagtgaagacacaacaacaggtggaagatggggaacggggcaatgatggtggtggtggggatgataatgctggcaattggactaagacccagttggatgaagtatgcgaggtgtatggagcgaacaactttgttggagacatggttgaggcccagttggttgaggaatctgaggaggaggatgatgacaaggatggattaactgatgatggtgagcatgatcttggtgagtgggggaagacccagttggttgaagactctgatgaagacataggtgacgatgagttgagtgatggcactgttgtcctaagtgacaatgagagcttgtcagaagatgagaggggcacaaagtcaggaacggataaaagggatgcaaagttgggaatggaaggaagcatcgaggggttaaatggtgggattaagaagcatgatgataacaataattcggtagattctgatgcatcaacagatgaggagggtgacacaagttcaggtcaccttcagatgaaattaccttctgttcatgttgcatcagtaaggacatgtggaatttctgaacctcggaactctctgtctgtgaactgtatgaagcaatggaaacagaaggcctgggtcaacacaatacatcccctgccgaaaattgtagatgaatctacttcgtgtagcacctccgttggttgggttgataacgactcccatggttatgtacagaaccatgatcaagacggagcaaaaagcagagacaagtgctcaacagctaaaaaactttttgccgacacaacagtggaggatggtgaaaacaacagcagatgtattgctggattaagctatgtgggatcacaagagcctggtgatctgtcacaagcaaatgcttttgatgttgtggacagattgatttcaatcaatggtggattatcatctcaagaaacgaccccaaataaattggaaatagcaaagccatgtgtttcaagtaagaggggaactttaatgttggctgagaaggtcgaccttggtagaagttccaatgggaaagcagaaatatttaaatttgtggatagccttgaggatgagggaggaggtgactttttcagtaaaaacaaagacatcttgttgctgaaaccaattggtagaggaaaaccaaggagtcattttacaggagcaaagaaatcttccccaaaactttcacggggagaaaataaaacaggggaagcgttgaacaaaagaaattccaaactacctgggaggttggaaaactattcctttaacatattcaagactattcaaaagtgatgtagagagtaagcggccttctgaaaacaggactaagaaaaaccttttgaaggtcttagatgatctatcaaatgacaaatcattggaagaacaggaaaaggctgatgtagttttgaatgatgttggtccagatactcaaatggctgttgaagcaatggatgccctggtacaatgttcacctgctaaaagtttatcttctgaacatcaatctgtgctcaatagagatatgatagctgagaagtctagaatagctaaaagtcattcgaagaatggttctcctcagagagctagcaacatacaggaaggtgtcacaacacgttctaaaaaaggaaaagtaactgacttcagtgccaaacctcagaaagaaagactaagaggatctaagatgcaacaaagttctgagtctatagtaaaagtgaaacataagcaaacaaagtctgtgccagagaagagcaaagtttcaaagaaatttatcagtgaaaataagtaccatgagacacctgttgctcaccgaactaggcattgtggtaggaatgatccttctgcatttatcgagttatctaataaacacttgaggagaggtaagaaaatgacaggtgacaactccactattgggcaagtgcaaaataaccacattgcaaccgaatctggtttgagttattttgaaaaagaaagcacagagcagacttgtacaaataatgatcaagatcttcagcaacctaggtatggaagcacacaacggacaagtgtaaataatgttcgaaaccttgaagcacgcagagttgaatcaacaactgttgttacatgcagagattccccatcacatcccaaacggcaaagaacacctacaaaaatgatacagtcaactgctccagctgctgcaagtcatgaaataccatcagaattggcaagaccatgcaagaaaaggcggattttcataagaagtgtttctgacctgctaaagtatgcaaagagagaaccttcccatgggaaatcagcttctatgctatccagcatcatagaaaagtcattagctgcttatcctgtacttaattcttctataagagatgacaggaaaacttctgatgtcattagctctgcacagagactgaaggaatcctcccatattgagaatacaagcaaatcaccaaaaacgaatcctcaggttctggacagtgctatgaaaacaccgtcaaaagtggttaatgaattgtcacccacttttagtcctgtgaatccatcaaaaggctcaagtaggagcttgttaaaagcttctgttgcgagagaattgctgaagctagatcctgaaaatgtactatcaaatcagcagaaaaaagattccagaagagggaaggataaggccaatgccagtattttattcagccagcatttggatgacgatgttatcaagcgtcagaagaagatcttggcacgcttaggagtttgtgaagcattttcgatggccgatgcaacacactttgttgcagatagattttgccgcacaaagaatatgctacaagcaataactatgggcaagccagtagttacatcaatgtggcttgaaaattgtgcacaagcaggctgttttattgatgaaaggaaatatattatgagggacgaaaaaaaggaaaaggagataggtttcagcatgcttatatcactggcctcagcttgcaaacaccctcttcttctgggaaaaagagtctttgtaacatcaaatgttaaaccaagtcaagtagtgatgactagcttggttaagtcatcatcagggcagccgctagagagggtaggacgatccataatggagggaaagggagtgcctcctgacctgctggtaatctcgtgcgaagaagactacgaagcttgtgcgccactactcgagaaaggtgctagtgttttcagcgtggagcttctactgaacggcatagtcatccagaaactggagtacgagaggcaccgccttttcatggaccgagtcaaacagacccgctcgtcgcggtggttgaaggacaccgtgcaaggccggttcgtccctgtacccaagcgtccccgggcctaggcagctcaagaccaatgtatatgtaagccatgcgaagctgttcttgctcgccccttggcctctctccagctgtaggcctgtgtaaatgtatgtgccggccgcaggtgcatctgccctgctgccgctgtgctggttgcttgatgcgggcctgatctttctgtttctctcccctgtatgttgtgcattataggtgttcatatgtattgtagcctgtttcttttttctctctctctctctagctcttctgaacatacatatgtttacccgacacaactgaaccttagtggcgatgagattgtcacgacggtggtaactgaggattgatctccttgttaagccggatggcgggagacaacatgtacaggtttatgggccatgggtcgttataataagtgatagtgg

SEQ ID NO: 76935 - DNA, 2652 bp, Zea Mays
atccgacggacaatcaagttccttgcctccccccggcatcacccaccgtcccgatcccgaccagccagggtttatcgcgccgcgccgcgccgcctcataaacccacctcgcatccgccccgccgcggcggcgcctccagaagaactcccacaaacttcggcagcggcgggcgcgcacccaacaagccatgtggagcctcctacgggcagcctcgccattgctccgccgcagctccgggcgcttggccgcgaggggcgaggcggtcgccgcggcctcggcctccgctccggcgcccgcggggttgctggcggtgggagcgggagcctacagccggtggcggcgggcgatgtctaccaaggggaggagcatgcggagcaaggtggagaagcggatggcgagggagactggccgcacgcagcgggagctccgccgcgccgtcaagctcaggaagaagctcatgaccgaggacgagaagctcatctacaacctgcgcagggccaagaaaaaagttgctttgctcctacagaagctcaagaagtatgagctaccagacttaccagctccgcgtcatgatcctgagctgttaacggcagagcaactacaagcttacaagaagattggattcagaaacagaaactatgtgcctgttggagttcgtggagtctttggaggtgttgttcaaaacatgcatatgcactggaaattccatgagacggtgcaagtttgctgtgacaacttcccaaaggaaaagattaaggaaatggcagcaatgctgacaagattgagtggtggaatagtgatcaacattcataataccaaaacaatcatcatgttccgaggaagaaactaccgtcaaccaaagaaccttatacctttcaacacacttaccaaaaggaaggcactattcaaggctagatttgaacaagcacttgaatcacaaaaattaaacatcaagaaaatagaaacccaactccgtcgtaagggtatcaatccagaggacccagttgctatggctagcatccagcgtgttgcctctacgttcttccgagccatagatgagcagcaaggtactccgtatattttccgtggggacacacaaccttctgctgggacctctgaaataaaagaaccacgtgatgaaccatctgaagatagtgatcaggaggagcttgacaggttcatttcagagatagaaagtgcagcagagaagcaatgggaggaagaagaggctgcagagaaagaagaatcttcaagaatgcgatattgggagagggaagacgtaggtgatcgaaggggtttcaacagaaataatgaaaactcagattacgaggatagaggacatggaagatataggatagagcataacaacaacagaaggacttcagatgtgaggaagtgggatgatgatagcgagttcgaggcatcaggtgaagaatgggactctggtgatgacaggggtaatgctccgggctttgacagtgatcgagattctattgatgagcatcctcgacgatttggaagcatgcggaatgagaagagcagatccagttggacacaggattttgttcctacgcgagacgtgggcgaggggaaggttttcaatagaagctatgccaattctgatgtttacgatagaggccagggaagacataggatagataacaacagcagcaaaagggcatcagatgcaaggaggtgggatgatagtgagatcgaggcatcaggcgaagaatgggacactggtgttgacagtgataatgatctcgaagacgcaactgatggtcatcctcggcaattcaaaagtatgaggaatgagaagagcagatcccgtggcaggcagaattccattcctggcggattcagaggatccaatcggattacagggaattcagctgatgcttccgatggcgctatgttcagatgcagtaatggtgatgagttaggcactgaagacgaggacttgtcggtgtcggattataggggggaagcgacgaactcaagatcccccaaggtgaatttcccaaatttccacagcgggagtgaggatagcgatgagaacaggaaaaatgatggcaaggtcagcatcaatggttgtcaagtccaagttctttcattggtggtgttgctcatgtactgtccaatggaaatctcgaggagctagaagaataagcatggtttccataggaacaactgtttgaacttttactgcaagttttcggacgtcttctattccagttgtcatagtaacctgaaaagctgttggagggcaagttgtcaagggtgtgctagcctcatcaaagccagaatgctgcatgacttgcacaagccgaggacaaagtaacagattacagatgtggtcagagttcactatcgaggtttctgaaggtctcagaaatgtgaaatcgtcactctgcgatcacatttatttctcatcttattcttttatttttgatgtgaagagaacatgcacatagatttatctcaaggccatgtgtaccttgtcttgttttggttaaaatgtccgatacacgttcttcagagcgtcctctacggtgtgaaactttaactctgttttagtgtcgtgtatgccatcaccgtgctcattgttctcttagtttagtcgatcgaaacgatgatcgaaaatttagactc

SEQ ID NO: 76936 - DNA, 3338 bp, Zea Mays
ccacgcggctgcgggctgcggcgggggcggcgtccgaggcttagggtttagcgtttggaggagtttaggggtttgtgaggaggaagaggaggaggaggaggaggaggaggagcggatggggacagcggggaagggcgcgtgggtggtgccggcgccggcgtacagggaggtggaggggtgggagggcgcgggggacgacgcgccgggcttcaggtgcgcccactcgctcaccgccgtcgcgcctaccaagggccacggcccgcggctcatcctcttcggcggcgccaccgccatcgagaccggcgcatcttcgggcctccccggcatcaggctcgcgggggtgacgaactcggtgcactcgtacgacgtggagacgcgcaggtggacgaggttacatcctgctggagagcctccgtctccgagggccgcgcatgctgcagctgcagtgggcaccatggttgttttccagggcactccacagacgatctctatgtccttgacctcacaaacgacaagtttaaatggcacagggttgttgttcaaggggcggggcctggtcctcgctatggtcactgcatggatttggtagctcaacggtatcttgttactgtctcaggaaatgacggaaagcgggccttgtcagatgcttgggcattggacacagcacagaaaccatataggtggcagaaacttaaccctgaaggtgatagaccttcagcaagaatgtatgctaccgccagtacacgctctgatggcatgcttttactttgtggtggaagggatgcttctggaatgccactgtctgatgcctatgggctactaatgcatacaaatggccagtgggaatggactctagccccaggggtatctccatctcctagatatcagcatgcagccgtttttgttggtgctcggttgcatgttactggaggtgtccttagaggaggcagagctattgaaggagagggcgcaatagcagtcctggacactgctgctggagtttggttggatagaaatggcattgtgacctctcgtactttgaagtcatccaatgaacatgatgcttcttcggatctacttcggcgctgtcgtcatgctgctgcctcagttggttctcagatttacatttatggtggactcaggggagatatcctcctcgatgatttcctggttgctgagaatgcacccttccaatcagaaatcacttcgtctatgtacaatgttgatagagtccctaggggggaaactcaaaatagaaacaataattttcattcagattcacctgtccatcaatctacaaataacaggcaagaggcagcttctggtttcagtgcggacaagaagtcaattgacatgttgatagaggcctcaactgcggaagctgaagctgtcagcgctgtatggcgagctgctaaggaagcatctgcagcgtcttcggaagacagtctttcggagggaataggatcagaatccccattgagtgaaacttcaccaatgcctgaagatttcgatgatggggggtctctagaaccagatgtgaaactacattctagagcagttgtggttgctaaagaagcagtaggagatttaggatgcttggtcaggcagctctcactggatcagtttgagaatgaaagcagacggatgcatccttcaaacaatgaccaatcttatccaggccggagaacattaaatagacaacgatcaccacaaggtttgcataagaaggttatttcgttcttacttaagccaagaaattggagagctcctgctgatagaacattttttctggattcttacgaagttggcgagctatgctacgctgccgagcagatttttatgcaagaaccaactgttttacaattaaaagcaccaattaaagtatttggtgatcttcatgggcagtttggggacttaatgcgcctttttgatgagtatggttttccgtcaactgctggtgacataacgtatattgattatctcttcttgggagactatgttgaccgaggtcagcacagcttagagacaatagctttgcttcttgctcttaaaatcgagtaccctgaaaatgtacacttgatcagaggaaatcatgaagctgctgacatcaatgccctttttggcttccgccttgaatgcattgagagaatgggtgaaagtgatggaatatgggcttggacaagattcaatcaactgttcaattatctcccactcgctgccatgatagaaaagaaaataatctgcatgcatggaggcataggaaggtcaataaacacagtggagcaaattgagaaacttgagaggcctatcacaatggatgttggttccattgtcctcatggacctgctatggtctgatcctacagaaaatgatagtgtggagggtttgagacctaatgcacgagggcccggcttagtgacatttgggcctgatcgagtaacagaattctgtaaacgaaacaaattgcagttgatcataagagcccatgagtgtgttatggatgggtttgagcgtttcgctcatggacaattgatcactttattttcagcaacaaattactgtggtactgcgaacaacgcaggggccatacttgttgtcggcaggggcttagttatcgtgccaaagttaattcatccacttccacctcctgttaattcacctgagtcctcccccgaacgtggggatgccacatggatgcaggagcttaacattcagcggccacctactccaaccagagggcggccacaagctgccggtgataggaattctcttgcttacatatgatacttgacacgacagagccacctccatctgctggatatgtttgtttgtaatcagaaatttctttaccagtttcaaggtacatatggtatagccaagaagaacaatcaaccaacaggacatcatggatacacttgtgatcagttccctgcatttcagatctcaagcaacattgtatgattgcgataccagtggacaataatcaagtctgatgtagttgtaatagctaatctgtaatttcagtgtacatggatagattgttctttcgtcagagtaggaaggtttccaaatgtttgcatactatgcatgctgcagcctgggacgcggtttaaacaggacagctatacaagttgccagatctgagctagattgggcagagaagatttgaaccattttatttgctctccgcggagcgcgaatgtaagaggttgtgttgtgttgtgaaatactgaattcgttataggtatttgtgcaataaattaagttttgcttaaatcagtgaatgctttggtttagtgacctgagttacaacgacaacaaagccctttagttagaga

SEQ ID NO: 76937 - DNA, 3495 bp, Zea Mays
actccagttcccacacggcggcggccgcgcccgccatttactccgctccggcgtactcctcccactcctgagctgtcgctgacactgacagcaacccccattgactcccgacatccacagccgcacttactcacgtgccaccgacactccggtcccaccctatgaaccccctcccaccgccaccagggccccgccgcgttcccaccctactacctgtcaccgcggccgtcgtctcccccgtcctattcacgaattccgaattccactgcgctgcgcttctgctccccccttctctctccctccgtgttcgctccctcggatcccacgcggctgcgggctgcggcgggggcggcgtccgaggcttagggtttagcgtttggaggagtttaggggtttgtgaggaggaagaggaggaggaggaggaggaggaggagcggatggggacagcggggaagggcgcgtgggtggtgccggcgccggcgtacagggaggtggaggggtgggagggcgcgggggacgacgcgccgggcttcaggtgcgcccactcgctcaccgccgtcgcgcctaccaagggccacggcccgcggctcatcctcttcggcggcgccaccgccatcgagaccggcgcatcttcgggcctccccggcatcaggctcgcgggggtgacgaactcggtgcactcgtacgacgtggagacgcgcaggtggacgaggttacatcctgctggagagcctccgtctccgagggccgcgcatgctgcagctgcagtgggcaccatggttgttttccagggtggaattggaccagcagggcactccacagacgatctctatgtccttgacctcacaaacgacaagtttaaatggcacagggttgttgttcaaggggcggggcctggtcctcgctatggtcactgcatggatttggtagctcaacggtatcttgttactgtctcaggaaatgacggaaagcgggccttgtcagatgcttgggcattggacacagcacagaaaccatataggtggcagaaacttaaccctgaaggtgatagaccttcagcaagaatgtatgctaccgccagtacacgctctgatggcatgcttttactttgtggtggaagggatgcttctggaatgccactgtctgatgcctatgggctactaatgcatacaaatggccagtgggaatggactctagccccaggggtatctccatctcctagatatcagcatgcagccgtttttgttggtgctcggttgcatgttactggaggtgtccttagaggaggcagagctattgaaggagagggcgcaatagcagtcctggacactgctgctggagtttggttggatagaaatggcattgtgacctctcgtactttgaagtcatccaatgaacatgatgcttcttcggatctacttcggcgctgtcgtcatgctgctgcctcagttggttctcagatttacatttatggtggactcaggggagtgcggacaagaagtcaattgacatgttgatagaggcctcaactgcggaagctgaagctgtcagcgctgtatggcgagctgctaaggaagcatctgcagcgtcttcggaagacagtctttcggagggaataggatcagaatccccattgagtgaaacttcaccaatgcctgaagatttcgatgatggggggtctctagaaccagatgtgaaactacattctagagcagttgtggttgctaaagaagcagtaggagatttaggatgcttggtcaggcagctctcactggatcagtttgagaatgaaagcagacggatgcatccttcaaacaatgaccaatcttatccaggccggagaacattaaatagacaacgatcaccacaaggtttgcataagaaggttatttcgttcttacttaagccaagaaattggagagctcctgctgatagaacattttttctggattcttacgaagttggcgagctatgctacgctgccgagcagatttttatgcaagaaccaactgttttacaattaaaagcaccaattaaagtatttggtgatcttcatgggcagtttggggacttaatgcgcctttttgatgagtatggttttccgtcaactgctggtgacataacgtatattgattatctcttcttgggagactatgttgaccgaggtcagcacagcttagagacaatagctttgcttcttgctcttaaaatcgagtaccctgaaaatgtacacttgatcagaggaaatcatgaagctgctgacatcaatgccctttttggcttccgccttgaatgcattgagagaatgggtgaaagtgatggaatatgggcttggacaagattcaatcaactgttcaattatctcccactcgctgccatgatagaaaagaaaataatctgcatgcatggaggcataggaaggtcaataaacacagtggagcaaattgagaaacttgagaggcctatcacaatggatgttggttccattgtcctcatggacctgctatggtctgatcctacagaaaatgatagtgtggagggtttgagacctaatgcacgagggcccggcttagtgacatttgggcctgatcgagtaacagaattctgtaaacgaaacaaattgcagttgatcataagagcccatgagtgtgttatggatgggtttgagcgtttcgctcatggacaattgatcactttattttcagcaacaaattactgtggtactgcgaacaacgcaggggccatacttgttgtcggcaggggcttagttatcgtgccaaagttaattcatccacttccacctcctgttaattcacctgagtcctcccccgaacgtggggatgccacatggatgcaggagcttaacattcagcggccacctactccaaccagagggcggccacaagctgccggtgataggaattctcttgcttacatatgatacttgacacgacagagccacctccatctgctggatatgtttgtttgtaatcagaaatttctttaccagtttcaaggtacatatggtatagccaagaagaacaatcaaccaacaggacatcatggatacacttgtgatcagttccctgcatttcagatctcaagcaacattgtatgattgcgataccagtggacaataatcaagtctgatgtagttgtaatagctaatctgtaatttcagtgtacatggatagattgttctttcgtcagagtaggaaggtttccaaatgtttgcatactatgcatgctgcagcctgggacgcggtttaaacaggacagctatacaagttgccagatctgagctagattgggcagagaagatttgaaccattttatttgctctccgcggagcgcgaatgtaagaggttgtgttgtgttgtgaaatactgaattcgttataggtatttgtgcaataaattaagttttgcttaaatcagtgaatgctttggtttagtgacctgagttacaacgacaacaaagccctttagttagaga

SEQ ID NO: 76938 - DNA, 3589 bp, Zea Mays
actccagttcccacacggcggcggccgcgcccgccatttactccgctccggcgtactcctcccactcctgagctgtcgctgacactgacagcaacccccattgactcccgacatccacagccgcacttactcacgtgccaccgacactccggtcccaccctatgaaccccctcccaccgccaccagggccccgccgcgttcccaccctactacctgtcaccgcggccgtcgtctcccccgtcctattcacgaattccgaattccactgcgctgcgcttctgctccccccttctctctccctccgtgttcgctccctcggatcccacgcggctgcgggctgcggcgggggcggcgtccgaggcttagggtttagcgtttggaggagtttaggggtttgtgaggaggaagaggaggaggaggaggaggaggaggagcggatggggacagcggggaagggcgcgtgggtggtgccggcgccggcgtacagggaggtggaggggtgggagggcgcgggggacgacgcgccgggcttcaggtgcgcccactcgctcaccgccgtcgcgcctaccaagggccacggcccgcggctcatcctcttcggcggcgccaccgccatcgagaccggcgcatcttcgggcctccccggcatcaggctcgcgggggtgacgaactcggtgcactcgtacgacgtggagacgcgcaggtggacgaggttacatcctgctggagagcctccgtctccgagggccgcgcatgctgcagctgcagtgggcaccatggttgttttccagggtggaattggaccagcagggcactccacagacgatctctatgtccttgacctcacaaacgacaagtttaaatggcacagggttgttgttcaaggggcggggcctggtcctcgctatggtcactgcatggatttggtagctcaacggtatcttgttactgtctcaggaaatgacggaaagcgggccttgtcagatgcttgggcattggacacagcacagaaaccatataggtggcagaaacttaaccctgaaggtgatagaccttcagcaagaatgtatgctaccgccagtacacgctctgatggcatgcttttactttgtggtggaagggatgcttctggaatgccactgtctgatgcctatgggctactaatgcatacaaatggccagtgggaatggactctagccccaggggtatctccatctcctagatatcagcatgcagccgtttttgttggtgctcggttgcatgttactggaggtgtccttagaggaggcagagctattgaaggagagggcgcaatagcagtcctggacactgctgctggagtttggttggatagaaatggcattgtgacctctcgtactttgaagtcatccaatgaacatgatgcttcttcggatctacttcggcgctgtcgtcatgctgctgcctcagttggttctcagatttacatttatggtggactcaggggagatatcctcctcgatgatttcctggttgctgagaatgcacccttccaatcagaaatcacttcgtctatgtacaatgttgatagagtccctaggggggaaactcaaaatagaaacaataattttcattcagattcacctgtccatcaatctacaaataacaggcaagaggcagcttctggtttcagtgcggacaagaagtcaattgacatgttgatagaggcctcaactgcggaagctgaagctgtcagcgctgtatggcgagctgctaaggaagcatctgcagcgtcttcggaagacagtctttcggagggaataggatcagaatccccattgagtgaaacttcaccaatgcctgaagatttcgatgatggggggtctctagaaccagatgtgaaactacattctagagcagttgtggttgctaaagaagcagtaggagatttaggatgcttggtcaggcagctctcactggatcagtttgagaatgaaagcagacggatgcatccttcaaacaatgaccaatcttatccaggccggagaacattaaatagacaacgatcaccacaagttggcgagctatgctacgctgccgagcagatttttatgcaagaaccaactgttttacaattaaaagcaccaattaaagtatttggtgatcttcatgggcagtttggggacttaatgcgcctttttgatgagtatggttttccgtcaactgctggtgacataacgtatattgattatctcttcttgggagactatgttgaccgaggtcagcacagcttagagacaatagctttgcttcttgctcttaaaatcgagtaccctgaaaatgtacacttgatcagaggaaatcatgaagctgctgacatcaatgccctttttggcttccgccttgaatgcattgagagaatgggtgaaagtgatggaatatgggcttggacaagattcaatcaactgttcaattatctcccactcgctgccatgatagaaaagaaaataatctgcatgcatggaggcataggaaggtcaataaacacagtggagcaaattgagaaacttgagaggcctatcacaatggatgttggttccattgtcctcatggacctgctatggtctgatcctacagaaaatgatagtgtggagggtttgagacctaatgcacgagggcccggcttagtgacatttgggcctgatcgagtaacagaattctgtaaacgaaacaaattgcagttgatcataagagcccatgagtgtgttatggatgggtttgagcgtttcgctcatggacaattgatcactttattttcagcaacaaattactgtggtactgcgaacaacgcaggggccatacttgttgtcggcaggggcttagttatcgtgccaaagttaattcatccacttccacctcctgttaattcacctgagtcctcccccgaacgtggggatgccacatggatgcaggagcttaacattcagcggccacctactccaaccagagggcggccacaagctgccggtgataggaattctcttgcttacatatgatacttgacacgacagagccacctccatctgctggatatgtttgtttgtaatcagaaatttctttaccagtttcaaggtacatatggtatagccaagaagaacaatcaaccaacaggacatcatggatacacttgtgatcagttccctgcatttcagatctcaagcaacattgtatgattgcgataccagtggacaataatcaagtctgatgtagttgtaatagctaatctgtaatttcagtgtacatggatagattgttctttcgtcagagtaggaaggtttccaaatgtttgcatactatgcatgctgcagcctgggacgcggtttaaacaggacagctatacaagttgccagatctgagctagattgggcagagaagatttgaaccattttatttgctctccgcggagcgcgaatgtaagaggttgtgttgtgttgtgaaatactgaattcgttataggtatttgtgcaataaattaagttttgcttaaatcagtgaatgctttggtttagtgacctgagttacaacgacaacaaagccctttagttagaga

SEQ ID NO: 76939 - DNA, 3634 bp, Zea Mays
actccagttcccacacggcggcggccgcgcccgccatttactccgctccggcgtactcctcccactcctgagctgtcgctgacactgacagcaacccccattgactcccgacatccacagccgcacttactcacgtgccaccgacactccggtcccaccctatgaaccccctcccaccgccaccagggccccgccgcgttcccaccctactacctgtcaccgcggccgtcgtctcccccgtcctattcacgaattccgaattccactgcgctgcgcttctgctccccccttctctctccctccgtgttcgctccctcggatcccacgcggctgcgggctgcggcgggggcggcgtccgaggcttagggtttagcgtttggaggagtttaggggtttgtgaggaggaagaggaggaggaggaggaggaggaggagcggatggggacagcggggaagggcgcgtgggtggtgccggcgccggcgtacagggaggtggaggggtgggagggcgcgggggacgacgcgccgggcttcaggtgcgcccactcgctcaccgccgtcgcgcctaccaagggccacggcccgcggctcatcctcttcggcggcgccaccgccatcgagaccggcgcatcttcgggcctccccggcatcaggctcgcgggggtgacgaactcggtgcactcgtacgacgtggagacgcgcaggtggacgaggttacatcctgctggagagcctccgtctccgagggccgcgcatgctgcagctgcagtgggcaccatggttgttttccagggtggaattggaccagcagggcactccacagacgatctctatgtccttgacctcacaaacgacaagtttaaatggcacagggttgttgttcaaggggcggggcctggtcctcgctatggtcactgcatggatttggtagctcaacggtatcttgttactgtctcaggaaatgacggaaagcgggccttgtcagatgcttgggcattggacacagcacagaaaccatataggtggcagaaacttaaccctgaaggtgatagaccttcagcaagaatgtatgctaccgccagtacacgctctgatggcatgcttttactttgtggtggaagggatgcttctggaatgccactgtctgatgcctatgggctactaatgcatacaaatggccagtgggaatggactctagccccaggggtatctccatctcctagatatcagcatgcagccgtttttgttggtgctcggttgcatgttactggaggtgtccttagaggaggcagagctattgaaggagagggcgcaatagcagtttggttggatagaaatggcattgtgacctctcgtactttgaagtcatccaatgaacatgatgcttcttcggatctacttcggcgctgtcgtcatgctgctgcctcagttggttctcagatttacatttatggtggactcaggggagatatcctcctcgatgatttcctggttgctgagaatgcacccttccaatcagaaatcacttcgtctatgtacaatgttgatagagtccctaggggggaaactcaaaatagaaacaataattttcattcagattcacctgtccatcaatctacaaataacagtgcggacaagaagtcaattgacatgttgatagaggcctcaactgcggaagctgaagctgtcagcgctgtatggcgagctgctaaggaagcatctgcagcgtcttcggaagacagtctttcggagggaataggatcagaatccccattgagtgaaacttcaccaatgcctgaagatttcgatgatggggggtctctagaaccagatgtgaaactacattctagagcagttgtggttgctaaagaagcagtaggagatttaggatgcttggtcaggcagctctcactggatcagtttgagaatgaaagcagacggatgcatccttcaaacaatgaccaatcttatccaggccggagaacattaaatagacaacgatcaccacaaggtttgcataagaaggttatttcgttcttacttaagccaagaaattggagagctcctgctgatagaacattttttctggattcttacgaagttggcgagctatgctacgctgccgagcagatttttatgcaagaaccaactgttttacaattaaaagcaccaattaaagtatttggtgatcttcatgggcagtttggggacttaatgcgcctttttgatgagtatggttttccgtcaactgctggtgacataacgtatattgattatctcttcttgggagactatgttgaccgaggtcagcacagcttagagacaatagctttgcttcttgctcttaaaatcgagtaccctgaaaatgtacacttgatcagaggaaatcatgaagctgctgacatcaatgccctttttggcttccgccttgaatgcattgagagaatgggtgaaagtgatggaatatgggcttggacaagattcaatcaactgttcaattatctcccactcgctgccatgatagaaaagaaaataatctgcatgcatggaggcataggaaggtcaataaacacagtggagcaaattgagaaacttgagaggcctatcacaatggatgttggttccattgtcctcatggacctgctatggtctgatcctacagaaaatgatagtgtggagggtttgagacctaatgcacgagggcccggcttagtgacatttgggcctgatcgagtaacagaattctgtaaacgaaacaaattgcagttgatcataagagcccatgagtgtgttatggatgggtttgagcgtttcgctcatggacaattgatcactttattttcagcaacaaattactgtggtactgcgaacaacgcaggggccatacttgttgtcggcaggggcttagttatcgtgccaaagttaattcatccacttccacctcctgttaattcacctgagtcctcccccgaacgtggggatgccacatggatgcaggagcttaacattcagcggccacctactccaaccagagggcggccacaagctgccggtgataggaattctcttgcttacatatgatacttgacacgacagagccacctccatctgctggatatgtttgtttgtaatcagaaatttctttaccagtttcaaggtacatatggtatagccaagaagaacaatcaaccaacaggacatcatggatacacttgtgatcagttccctgcatttcagatctcaagcaacattgtatgattgcgataccagtggacaataatcaagtctgatgtagttgtaatagctaatctgtaatttcagtgtacatggatagattgttctttcgtcagagtaggaaggtttccaaatgtttgcatactatgcatgctgcagcctgggacgcggtttaaacaggacagctatacaagttgccagatctgagctagattgggcagagaagatttgaaccattttatttgctctccgcggagcgcgaatgtaagaggttgtgttgtgttgtgaaatactgaattcgttataggtatttgtgcaataaattaagttttgcttaaatcagtgaatgctttggtttagtgacctgagttacaacgacaacaaagccctttagttagaga

SEQ ID NO: 76940 - DNA, 3691 bp, Zea Mays
atcaaaacggagccttggcagcgggaggagccccacactccagttcccacacggcggcggccgcgcccgccatttactccgctccggcgtactcctcccactcctgagctgtcgctgacactgacagcaacccccattgactcccgacatccacagccgcacttactcacgtgccaccgacactccggtcccaccctatgaaccccctcccaccgccaccagggccccgccgcgttcccaccctactacctgtcaccgcggccgtcgtctcccccgtcctattcacgaattccgaattccactgcgctgcgcttctgctccccccttctctctccctccgtgttcgctccctcggatcccacgcggctgcgggctgcggcgggggcggcgtccgaggcttagggtttagcgtttggaggagtttaggggtttgtgaggaggaagaggaggaggaggaggaggaggaggagcggatggggacagcggggaagggcgcgtgggtggtgccggcgccggcgtacagggaggtggaggggtgggagggcgcgggggacgacgcgccgggcttcaggtgcgcccactcgctcaccgccgtcgcgcctaccaagggccacggcccgcggctcatcctcttcggcggcgccaccgccatcgagaccggcgcatcttcgggcctccccggcatcaggctcgcgggggtgacgaactcggtgcactcgtacgacgtggagacgcgcaggtggacgaggttacatcctgctggagagcctccgtctccgagggccgcgcatgctgcagctgcagtgggcaccatggttgttttccagggtggaattggaccagcagggcactccacagacgatctctatgtccttgacctcacaaacgacaagtttaaatggcacagggttgttgttcaaggggcggggcctggtcctcgctatggtcactgcatggatttggtagctcaacggtatcttgttactgtctcaggaaatgacggaaagcgggccttgtcagatgcttgggcattggacacagcacagaaaccatataggtggcagaaacttaaccctgaaggtgatagaccttcagcaagaatgtatgctaccgccagtacacgctctgatggcatgcttttactttgtggtggaagggatgcttctggaatgccactgtctgatgcctatgggctactaatgcatacaaatggccagtgggaatggactctagccccaggggtatctccatctcctagatatcagcatgcagccgtttttgttggtgctcggttgcatgttactggaggtgtccttagaggaggcagagctattgaaggagagggcgcaatagcagtcctggacactgctgctggagtttggttggatagaaatggcattgtgacctctcgtactttgaagtcatccaatgaacatgatgcttcttcggatctacttcggcgctgtcgtcatgctgctgcctcagttggttctcagatttacatttatggtggactcaggggagatatcctcctcgatgatttcctggttgctgagaatgcacccttccaatcagaaatcacttcgtctatgtacaatgttgatagagtccctaggggggaaactcaaaatagaaacaataattttcattcagattcacctgtccatcaatctacaaataacagtgcggacaagaagtcaattgacatgttgatagaggcctcaactgcggaagctgaagctgtcagcgctgtatggcgagctgctaaggaagcatctgcagcgtcttcggaagacagtctttcggagggaataggatcagaatccccattgagtgaaacttcaccaatgcctgaagatttcgatgatggggggtctctagaaccagatgtgaaactacattctagagcagttgtggttgctaaagaagcagtaggagatttaggatgcttggtcaggcagctctcactggatcagtttgagaatgaaagcagacggatgcatccttcaaacaatgaccaatcttatccaggccggagaacattaaatagacaacgatcaccacaaggtttgcataagaaggttatttcgttcttacttaagccaagaaattggagagctcctgctgatagaacattttttctggattcttacgaagttggcgagctatgctacgctgccgagcagatttttatgcaagaaccaactgttttacaattaaaagcaccaattaaagtatttggtgatcttcatgggcagtttggggacttaatgcgcctttttgatgagtatggttttccgtcaactgctggtgacataacgtatattgattatctcttcttgggagactatgttgaccgaggtcagcacagcttagagacaatagctttgcttcttgctcttaaaatcgagtaccctgaaaatgtacacttgatcagaggaaatcatgaagctgctgacatcaatgccctttttggcttccgccttgaatgcattgagagaatgggtgaaagtgatggaatatgggcttggacaagattcaatcaactgttcaattatctcccactcgctgccatgatagaaaagaaaataatctgcatgcatggaggcataggaaggtcaataaacacagtggagcaaattgagaaacttgagaggcctatcacaatggatgttggttccattgtcctcatggacctgctatggtctgatcctacagaaaatgatagtgtggagggtttgagacctaatgcacgagggcccggcttagtgacatttgggcctgatcgagtaacagaattctgtaaacgaaacaaattgcagttgatcataagagcccatgagtgtgttatggatgggtttgagcgtttcgctcatggacaattgatcactttattttcagcaacaaattactgtggtactgcgaacaacgcaggggccatacttgttgtcggcaggggcttagttatcgtgccaaagttaattcatccacttccacctcctgttaattcacctgagtcctcccccgaacgtggggatgccacatggatgcaggagcttaacattcagcggccacctactccaaccagagggcggccacaagctgccggtgataggaattctcttgcttacatatgatacttgacacgacagagccacctccatctgctggatatgtttgtttgtaatcagaaatttctttaccagtttcaaggtacatatggtatagccaagaagaacaatcaaccaacaggacatcatggatacacttgtgatcagttccctgcatttcagatctcaagcaacattgtatgattgcgataccagtggacaataatcaagtctgatgtagttgtaatagctaatctgtaatttcagtgtacatggatagattgttctttcgtcagagtaggaaggtttccaaatgtttgcatactatgcatgctgcagcctgggacgcggtttaaacaggacagctatacaagttgccagatctgagctagattgggcagagaagatttgaaccattttatttgctctccgcggagcgcgaatgtaagaggttgtgttgtgttgtgaaatactgaattcgttataggtatttgtgcaataaattaagttttgcttaaatcagtgaatgctttggtttagtgacctgagttacaacgacaacaaagccctttagttagaga

SEQ ID NO: 76941 - DNA, 3717 bp, Zea Mays
ctatcaaaacggagccttggcagcgggaggagccccacactccagttcccacacggcggcggccgcgcccgccatttactccgctccggcgtactcctcccactcctgagctgtcgctgacactgacagcaacccccattgactcccgacatccacagccgcacttactcacgtgccaccgacactccggtcccaccctatgaaccccctcccaccgccaccagggccccgccgcgttcccaccctactacctgtcaccgcggccgtcgtctcccccgtcctattcacgaattccgaattccactgcgctgcgcttctgctccccccttctctctccctccgtgttcgctccctcggatcccacgcggctgcgggctgcggcgggggcggcgtccgaggcttagggtttagcgtttggaggagtttaggggtttgtgaggaggaagaggaggaggaggaggaggaggaggagcggatggggacagcggggaagggcgcgtgggtggtgccggcgccggcgtacagggaggtggaggggtgggagggcgcgggggacgacgcgccgggcttcaggtgcgcccactcgctcaccgccgtcgcgcctaccaagggccacggcccgcggctcatcctcttcggcggcgccaccgccatcgagaccggcgcatcttcgggcctccccggcatcaggctcgcgggggtgacgaactcggtgcactcgtacgacgtggagacgcgcaggtggacgaggttacatcctgctggagagcctccgtctccgagggccgcgcatgctgcagctgcagtgggcaccatggttgttttccagggtggaattggaccagcagggcactccacagacgatctctatgtccttgacctcacaaacgacaagtttaaatggcacagggttgttgttcaaggggcggggcctggtcctcgctatggtcactgcatggatttggtagctcaacggtatcttgttactgtctcaggaaatgacggaaagcgggccttgtcagatgcttgggcattggacacagcacagaaaccatataggtggcagaaacttaaccctgaaggtgatagaccttcagcaagaatgtatgctaccgccagtacacgctctgatggcatgcttttactttgtggtggaagggatgcttctggaatgccactgtctgatgcctatgggctactaatgcatacaaatggccagtgggaatggactctagccccaggggtatctccatctcctagatatcagcatgcagccgtttttgttggtgctcggttgcatgttactggaggtgtccttagaggaggcagagctattgaaggagagggcgcaatagcagtcctggacactgctgctggagtttggttggatagaaatggcattgtgacctctcgtactttgaagtcatccaatgaacatgatgcttcttcggatctacttcggcgctgtcgtcatgctgctgcctcagttggttctcagatttacatttatggtggactcaggggagatatcctcctcgatgatttcctggttgctgagaatgcacccttccaatcagaaatcacttcgtctatgtacaatgttgatagagtccctaggggggaaactcaaaatagaaacaataattttcattcagattcacctgtccatcaatctacaaataacaggcaagaggcagcttctggtttcagtgcggacaagaagtcaattgacatgttgatagaggcctcaactgcggaagctgaagctgtcagcgctgtatggcgagctgctaaggaagcatctgcagcgtcttcggaagacagtctttcggagggaataggatcagaatccccattgagtgaaacttcaccaatgcctgaagatttcgatgatggggggtctctagaaccagatgtgaaactacattctagagcagttgtggttgctaaagaagcagtaggagatttaggatgcttggtcaggcagctctcactggatcagtttgagaatgaaagcagacggatgcatccttcaaacaatgaccaatcttatccaggccggagaacattaaatagacaacgatcaccacaaggtttgcataagaaggttatttcgttcttacttaagccaagaaattggagagctcctgctgatagaacattttttctggattcttacgaagttggcgagctatgctacgctgccgagcagatttttatgcaagaaccaactgttttacaattaaaagcaccaattaaagtatttggtgatcttcatgggcagtttggggacttaatgcgcctttttgatgagtatggttttccgtcaactgctggtgacataacgtatattgattatctcttcttgggagactatgttgaccgaggtcagcacagcttagagacaatagctttgcttcttgctcttaaaatcgagtaccctgaaaatgtacacttgatcagaggaaatcatgaagctgctgacatcaatgccctttttggcttccgccttgaatgcattgagagaatgggtgaaagtgatggaatatgggcttggacaagattcaatcaactgttcaattatctcccactcgctgccatgatagaaaagaaaataatctgcatgcatggaggcataggaaggtcaataaacacagtggagcaaattgagaaacttgagaggcctatcacaatggatgttggttccattgtcctcatggacctgctatggtctgatcctacagaaaatgatagtgtggagggtttgagacctaatgcacgagggcccggcttagtgacatttgggcctgatcgagtaacagaattctgtaaacgaaacaaattgcagttgatcataagagcccatgagtgtgttatggatgggtttgagcgtttcgctcatggacaattgatcactttattttcagcaacaaattactgtggtactgcgaacaacgcaggggccatacttgttgtcggcaggggcttagttatcgtgccaaagttaattcatccacttccacctcctgttaattcacctgagtcctcccccgaacgtggggatgccacatggatgcaggagcttaacattcagcggccacctactccaaccagagggcggccacaagctgccggtgataggaattctcttgcttacatatgatacttgacacgacagagccacctccatctgctggatatgtttgtttgtaatcagaaatttctttaccagtttcaaggtacatatggtatagccaagaagaacaatcaaccaacaggacatcatggatacacttgtgatcagttccctgcatttcagatctcaagcaacattgtatgattgcgataccagtggacaataatcaagtctgatgtagttgtaatagctaatctgtaatttcagtgtacatggatagattgttctttcgtcagagtaggaaggtttccaaatgtttgcatactatgcatgctgcagcctgggacgcggtttaaacaggacagctatacaagttgccagatctgagctagattgggcagagaagatttgaaccattttatttgctctccgcggagcgcgaatgtaagaggttgtgttgtgttgtgaaatactgaattcgttataggtatttgtgcaataaattaagttttgcttaaatcagtgaatgctttggtttagtgacctgagttacaacgacaacaaagccctttagttagaga

SEQ ID NO: 76942 - DNA, 3009 bp, Zea Mays
ttatagtcacagctcatgcatatggcttgtctctaaaagtgtaatgactaatgggggttgttatgagtgttgaaactgcaggccaaacaatggagtactatgttagttacagggctttaccagtatgcttccatatgtttatcatcatgctgatgtcatagagatacgtccaatactgcagcgcatatgtcagagcagatacaagattcttctaaataaagataattaaagtgcatatggacataagttgaacacatcatgaacacatcatggcgatgccatatagttaatgatgcacaaactcaatggagcatatattgagtctcaccacattgaggcttcatatattaaccaatctacatggtacggtaactcactcactgggtcacttctttctggtgaggaaggaaaaggcttggtcaatcatcacagttagggtcgtggggggagggaaaaaaaaggcgatgtcagtgatgttcgtattccaggacagagagcatctttcctttgtttatcgccggccggcagctagcaattctaatcagaaatggttactgctccggtccaacaccaatagaagcacgtcgcgggcgctggatgtctgtcaagaatcaagcttcccataatcgcgatgcaggaccggacttgcggttgagccagaaaataaaaaggactgcatgccagtgccagggaagaagtgctcgttcgtccactccagaatctggagcagatgaagctgaccctacaggtaattttggatgtagttaacctgtgcagtggtacacaatcactgacggacttgtgtgcctcttcttttttctttgccaaaaggtgattatattattgcatgcgtgtacggacggaggtgggcattattctgacgaggggaagggaaggggaggcgggcggcggcagcggagcatggcaattaacaacaaggctggcactagaagatcacggggaaggcgagtttgacaacgggggcatcttttctggggtccccagaggcccactccccacacgatgatgcatgcacggggtcttttcgcccagaacaactagtgaatgctgctggacaggaataccctgcgagtcgccgttgtccttgtcacgccttttgttttcccctcccgttgctagctgtccgcggacgtgtacgtgcccaggcatcctatacgaacgccatgcaccaaggaaaggtggctactagatttaaatccggaatacatatatattatatatgcatctacccatctcgttttcatttctgggcctttcaatttcaacagcagctcatcccacggacaatcgtcctgagtattcatgcatggacgcctggcctcctcctctgcagaattggaacatcatatcgaattggcgagcgagttttgcagatttaaagagctatttcagtcaagcttcaagtggaagtagaccaagtactcgcgctagtggagtttgcaatgaccccggaatacaagttgaagttcaagagaataatagtgaagatgccaatggtgaagtcgaagaagcagtcacacgtgcaattaaagaagaaatgggggattgtttattctctgttcttgttgatgaatcccgtgatatatcgattaaagaacaaatggctattgttgtgagatttgtcaataaaaagagtgaagtaatagaaagatttttgggcatcaagcatgtcaaggacacaacatcagaatcattgaagaaagcattagttgagatgagagtggagaaatttcatcaaagagaggcaaacaacaagaaacatcattgtcaagacctggagatacaagatggggatctcattacaagactttgctccgtattgagtcaatgtgggaatcagtgatagaagttttagaaattgtgcaccaagatgagcgtaatccatcaggtgcaggtggctttgttgggaaaatggagtgtttcagctttgtgtttatgatgaagttgatgttacaaatcctccgtatcacaaatgagctttctcttctcttgcaaagaaaggatcaaaacgttgtccaagccatgtctttggttgttgatgtgagaacatgtttgataaatttgagaaatgatggttgggagccattgttggaagaagccacaacattctgccttgcaaatgatatcccaattccaaatatgagtgatgttgtaccacgatttggtcgatcaaggaaaggtgggagaaataatattaccacggagcatttttatcgtgttgatactttctatgttgttatagattctatcaccacagagtttgatcatcgctttaatgagctatctcaagagttgcttgggtgtttttcttgtcttgacccaagggattcgttctctaagtttgatgtggataagcttgctcggctcgcggatatctattctgatgatttttcttttgatgattgcaagactataaaagatcaactaagaacttttattattcatgtacgaagaattgaagagttcaaagcttgttgtgatattgctagtctatcgaagacaatggttcagcttgagaggcatattgtgtttccactggtatatcgacttattgagttagcactgttgttaccggtagcgactacaacagtggaaagggccttctcagctatgaagattattaagactgagttgcgcaacaagatgtccgatggttggttaaatgacttgatggtgtgctacattgaaagagaaatttttaaaggactggaccttcagaaaataaagaaggcatttcaaaataagaaaactagacaaatgcaatgtctagatctcctagaactagactcaactaaaggtatattcttatttcacttgttcaacaatttttacttcaatttaccattcgtaacttatctttttcttttttccagattttattcgctatatggcagttggttgtaaatggattgtaatcaagatgactattaaataaggtattttcaacatctattacttattttgtagctacaagtcattttaaactat

SEQ ID NO: 76943 - DNA, 3609 bp, Zea Mays
ctcagggcttacacttccaagcttcagcctagagcctagtcccaaaacagatatcgcaaaacagaatttcactagcctctgtttctgcgcatactactgatatatttttttttctcaaaaaacgcaggagagctgattactatattaagaagaaaaaaggggcaagagcccaaacaaccccacagacaccagacgtccagacacacactcacgccccaacattcccatactactgatcttgtttcaaatacatggtgtgactagaaactacctggcttgattatggacatccctctttctctgactctaatctatgaagcaatacttggccaatcagttttatggatgctcacattgtttatagattgtcgatgcttgatgcctgctttataaaaacacctcctgaatgacttttttatttattgagttcctactatatattacaaattttgtgcacaacataggttcggatgaccttgtatttcaattatcattatccaaagcccttgataaaacacagtactgtgctagtgtgctgttgcatgtgaaactcatttttagcagtacacagttttttccattctgtattcaaccttcatagaaaaggattcaacctataaatcgcaaacacaattatttgcattgtgcaattgttattttttgttcaattatcagttcagttcacagaatgggaacgtcttgttttgttcatatactaatcgcatgcttttatctgagtacgaattgagtggactacgatgtggcttcaaatgcatgaaaggggtggatatcaatatatcatgagatcttaatgcctcaacaaactctatatttgtgattgcacctctgatcatctgcattggccaaacaatggagtactatgttagttacagggctttaccagtatgcttccatatgtttatcatcatgctgatgtcatagagatacgtccaatactgcagcgcatatgtcagagcagatacaagattcttctaaataaagataattaaagtgcatatggacataagttgaacacatcatgaacacatcatggcgatgccatatagttaatgatgcacaaactcaatggagcatatattgagtctcaccacattgaggcttcatatattaaccaatctacatggtacggtaactcactcactgggtcacttctttctggtgaggaaggaaaaggcttggtcaatcatcacagttagggtcgtggggggagggaaaaaaaaggcgatgtcagtgatgttcgtattccaggacagagagcatctttcctttgtttatcgccggccggcagctagcaattctaatcagaaatggttactgctccggtccaacaccaatagaagcacgtcgcgggcgctggatgtctgtcaagaatcaagcttcccataatcgcgatgcaggaccggacttgcggttgagccagaaaataaaaaggactgcatgccagtgccagggaagaagtgctcgttcgtccactccagaatctggagcagatgaagctgaccctacaggtgattatattattgcatgcgtgtacggacggaggtgggcattattctgacgaggggaagggaaggggaggcgggcggcggcagcggagcatggcaattaacaacaaggctggcactagaagatcacggggaaggcgagtttgacaacgggggcatcttttctggggtccccagaggcccactccccacacgatgatgcatgcacgaacaactagtgaatgctgctggacaggaataccctgcgagtcgccgttgtccttgtcacgccttttgttttcccctcccgttgctagctgtccgcggacgtgtacgtgcccaggcatcctatacgaacgccatgcaccaaggaaagcagctcatcccacggacaatcgtcctgaggtgtgcagtattcatgcatggacgcctggcctcctcctctgcagaattggaacatcatatcgaattggcgagcgagttttgcagatttaaagagctatttcagtcaagcttcaagtggaagtagaccaagtactcgcgctagtggagtttgcaatgaccccggaatacaagttgaagttcaagagaataatagtgaagatgccaatggtgaagtcgaagaagcagtcacacgtgcaattaaagaagaaatgggggattgtttattctctgttcttgttgatgaatcccgtgatatatcgattaaagaacaaatggctattgttgtgagatttgtcaataaaaagagtgaagtaatagaaagatttttgggcatcaagcatgtcaaggacacaacatcagaatcattgaagaaagcattagttgagatgagagtggagaaatttcatcaaagagaggcaaacaacaagaaacatcattgtcaagacctggagatacaagatggggatctcattacaagactttgctccgtattgagtcaatgtgggaatcagtgatagaagttttagaaattgtgcaccaagatgagcgtaatccatcaggtgcaggtggctttgttgggaaaatggagtgtttcagctttgtgtttatgatgaagttgatgttacaaatcctccgtatcacaaatgagctttctcttctcttgcaaagaaaggatcaaaacgttgtccaagccatgtctttggttgttgatgtgagaacatgtttgataaatttgagaaatgatggttgggagccattgttggaagaagccacaacattctgccttgcaaatgatatcccaattccaaatatgagtgatgttgtaccacgatttggtcgatcaaggaaaggtgggagaaataatattaccacggagcatttttatcgtgttgatactttctatgttgttatagattctatcaccacagagtttgatcatcgctttaatgagctatctcaagagttgcttgggtgtttttcttgtcttgacccaagggattcgttctctaagtttgatgtggataagcttgctcggctcgcggatatctattctgatgatttttcttttgatgattgcaagactataaaagatcaactaagaacttttattattcatgtacgaagaattgaagagttcaaagcttgttgtgatattgctagtctatcgaagacaatggttcagcttgagaggcatattgtgtttccactggtatatcgacttattgagttagcactgttgttaccggtagcgactacaacagtggaaagggccttctcagctatgaagattattaagactgagttgcgcaacaagatgtccgatggttggttaaatgacttgatggtgtgctacattgaaagagaaatttttaaaggactggaccttcagaaaataaagaaggcatttcaaaataagaaaactagacaaatgcaatgtctagatctcctagaactagactcaactaaaggtatattcttatttcacttgttcaacaatttttacttcaatttaccattcgtaacttatctttttcttttttccagattttattcgctatatggcagttggttgtaaatggattgtaatcaagatgactattaaataaggtattttcaacatctattacttattttgtagctacaagtcattttaaactat

SEQ ID NO: 76944 - DNA, 3795 bp, Zea Mays
tgatggatggatttattttgttggagttgtgaccatttgcatgttcgtactattctaatagttttaaagtggtccatgacattcttttcactgaattgtggttagcaagcaatctgcgccaccttccctagcacttcactctgtctccacacattcagtatgtgacttgtccagattcaaaacatcagcccctgtaacatatctgaaaaacaagccaaattggtgctatagataagttaatttgtgttatcctttgaaaagtaagaatcctcccaaacaggtgcagaactcagggcttacacttccaagcttcagcctagagcctagtcccaaaacagatatcgcaaaacagaatttcactagcctctgtttctgcgcatactactgatatatttttttttctcaaaaaacgcaggagagctgattactatattaagaagaaaaaaggggcaagagcccaaacaaccccacagacaccagacgtccagacacacactcacgccccaacattcccatactactgatcttgtttcaaatacatggtgtgactagaaactacctggcttgattatggacatccctctttctctgactctaatctatgaagcaatacttggccaatcagttttatggatgctcacattgtttatagattgtcgatgcttgatgcctgctttataaaaacacctcctgaatgacttttttatttattgagttcctactatatattacaaattttgtgcacaacataggttcggatgaccttgtatttcaattatcattatccaaagcccttgataaaacacagtactgtgctagtgtgctgttgcatgtgaaactcatttttagcagtacacagttttttccattctgtattcaaccttcatagaaaaggattcaacctataaatcgcaaacacaattatttgcattgtgcaattgttattttttgttcaattatcagttcagttcacagaatgggaacgtcttgttttgttcatatactaatcgcatgcttttatctgagtacgaattgagtggactacgatgtggcttcaaatgcatgaaaggggtggatatcaatatatcatgagatcttaatgcctcaacaaactctatatttgtgattgcacctctgatcatctgcattggccaaacaatggagtactatgttagttacagggctttaccagtatgcttccatatgtttatcatcatgctgatgtcatagagatacgtccaatactgcagcgcatatgtcagagcagatacaagattcttctaaataaagataattaaagtgcatatggacataagttgaacacatcatggtacggtaactcactcactgggtcacttctttctggtgaggaaggaaaaggcttggtcaatcatcacagttagggtcgtggggggagggaaaaaaaaggcgatgtcagtgatgttcgtattccaggacagagagcatctttcctttgtttatcgccggccggcagctagcaattctaatcagaaatggttactgctccggtccaacaccaatagaagcacgtcgcgggcgctggatgtctgtcaagaatcaagcttcccataatcgcgatgcaggaccggacttgcggttgagccagaaaataaaaaggactgcatgccagtgccagggaagaagtgctcgttcgtccactccagaatctggagcagatgaagctgaccctacaggtgattatattattgcatgcgtgtacggacggaggtgggcattattctgacgaggggaagggaaggggaggcgggcggcggcagcggagcatggcaattaacaacaaggctggcactagaagatcacggggaaggcgagtttgacaacgggggcatcttttctggggtccccagaggcccactccccacacgatgatgcatgcacgaacaactagtgaatgctgctggacaggaataccctgcgagtcgccgttgtccttgtcacgccttttgttttcccctcccgttgctagctgtccgcggacgtgtacgtgcccaggcatcctatacgaacgccatgcaccaaggaaagcagctcatcccacggacaatcgtcctgaggtgtgcagtattcatgcatggacgcctggcctcctcctctgcagaattggaacatcatatcgaattggcgagcgagttttgcagatttaaagagctatttcagtcaagcttcaagtggaagtagaccaagtactcgcgctagtggagtttgcaatgaccccggaatacaagttgaagttcaagagaataatagtgaagatgccaatggtgaagtcgaagaagcagtcacacgtgcaattaaagaagaaatgggggattgtttattctctgttcttgttgatgaatcccgtgatatatcgattaaagaacaaatggctattgttgtgagatttgtcaataaaaagagtgaagtaatagaaagatttttgggcatcaagcatgtcaaggacacaacatcagaatcattgaagaaagcattagttgagatgagagtggagaaatttcatcaaagagaggcaaacaacaagaaacatcattgtcaagacctggagatacaagatggggatctcattacaagactttgctccgtattgagtcaatgtgggaatcagtgatagaagttttagaaattgtgcaccaagatgagcgtaatccatcaggtgcaggtggctttgttgggaaaatggagtgtttcagctttgtgtttatgatgaagttgatgttacaaatcctccgtatcacaaatgagctttctcttctcttgcaaagaaaggatcaaaacgttgtccaagccatgtctttggttgttgatgtgagaacatgtttgataaatttgagaaatgatggttgggagccattgttggaagaagccacaacattctgccttgcaaatgatatcccaattccaaatatgagtgatgttgtaccacgatttggtcgatcaaggaaaggtgggagaaataatattaccacggagcatttttatcgtgttgatactttctatgttgttatagattctatcaccacagagtttgatcatcgctttaatgagctatctcaagagttgcttgggtgtttttcttgtcttgacccaagggattcgttctctaagtttgatgtggataagcttgctcggctcgcggatatctattctgatgatttttcttttgatgattgcaagactataaaagatcaactaagaacttttattattcatgtacgaagaattgaagagttcaaagcttgttgtgatattgctagtctatcgaagacaatggttcagcttgagaggcatattgtgtttccactggtatatcgacttattgagttagcactgttgttaccggtagcgactacaacagtggaaagggccttctcagctatgaagattattaagactgagttgcgcaacaagatgtccgatggttggttaaatgacttgatggtgtgctacattgaaagagaaatttttaaaggactggaccttcagaaaataaagaaggcatttcaaaataagaaaactagacaaatgcaatgtctagatctcctagaactagactcaactaaaggtatattcttatttcacttgttcaacaatttttacttcaatttaccattcgtaacttatctttttcttttttccagattttattcgctatatggcagttggttgtaaatggattgtaatcaagatgactattaaataaggtattttcaacatctattacttattttgtagctacaagtcattttaaactat

SEQ ID NO: 76945 - DNA, 3482 bp, Zea Mays
gtacgcttagatatggtacagcgatagcgcagtggtttgtgtggaacacatttggctgaagttactcactgatcaaaacctgaaaggagagctgattactatattaagaagaaaaaaggggcaagagcccaaacaaccccacagacaccagacgtccagacacacactcacgccccaacattcccatactactgatcttgtttcaaatacatggtgtgactagaaactacctggcttgattatggacatccctctttctctgactctaatctatgaagcaatacttggccaatcagttttatggatgctcacattgtttatagattgtcgatgcttgatgcctgctttataaaaacacctcctgaatgacttttttatttattgagttcctactatatattacaaattttgtgcacaacataggttcggatgaccttgtatttcaattatcattatccaaagcccttgataaaacacagtactgtgctagtgtgctgttgcatgtgaaactcatttttagcagtacacagttttttccattctgtattcaaccttcatagaaaaggattcaacctataaatcgcaaacacaattatttgcattgtgcaattgttattttttgttcaattatcagttcagttcacagaatgggaacgtcttgttttgttcatatactaatcgcatgcttttatctgagtacgaattgagtggactacgatgtggcttcaaatgcatgaaaggggtggatatcaatatatcatgagatcttaatgcctcaacaaactctatatttgtgattgcacctctgatcatctgcattggccaaacaatggagtactatgttagttacagggctttaccagtatgcttccatatgtttatcatcatgctgatgtcatagagatacgtccaatactgcagcgcatatgtcagagcagatacaagattcttctaaataaagataattaaagtgcatatggacataagttgaacacatcatggtacggtaactcactcactgggtcacttctttctggtgaggaaggaaaaggcttggtcaatcatcacagttagggtcgtggggggagggaaaaaaaaggcgatgtcagtgatgttcgtattccaggacagagagcatctttcctttgtttatcgccggccggcagctagcaattctaatcagaaatggttactgctccggtccaacaccaatagaagcacgtcgcgggcgctggatgtctgtcaagaatcaagcttcccataatcgcgatgcaggaccggacttgcggttgagccagaaaataaaaaggactgcatgccagtgccagggaagaagtgctcgttcgtccactccagaatctggagcagatgaagctgaccctacaggtgattatattattgcatgcgtgtacggacggaggtgggcattattctgacgaggggaagggaaggggaggcgggcggcggcagcggagcatggcaattaacaacaaggctggcactagaagatcacggggaaggcgagtttgacaacgggggcatcttttctggggtccccagaggcccactccccacacgatgatgcatgcacggggtcttttcgcccagaacaactagtgaatgctgctggacaggaataccctgcgagtcgccgttgtccttgtcacgccttttgttttcccctcccgttgctagctgtccgcggacgtgtacgtgcccaggcatcctatacgaacgccatgcaccaaggaaagcagctcatcccacggacaatcgtcctgaggtgtgcagtattcatgcatggacgcctggcctcctcctctgcagaattggaacatcatatcgaattggcgagcgagttttgcagatttaaagagctatttcagtcaagcttcaagtggaagtagaccaagtactcgcgctagtggagtttgcaatgaccccggaatacaagttgaagttcaagagaataatagtgaagatgccaatggtgaagtcgaagaagcagtcacacgtgcaattaaagaagaaatgggggattgtttattctctgttcttgttgatgaatcccgtgatatatcgattaaagaacaaatggctattgttgtgagatttgtcaataaaaagagtgaagtaatagaaagatttttgggcatcaagcatgtcaaggacacaacatcagaatcattgaagaaagcattagttgagatgagagtggagaaatttcatcaaagagaggcaaacaacaagaaacatcattgtcaagacctggagatacaagatggggatctcattacaagactttgctccgtattgagtcaatgtgggaatcagtgatagaagttttagaaattgtgcaccaagatgagcgtaatccatcaggtgcaggtggctttgttgggaaaatggagtgtttcagctttgtgtttatgatgaagttgatgttacaaatcctccgtatcacaaatgagctttctcttctcttgcaaagaaaggatcaaaacgttgtccaagccatgtctttggttgttgatgtgagaacatgtttgataaatttgagaaatgatggttgggagccattgttggaagaagccacaacattctgccttgcaaatgatatcccaattccaaatatgagtgatgttgtaccacgatttggtcgatcaaggaaaggtgggagaaataatattaccacggagcatttttatcgtgttgatactttctatgttgttatagattctatcaccacagagtttgatcatcgctttaatgagctatctcaagagttgcttgggtgtttttcttgtcttgacccaagggattcgttctctaagtttgatgtggataagcttgctcggctcgcggatatctattctgatgatttttcttttgatgattgcaagactataaaagatcaactaagaacttttattattcatgtacgaagaattgaagagttcaaagcttgttgtgatattgctagtctatcgaagacaatggttcagcttgagaggcatattgtgtttccactggtatatcgacttattgagttagcactgttgttaccggtagcgactacaacagtggaaagggccttctcagctatgaagattattaagactgagttgcgcaacaagatgtccgatggttggttaaatgacttgatggtgtgctacattgaaagagaaatttttaaaggactggaccttcagaaaataaagaaggcatttcaaaataagaaaactagacaaatgcaatgtctagatctcctagaactagactcaactaaaggtatattcttatttcacttgttcaacaatttttacttcaatttaccattcgtaacttatctttttcttttttccagattttattcgctatatggcagttggttgtaaatggattgtaatcaagatgactattaaataaggtattttcaacatctattacttattttgtagctacaagtcattttaaactat

SEQ ID NO: 76946 - DNA, 1852 bp, Zea Mays
gtttggtggacagcaatgtactgttgctggcaatgttgagactgcatattacaatataaattaaatgtattttttcatctagagtgaaggaatgagagaatgtgtataatgtgtgggatgtattgcattgagcctccagagagaatatataggagtacatgacttggagggcaagaagcctatcctaaagataagaaaggttatcctagatataaggaagattatctcgatattacaatcaattctaaaccaaccatatcaggagttgcctaatatactctaacatggactagcactgtcactcagctgccattttgacgtcttactactacttctctttcatacttctttttttgctttcctttgaactgttgtattcattttcgaaacatgcagatacgtccaatactgcagcgcatatgtcagagcagatacaagattcttctaaataaagataattaaagtgcatatggacataagttgaacacatcatgaacacatcatggcgatgccatatagttaatgatgcacaaactcaatggagcatatattgagtctcaccacattgaggcttcatatattaaccaatctacatggtacggtaactcactcactgggtcacttctttctggtgaggaaggaaaaggcttggtcaatcatcacagttagggtcgtggggggagggaaaaaaaaggcgatgtcagtgatgttcgtattccaggacagagagcatctttcctttgtttatcgccggccggcagctagcaattctaatcagaaatggttactgctccggtccaacaccaatagaagcacgtcgcgggcgctggatgtctgtcaagaatcaagcttcccataatcgcgatgcaggaccggacttgcggttgagccagaaaataaaaaggactgcatgccagtgccagggaagaagtgctcgttcgtccactccagaatctggagcagatgaagctgaccctacaggtgattatattattgcatgcgtgtacggacggaggtgggcattattctgacgaggggaagggaaggggaggcgggcggcggcagcggagcatggcaattaacaacaaggctggcactagaagatcacggggaaggcgagtttgacaacgggggcatcttttctggggtccccagaggcccactccccacacgatgatgcatgcacgggtcgtcactcagcgttattgagagacagacagacagagagaggtgcgttaaatttgtgatggcctaggctggtgatgatgaacgacgactgatgggtacagccgggaatcaagagggatgaaagatcggaacagtacacaggacggcagcagcatcgtccatagtacgcgggggtaggcccgtggaagtttacggcacgcagctttgtgcctttgtgctatctctctctctctcttagagagacggagatagagagagtgtggggtgcagtgtacgactatggggccggccgtcgtccctgaccttggaatggaaatggtagggcaccatccaatcccacagtccaatcttcccgtcccgtgtagcatagcacagacagacgctagtagggaccacgcccatgcaccctcgcccggccggggccgggtccggcccccgttccgtccgtgtgccaaccaactagacgcgcactagcgcgctaggtcattatagcttgcaatacaaatttcctacctatctgtctatccatccacacgacatacatgtgcacatgtatccatgtttttgtgcgtgacggtgatatgctctgcttgtaacagttaataacgtcatatatactatgcacttgacctgtatgtataatatgcattaatgtgcgcgcgcg

SEQ ID NO: 76947 - DNA, 1304 bp, Zea Mays
cctgccccgtgccgccgcggcctgcctgagcgagcggttgcctgccaggtacggtaactcactcactgggtcacttctttctggtgaggaaggaaaaggcttggtcaatcatcacagttagggtcgtggggggagggaaaaaaaaggcgatgtcagtgatgttcgtattccaggacagagagcatctttcctttgtttatcgccggccggcagctagcaattctaatcagaaatggttactgctccggtccaacaccaatagaagcacgtcgcgggcgctggatgtctgtcaagaatcaagcttcccataatcgcgatgcaggaccggacttgcggttgagccagaaaataaaaaggactgcatgccagtgccagggaagaagtgctcgttcgtccactccagaatctggagcagatgaagctgaccctacaggtgattatattattgcatgcgtgtacggacggaggtgggcattattctgacgaggggaagggaaggggaggcgggcggcggcagcggagcatggcaattaacaacaaggctggcactagaagatcacggggaaggcgagtttgacaacgggggcatcttttctggggtccccagaggcccactccccacacgatgatgcatgcacgggtcgtcactcagcgttattgagagacagacagacagagagaggtgcgttaaatttgtgatggcctaggctggtgatgatgaacgacgactgatgggtacagccgggaatcaagagggatgaaagatcggaacagtacacaggacggcagcagcatcgtccatagtacgcgggggtaggcccgtggaagtttacggcacgcagctttgtgcctttgtgctatctctctctctctcttagagagacggagatagagagagtgtggggtgcagtgtacgactatggggccggccgtcgtccctgaccttggaatggaaatggtagggcaccatccaatcccacagtccaatcttcccgtcccgtgtagcatagcacagacagacgctagtagggaccacgcccatgcaccctcgcccggccggggccgggtccggcccccgttccgtccgtgtgccaaccaactagacgcgcactagcgcgctaggtcattatagcttgcaatacaaatttcctacctatctgtctatccatccacacgacatacatgtgcacatgtatccatgtttttgtgcgtgacggtgatatgctctgcttgtaacagttaataacgtcatatatactatgcacttgacctgtatgtataatatgcattaatgtgcgcgcgcg

SEQ ID NO: 76948 - DNA, 1540 bp, Zea Mays
cgcccccggccggccgtcccccacagccgcacgcgcgcaccggcgcacgcaccaccgcccaccggccacagcgccgcagcaaaagcgaagcgaaccagagtggcaatgcacgatcactgccgccgcgccgcctacttccctgccccgtgccgccgcggcctgcctgagcgagcggttgcctgccagatacgtccaatactgcagcgcatatgtcagagcagatacaagattcttctaaataaagataattaaagtgcatatggacataagttgaacacatcatggtacggtaactcactcactgggtcacttctttctggtgaggaaggaaaaggcttggtcaatcatcacagttagggtcgtggggggagggaaaaaaaaggcgatgtcagtgatgttcgtattccaggacagagagcatctttcctttgtttatcgccggccggcagctagcaattctaatcagaaatggttactgctccggtccaacaccaatagaagcacgtcgcgggcgctggatgtctgtcaagaatcaagcttcccataatcgcgatgcaggaccggacttgcggttgagccagaaaataaaaaggactgcatgccagtgccagggaagaagtgctcgttcgtccactccagaatctggagcagatgaagctgaccctacaggtgattatattattgcatgcgtgtacggacggaggtgggcattattctgacgaggggaagggaaggggaggcgggcggcggcagcggagcatggcaattaacaacaaggctggcactagaagatcacggggaaggcgagtttgacaacgggggcatcttttctggggtccccagaggcccactccccacacgatgatgcatgcacgggtcgtcactcagcgttattgagagacagacagacagagagaggtgcgttaaatttgtgatggcctaggctggtgatgatgaacgacgactgatgggtacagccgggaatcaagagggatgaaagatcggaacagtacacaggacggcagcagcatcgtccatagtacgcgggggtaggcccgtggaagtttacggcacgcagctttgtgcctttgtgctatctctctctctctcttagagagacggagatagagagagtgtggggtgcagtgtacgactatggggccggccgtcgtccctgaccttggaatggaaatggtagggcaccatccaatcccacagtccaatcttcccgtcccgtgtagcatagcacagacagacgctagtagggaccacgcccatgcaccctcgcccggccggggccgggtccggcccccgttccgtccgtgtgccaaccaactagacgcgcactagcgcgctaggtcattatagcttgcaatacaaatttcctacctatctgtctatccatccacacgacatacatgtgcacatgtatccatgtttttgtgcgtgacggtgatatgctctgcttgtaacagttaataacgtcatatatactatgcacttgacctgtatgtataatatgcattaatgtgcgcgcgcg

SEQ ID NO: 76949 - DNA, 1642 bp, Zea Mays
cgcccccggccggccgtcccccacagccgcacgcgcgcaccggcgcacgcaccaccgcccaccggccacagcgccgcagcaaaagcgaagcgaaccagagtggcaatgcacgatcactgccgccgcgccgcctacttccctgccccgtgccgccgcggcctgcctgagcgagcggttgcctgccagatacgtccaatactgcagcgcatatgtcagagcagatacaagattcttctaaataaagataattaaagtgcatatggacataagttgaacacatcatgaacacatcatggcgatgccatatagttaatgatgcacaaactcaatggagcatatattgagtctcaccacattgaggcttcatatattaaccaatctacatggtacggtaactcactcactgggtcacttctttctggtgaggaaggaaaaggcttggtcaatcatcacagttagggtcgtggggggagggaaaaaaaaggcgatgtcagtgatgttcgtattccaggacagagagcatctttcctttgtttatcgccggccggcagctagcaattctaatcagaaatggttactgctccggtccaacaccaatagaagcacgtcgcgggcgctggatgtctgtcaagaatcaagcttcccataatcgcgatgcaggaccggacttgcggttgagccagaaaataaaaaggactgcatgccagtgccagggaagaagtgctcgttcgtccactccagaatctggagcagatgaagctgaccctacaggtgattatattattgcatgcgtgtacggacggaggtgggcattattctgacgaggggaagggaaggggaggcgggcggcggcagcggagcatggcaattaacaacaaggctggcactagaagatcacggggaaggcgagtttgacaacgggggcatcttttctggggtccccagaggcccactccccacacgatgatgcatgcacgggtcgtcactcagcgttattgagagacagacagacagagagaggtgcgttaaatttgtgatggcctaggctggtgatgatgaacgacgactgatgggtacagccgggaatcaagagggatgaaagatcggaacagtacacaggacggcagcagcatcgtccatagtacgcgggggtaggcccgtggaagtttacggcacgcagctttgtgcctttgtgctatctctctctctctcttagagagacggagatagagagagtgtggggtgcagtgtacgactatggggccggccgtcgtccctgaccttggaatggaaatggtagggcaccatccaatcccacagtccaatcttcccgtcccgtgtagcatagcacagacagacgctagtagggaccacgcccatgcaccctcgcccggccggggccgggtccggcccccgttccgtccgtgtgccaaccaactagacgcgcactagcgcgctaggtcattatagcttgcaatacaaatttcctacctatctgtctatccatccacacgacatacatgtgcacatgtatccatgtttttgtgcgtgacggtgatatgctctgcttgtaacagttaataacgtcatatatactatgcacttgacctgtatgtataatatgcattaatgtgcgcgcgcg

SEQ ID NO: 76950 - DNA, 939 bp, Zea Mays
gttcattaaagaagagaatctacatacaagacacatactcaagcgaaaagaaaaatattggagtctaagagggagcttttactgaaagaaatgtctagggcgaattcgttggaggttgcagttctgaaggataggctggttaaattggagtcagaaaaagctcgtccatatgatccaggaggtttaccatgagtctggtgtaagaggattttggaaagggcttattccaacattaatcatggtatgtaatccatcgattcagttcatgatctatgaaacattggcaaagcgtctgcagtcaaagcgttctggaaagcagctaccaaaaaggcacctcacagctatggaggtttttttattgggtgcattggcaaaacttggagctactgtagtcacctatccattgctagtcgtgaagtcaaggttgcaggcaaaacaagaaattggcagcaatgtgatgtccagatacacgggtacaatagatgcgataataaagatggttcgctacgaaggactacacgggttttacaaaggaatgggcacaaaaattgtacaaagtgtctttgctgcctcggttctctttatggttaaagaggaattggtcaagttagcagtgcttttagttgcgagtagtaggactatgcttattactacatccaagaaacaataggtggtggtgtatttgggagaaaagctcatttttttgcctcaacttgtaatgtatagggtcccattatacatatcctgttcaagatcaatatgaaattctttactggttactagagaaaaccttaaagcctctcaaaagccataccttccccttattaatgaaggataaaatcatctaaaagatattacatgttttgggtttaactgatatacaaaattaagggtatgtttgttttagcttcttgaactagatctggtgccaaaaatctg

SEQ ID NO: 76951 - DNA, 1562 bp, Zea Mays
tgctatctcattcagtcctgagttctgatcctctccgtctctccctcctccctctccatccaaagtgtagtgtagacagtaacccacatctcgtttcctcgccgcggccacggcgccgactgagcgaggtcttcatctgcgcttcaccagcgacgattatccactaggtaggggatcatccgatcatgtcgagcgcggcggtgaacgggctgtccggcgccggcggcggcatcatcgcgcagatcatcacctaccctctccaaaccgtgaacacccggcagcagacggagaggtcaacgaagaagaggaaggccaggagcggcgccagcgccaccccagcctccaccatgtaccagatgctccagtgactgcagctgattcaaaccgaaggatggagtgggttgtacagcggcctcaagccctctctcatcggcactgccgcgtcgcagggaatctattactacttctaccagatcctcaagaacaaggtggaagatatagcggttgctcgtagcaagaagggccttggggatggtactgtcgggatgctttcttggcttggtattgcagctgttgctgggtcaatcaatgttcttctaaccaatccaatatgggttcttgtgacacgtatgcagacacatactcaagcgaaaagaaaaatattggagtctaagagggagcttttactgaaagaaatgtctagggcgaattcgttggaggttgcagttctgaaggataggctggttaaattggagtcagaaaaagctcgtccatatggtactcttcaagcgacagatccaggaggtttaccatgagtctggtgtaagaggattttggaaagggcttattccaacattaatcatggtatgtaatccatcgattcagttcatgatctatgaaacattggcaaagcgtctgcagtcaaagcgttctggaaagcagctaccaaaaaggcacctcacagctatggaggtttttttattgggtgcattggcaaaacttggagctactgtagtcacctatccattgctagtcgtgaagtcaaggttgcaggcaaaacaagaaattggcagcaatgtgatgtccagatacacgggtacaatagatgcgataataaagatggttcgctacgaaggactacacgggttttacaaaggaatgggcacaaaaattgtacaaagtgtctttgctgcctcggttctctttatggttaaagaggaattggtcaagttagcagtgcttttagttgcgagtagtaggactatgcttattactacatccaagaaacaataggtggtggtgtatttgggagaaaagctcatttttttgcctcaacttgtaatgtatagggtcccattatacatatcctgttcaagatcaatatgaaattctttactggttactagagaaaaccttaaagcctctcaaaagccataccttccccttattaatgaaggataaaatcatctaaaagatattacatgttttgggtttaactgatatacaaaattaagggtatgtttgttttagcttcttgaactagatctggtgccaaaaatctg

SEQ ID NO: 76952 - DNA, 1612 bp, Zea Mays
tgctatctcattcagtcctgagttctgatcctctccgtctctccctcctccctctccatccaaagtgtagtgtagacagtaacccacatctcgtttcctcgccgcggccacggcgccgactgagcgaggtcttcatctgcgcttcaccagcgacgattatccactaggtaggggatcatccgatcatgtcgagcgcggcggtgaacgggctgtccggcgccggcggcggcatcatcgcgcagatcatcacctaccctctccaaaccgtgaacacccggcagcagacggagaggtcaacgaagaagaggaaggccaggagcggcgccagcgccaccccagcctccaccatgtaccagatgctccaggtgattcatcgcgggcttcaggtaccgtggtgcgccagatgtcctccctaatcaagtttgtaatctagtgactgcagctgattcaaaccgaaggatggagtgggttgtacagcggcctcaagccctctctcatcggcactgccgcgtcgcagggaatctattactacttctaccagatcctcaagaacaaggtggaagatatagcggttgctcgtagcaagaagggccttggggatggtactgtcgggatgctttcttggcttggtattgcagctgttgctgggtcaatcaatgttcttctaaccaatccaatatgggttcttgtgacacgtatgcagacacatactcaagcgaaaagaaaaatattggagtctaagagggagcttttactgaaagaaatgtctagggcgaattcgttggaggttgcagttctgaaggataggctggttaaattggagtcagaaaaagctcgtccatatgatccaggaggtttaccatgagtctggtgtaagaggattttggaaagggcttattccaacattaatcatggtatgtaatccatcgattcagttcatgatctatgaaacattggcaaagcgtctgcagtcaaagcgttctggaaagcagctaccaaaaaggcacctcacagctatggaggtttttttattgggtgcattggcaaaacttggagctactgtagtcacctatccattgctagtcgtgaagtcaaggttgcaggcaaaacaagaaattggcagcaatgtgatgtccagatacacgggtacaatagatgcgataataaagatggttcgctacgaaggactacacgggttttacaaaggaatgggcacaaaaattgtacaaagtgtctttgctgcctcggttctctttatggttaaagaggaattggtcaagttagcagtgcttttagttgcgagtagtaggactatgcttattactacatccaagaaacaataggtggtggtgtatttgggagaaaagctcatttttttgcctcaacttgtaatgtatagggtcccattatacatatcctgttcaagatcaatatgaaattctttactggttactagagaaaaccttaaagcctctcaaaagccataccttccccttattaatgaaggataaaatcatctaaaagatattacatgttttgggtttaactgatatacaaaattaagggtatgtttgttttagcttcttgaactagatctggtgccaaaaatctg

SEQ ID NO: 76953 - DNA, 1571 bp, Zea Mays
acgtcgtcttattcgcatgctatctcattcagtcctgagttctgatcctctccgtctctccctcctccctctccatccaaagtgtagtgtagacagtaacccacatctcgtttcctcgccgcggccacggcgccgactgagcgaggtcttcatctgcgcttcaccagcgacgattatccactaggtaggggatcatccgatcatgtcgagcgcggcggtgaacgggctgtccggcgccggcggcggcatcatcgcgcagatcatcacctaccctctccaaaccgtgaacacccggcagcagacggagaggtcaacgaagaagaggaaggccaggagcggcgccagcgccaccccagcctccaccatgtaccagatgctccaggtgattcatcgcgggcttcaggatggagtgggttgtacagcggcctcaagccctctctcatcggcactgccgcgtcgcagggaatctattactacttctaccagatcctcaagaacaaggtggaagatatagcggttgctcgtagcaagaagggccttggggatggtactgtcgggatgctttcttggcttggtattgcagctgttgctgggtcaatcaatgttcttctaaccaatccaatatgggttcttgtgacacgtatgcagacacatactcaagcgaaaagaaaaatattggagtctaagagggagcttttactgaaagaaatgtctagggcgaattcgttggaggttgcagttctgaaggataggctggttaaattggagtcagaaaaagctcgtccatatggtactcttcaagcgatccaggaggtttaccatgagtctggtgtaagaggattttggaaagggcttattccaacattaatcatggtatgtaatccatcgattcagttcatgatctatgaaacattggcaaagcgtctgcagtcaaagcgttctggaaagcagctaccaaaaaggcacctcacagctatggaggtttttttattgggtgcattggcaaaacttggagctactgtagtcacctatccattgctagtcgtgaagtcaaggttgcaggcaaaacaagaaattggcagcaatgtgatgtccagatacacgggtacaatagatgcgataataaagatggttcgctacgaaggactacacgggttttacaaaggaatgggcacaaaaattgtacaaagtgtctttgctgcctcggttctctttatggttaaagaggaattggtcaagttagcagtgcttttagttgcgagtagtaggactatgcttattactacatccaagaaacaataggtggtggtgtatttgggagaaaagctcatttttttgcctcaacttgtaatgtatagggtcccattatacatatcctgttcaagatcaatatgaaattctttactggttactagagaaaaccttaaagcctctcaaaagccataccttccccttattaatgaaggataaaatcatctaaaagatattacatgttttgggtttaactgatatacaaaattaagggtatgtttgttttagcttcttgaactagatctggtgccaaaaatctg

SEQ ID NO: 76954 - DNA, 1594 bp, Zea Mays
atcatccggtggcgtactgacgtcgtcttattcgcatgctatctcattcagtcctgagttctgatcctctccgtctctccctcctccctctccatccaaagtgtagtgtagacagtaacccacatctcgtttcctcgccgcggccacggcgccgactgagcgaggtcttcatctgcgcttcaccagcgacgattatccactaggtaggggatcatccgatcatgtcgagcgcggcggtgaacgggctgtccggcgccggcggcggcatcatcgcgcagatcatcacctaccctctccaaaccgtgaacacccggcagcagacggagaggtcaacgaagaagaggaaggccaggagcggcgccagcgccaccccagcctccaccatgtaccagatgctccagtgactgcagctgattcaaaccgaaggatggagtgggttgtacagcggcctcaagccctctctcatcggcactgccgcgtcgcagggaatctattactacttctaccagatcctcaagaacaaggtggaagatatagcggttgctcgtagcaagaagggccttggggatggtactgtcgggatgctttcttggcttggtattgcagctgttgctgggtcaatcaatgttcttctaaccaatccaatatgggttcttgtgacacgtatgcagacacatactcaagcgaaaagaaaaatattggagtctaagagggagcttttactgaaagaaatgtctagggcgaattcgttggaggttgcagttctgaaggataggctggttaaattggagtcagaaaaagctcgtccatatggtactcttcaagcgatccaggaggtttaccatgagtctggtgtaagaggattttggaaagggcttattccaacattaatcatggtatgtaatccatcgattcagttcatgatctatgaaacattggcaaagcgtctgcagtcaaagcgttctggaaagcagctaccaaaaaggcacctcacagctatggaggtttttttattgggtgcattggcaaaacttggagctactgtagtcacctatccattgctagtcgtgaagtcaaggttgcaggcaaaacaagaaattggcagcaatgtgatgtccagatacacgggtacaatagatgcgataataaagatggttcgctacgaaggactacacgggttttacaaaggaatgggcacaaaaattgtacaaagtgtctttgctgcctcggttctctttatggttaaagaggaattggtcaagttagcagtgcttttagttgcgagtagtaggactatgcttattactacatccaagaaacaataggtggtggtgtatttgggagaaaagctcatttttttgcctcaacttgtaatgtatagggtcccattatacatatcctgttcaagatcaatatgaaattctttactggttactagagaaaaccttaaagcctctcaaaagccataccttccccttattaatgaaggataaaatcatctaaaagatattacatgttttgggtttaactgatatacaaaattaagggtatgtttgttttagcttcttgaactagatctggtgccaaaaatctg

SEQ ID NO: 76955 - DNA, 1751 bp, Zea Mays
ggcaacaggcacatggttgggcgggcggtttgccttttgcccgtttctcacacacgcattctgagtttctgacgagacgaccaacaccacacggagaagacggaggacagtagagtcgtcgaagcagctgtacgccggaaggcctacccccgctatactatctgccttcctactcgcttccctccccgagtccccgtcctcctcagctgccttccgccgccgtgcagcacccgcgcagcctccactccggcgtcgtctccctccctcctccgccatcgccaccgggacacgcaaaggtcttgtctttgggtagaacatgtcgtgctttgcatgctgtggtgatgaagatacacaagtaccagacaccaggactcaatacccaggacatcatccagcaagagccgacgcataccgccctgctgatcaacctcccaagggttcccaacctgtgaaaatgcaaccgattgcagtccctgccattcctgtggatgagcttagggaggtgactaagggttttggtgatgaagccttgattggtgagggctcctttggtagagtatacttaggtgttctaagaaatggcaggagtgccgcggtcaaaaagttggattctaataagcagccagaccaagaattcttggcgcaggtgtctatggtgtcaaggctgaagcacgaaaatgttgttgagttgcttggttactgtgctgatgggacactccgcgtccttgcctacgagtttgctactatgggttcccttcatgatatgcttcatggaaggaaaggtgttaaaggggctcaacccggcccggtcttatcatggttgcagcgtgtgaagatagctgttggggcagcaaaaggcctcgagtatcttcacgagaaggcgcagcctcatatcatgcaccgagacatcaagtctagcaacgttcttcttttcgatgacgacgtagctaagatcgctgacttcgatttgtcaaaccaagctccggacatggcagcccgacttcactcgactagggttcttggaacgttcggataccatgcgcctgagtatgcaatgaccgggcaactcagctccaagagcgatgtatatagttttggagtcgttcttctcgagctattgaccggaaggaaacctgtggaccatacattaccaaggggacagcagagtcttgtgacttgggctaccccaagacttagcgaagacaaggttagacaatgcgttgactcgaggcttggaggggactaccctcctaaagctgttgcgaagtttgcagctgttgccgcgctgtgtgttcagtacgaagcggacttccggccaaacatgagcattgttgtcaaggcgctacagcccctgctgaatgcgcatgcgcgggcgaccaacccttgagaaaaatgctagctcaaaagcttcgcattgctcctctccgccctcttgtatgatagataagtaagatacgagtcgccgatgtcgttcttgcggacacatggctggcagcgtgtgacatttgtgattatttgtcccctgaattgtaaacaagattcttgtatccccacaacacttgattctttctatcggttgcaagatgacctgccgttttcttcttaagaagtcaccttagcaaaactcacaaactttattactccctctgttcaattataggatgctttgattttgtctagtcgtatagtttttgttatataaatatcttacaatttggaatggtattgactattgagggcttgtttggatc

SEQ ID NO: 76956 - DNA, 3426 bp, Zea Mays
cccgcgcgcccaccgccgcgcgcagcaccgcgccgcccacccgcggccaccccagcgccccaaatgccgctccaaccctagcctctcgccatgcctttcgatctcgggcggccatgggaaactgatgccgctcgccggtcgccgtcgcgcgggaggacgtcagctcctcgcacttccccgcatccacctcgtcatggagctctgcgagggcggcgagttcttcgaccgcatcgtcgcgcgggggcactacaccgagcgcgccgccaccaatgtcactcgcaccatcgtcgaggtcgtccatttctgccatcggcacgacgtcatccaccgtgacctcaagccggagaacttccttttcgccaataagaaggagaactcgccgccgcgcagcgcccctctcgatatgccgccctgcttcctcctctcctcttgatccatctgccatcccatccccgctctgccagttgcccctcgcttcctcttcggctcttcatccccctcgatccgtcgcccgtgcttcctcctcactatgtcccgtcccctctccatcttgtcgccctgcctccccgcgtctgcgtctgcgcctgccttcggcgtccagagccatatccgcgttggcctccacctacgcacccgcctctagccataagagctcctcccgtgtctgcctttagagatctgctacctccacatcggtgtctagggctcctccattgcctagatctactagagtgagtgagcctacagagctggcctcatccaggctccagttccaccccacggtcatcctctgttgctctacgtttcatgcttctcacatcctctcctcaatctcatcaactgtgctgaaggaggcagatgaaagtatttccgtctcatcaactgtgctgaagaggaggaaaacacctcacttgttgaagggagcagtggagacccggaggaagatcatttggagtctgcagctactaatcttcagcctggcagtgacacttgcattgcaagggaagagttgccagatcagaaggatctggtgaaactgcaagctgttatccgtggacatctagaggcggcccatgcctcacggccaaagcagatcagatgagattttttggtcttgcgtggttctttttaatctactcacatgatacttcttattcattgccatccaatttaattaattgccctcgattgaattggttcctttgccattttacttaggaggataaaagaagacactaccttggcacatgcctgttgtcacaatggacaaaagaagattagtgttgtgtgagatttttttcattcctttgatctattgcatgctatttgtaccctaatcgacaaaatagatgagactcaattcaggagcaaatcaccagtcctgttcacagtccaattcactatggctaaaatatcaaacttatgctccttgaggtttgttttttccttatcttcctttaatatctgatgactgatggactggtgagttcatgatctgcttcatgcttttccttttatatatggtcactacctcactggttagttcatggtgctttttgtctacttctttgcccaaaaaaaatcccggggcgaatttcagcatgcttttcctgcttccgctgtgcaaattcacaggatgcgtgggaaatgtgttcttgtttcgtcgggtggtgttcttgccattcgttttagctcaacacaaaacaaatgcttcttgttcttcaggtcgccctgtgtttctttctcgccagtttgggccatggattctggtgtgcatttgttcaatatatcttagtatcttatttaacaatcagtacttctctgatgctcaagagatcaatttactcaaagtagcaaactgtatcatagttgtatactttatcaaacgaggaacctgatgcttgtagtataagcctcattttgttccaaacaagacaggcttcggatacaatcacctggaaatcaatcagtaaacttttgctattcagttttttaaataaaaaatttaggccttacgactttcctcgcaatgtgttcacatgtagattaccttattgcattgcctacttttgtccgttgtgtaaaccaatcttttatcatttatcaaatgattttgctcttaacattaacaaattatcgtttggtcatatgcaactaatgacatcacattaccaagattctggggacccatcgctaccttgtgtcaacagtagactgaccagatcagggaaacgctcggcggcgaagctaaagcagagcttgcgctacacgcgctgcgagcagtttctgtctaaagggcaaggtctgatctcatatttgagctccccgtggcactgctcgcccggccagccaccatcccggtcttgcgctcggcggcgtgcatggtgtgctcgtccctgacagtggctagcttctgttttcttaattgatggctagcttctgttttcttaattgatgatttgttttttccttttctgatcgtcaatagggaagagacgacgataacatggacactgttttctaaatggatcagtatttttgttgcggctctggataaactcgaagctgacctatccaagttcgacgacgggcccttcttcctaggccaattcagcttggcggatgtagcgtacattacgattctggaaagggttcagatatactattcccatcttaggaactacgacatcgccgaaggcaggcccaacctccaggaattcatcgaggagatgaacaagattgaagcgtatgcgcagaccaagaacgatcctctgttcttgcttgatcttgccaagaaccatcttaagattgcctgaagatgtgacaaagcagcattagtccgttgatcggtggaagaccactcgtcagtgttgagttgaatgtttgatcaataaaatacggcatgttgttgctgactttggacttgcaaagttcactactgataataacacccatgtttcaacaagagtaatgggtacttttgggtatttggcacctgagtatgcagcatctggcaagctcacagaaaaatccgatgtattttctttcggagtcatgcttcttgagcttattactgggcggcgaccaattgacacaacccaattggcactgcttgttataagcacatatgtacttccatttgcatgttgtataatactaataccaattgcaaaattatagttattttttctacccttgttagttaataagcatatttgtggtcaataggttgtattcttattcttgtaaccgtgttaattaatgttatggacttgtagtcttgtattaccttgtgaatatatctgtccctgcctgccatgtgaacgtgcttagcctggaatttgtgatatgtacatatatccatgtgtttgaaatctgtattgtatgtgatattccgtgttgcatgtgatattatgtacgtctaat

SEQ ID NO: 76957 - DNA, 3492 bp, Zea Mays
cccgcgcgcccaccgccgcgcgcagcaccgcgccgcccacccgcggccaccccagcgccccaaatgccgctccaaccctagcctctcgccatgcctttcgatctcgggcggccatgggaaactgatgccgctcgccggtcgccgtcgcgcgggaggacgtcagctcctcgcacttccccgcatccacctcgtcatggagctctgcgagggcggcgagttcttcgaccgcatcgtcgcgcgggggcactacaccgagcgcgccgccaccaatgtcactcgcaccatcgtcgaggtcgtccatttctgccatcggcacgacgtcatccaccgtgacctcaagccggagaacttccttttcgccaataagaaggagaactcgccgccgcgcagcgcccctctcgatatgccgccctgcttcctcctctcctcttgatccatctgccatcccatccccgctctgccagttgcccctcgcttcctcttcggctcttcatccccctcgatccgtcgcccgtgcttcctcctcactatgtcccgtcccctctccatcttgtcgccctgcctccccgcgtctgcgtctgcgcctgccttcggcgtccagagccatatccgcgttggcctccacctacgcacccgcctctagccataagagctcctcccgtgtctgcctttagagatctgctacctccacatcggtgtctagggctcctccattgcctagatctactagaatgaaagtatttccgtctcatcaactgtgctgaagaggaggaaaacacctcacttgttgaagggagcagtggagacccggaggaagatcatttggagtctgcagctactaatcttcagcctggcagtgacacttgcattgcaagggaagagttgccagatcagaaggatctggtgaaactgcaagctgttatccgtggacatctagaggcggcccatgcctcacggccaaagcagatcagatgagattttttggtcttgcgtggttctttttaatctactcacatgatacttcttattcattgccatccaatttaattaattgccctcgattgaattggttcctttgccattttacttaggaggataaaagaagacactaccttggcacatgcctgttgtcacaatggacaaaagaagattagtgttgtgtgagatttttttcattcctttgatctattgcatgctatttgtaccctaatcgacaaaatagatgagactcaattcaggagcaaatcaccagtcctgttcacagtccaattcactatggctaaaatatcaaacttatgctccttgaggtttgttttttccttatcttcctttaatatctgatgactgatggactggtgagttcatgatctgcttcatgcttttccttttatatatggtcactacctcactggttagttcatggtgctttttgtctacttctttgcccaaaaaaaatcccggggcgaatttcagcatgcttttcctgcttccgctgtgcaaattcacaggatgcgtgggaaatgtgttcttgtttcgtcgggtggtgttcttgccattcgttttagctcaacacaaaacaaatgcttcttgttcttcaggtcgccctgtgtttctttctcgccagtttgggccatggattctggtgtgcatttgttcaatatatcttagtatcttatttaacaatcagtacttctctgatgctcaagagatcaatttactcaaagtagcaaactgtatcatagttgtatactttatcaaacgaggaacctgatgcttgtagtataagcctcattttgttccaaacaagacaggcttcggatacaatcacctggaaatcaatcagtaaacttttgctattcagttttttaaataaaaaatttaggccttacgactttcctcgcaatgtgttcacatgtagattaccttattgcattgcctacttttgtccgttgtgtaaaccaatcttttatcatttatcaaatgattttgctcttaacattaacaaattatcgtttggtcatatgcaactaatgacatcacattaccaagattctggggacccatcgctaccttgtgtcaacagtagactgaccagatcaggtaccattttgaaacctgtgtacaatttcatttctcaataactggccgaacataaatagccaaggcatgggtttatgccaatactcataggttaaatgacactttggtcatatgcatagttgccaccctcaaatgcctatctcatgatagaagtaaatggtggtctaaatcaacaacgactttctataagtaccatgactattattcttgaacaaatgtgtgctcatggttctgagtagatattaccattgccattgttttatatggaagtccagtgccttgtcaatctttggtccacgagtaagtgttttggatattcatgttagtgtacactgtaatcaacagagctggttttctttaacagttttgttatgaaatcatggaactggcaacatgatagaatttttcaaggaaaaaaagggaaacgctcggcggcgaagctaaagcagagcttgcgctacacgcgctgcgagcagtttctgtctaaagggcaaggtctgatctcatttgcggctctggataaactcgaagctgacctatccaagttcgacgacgggcccttcttcctaggccaattcagcttggcggatgtagcgtacattacgattctggaaagggttcagatatactattcccatcttaggaactacgacatcgccgaaggcaggcccaacctccaggaattcatcgaggagatgaacaagattgaagcgtatgcgcagaccaagaacgatcctctgttcttgcttgatcttgccaagaaccatcttaagattgcctgaagatgtgacaaagcagcattagtccgttgatcggtggaagaccactcgtcagtgttgagttgaatgtttgatcaataaaatacggcatgttgttgctgactttggacttgcaaagttcactactgataataacacccatgtttcaacaagagtaatgggtacttttgggtatttggcacctgagtatgcagcatctggcaagctcacagaaaaatccgatgtattttctttcggagtcatgcttcttgagcttattactgggcggcgaccaattgacacaacccaattggcactgcttgttataagcacatatgtacttccatttgcatgttgtataatactaataccaattgcaaaattatagttattttttctacccttgttagttaataagcatatttgtggtcaataggttgtattcttattcttgtaaccgtgttaattaatgttatggacttgtagtcttgtattaccttgtgaatatatctgtccctgcctgccatgtgaacgtgcttagcctggaatttgtgatatgtacatatatccatgtgtttgaaatctgtattgtatgtgatattccgtgttgcatgtgatattatgtacgtctaat

SEQ ID NO: 76958 - DNA, 3774 bp, Zea Mays
cccgcgcgcccaccgccgcgcgcagcaccgcgccgcccacccgcggccaccccagcgccccaaatgccgctccaaccctagcctctcgccatgcctttcgatctcgggcggccatgggaaactgatgccgctcgccggtcgccgtcgcgcgggaggacgtcagctcctcgcacttccccgcatccacctcgtcatggagctctgcgagggcggcgagttcttcgaccgcatcgtcgcgcgggggcactacaccgagcgcgccgccaccaatgtcactcgcaccatcgtcgaggtcgtccatttctgccatcggcacgacgtcatccaccgtgacctcaagccggagaacttccttttcgccaataagaaggagaactcgccgccgcgcagcgcccctctcgatatgccgccctgcttcctcctctcctcttgatccatctgccatcccatccccgctctgccagttgcccctcgcttcctcttcggctcttcatccccctcgatccgtcgcccgtgcttcctcctcactatgtcccgtcccctctccatcttgtcgccctgcctccccgcgtctgcgtctgcgcctgccttcggcgtccagagccatatccgcgttggcctccacctacgcacccgcctctagccataagagctcctcccgtgtctgcctttagagatctgctacctccacatcggtgtctagggctcctccattgcctagatctactagagtgagtgagcctacagagctggcctcatccaggctccagttccaccccacggtcatcctctgttgctctacgtttcatgcttctcacatcctctcctcaatctcatcaactgtgctgaaggaggcagatgaaagtatttccgtctcatcaactgtgctgaagaggaggaaaacacctcacttgttgaagggagcagtggagacccggaggaagatcatttggagtctgcagctactaatcttcagcctggcagtgacacttgcattgcaagggaagagttgccagatcagaaggatctggtgaaactgcaagctgttatccgtggacatctagaggcggcccatgcctcacggccaaagcagatcagttaggaggataaaagaagacactaccttggcacatgcctgttgtcacaatggacaaaagaagattagtgttgtgtgagatttttttcattcctttgatctattgcatgctatttgtaccctaatcgacaaaatagatgagactcaattcaggagcaaatcaccagtcctgttcacagtccaattcactatggctaaaatatcaaacttatgctccttgaggtttgttttttccttatcttcctttaatatctgatgactgatggactggtgagttcatgatctgcttcatgcttttccttttatatatggtcactacctcactggttagttcatggtgctttttgtctacttctttgcccaaaaaaaatcccggggcgaatttcagcatgcttttcctgcttccgctgtgcaaattcacaggatgcgtgggaaatgtgttcttgtttcgtcgggtggtgttcttgccattcgttttagctcaacacaaaacaaatgcttcttgttcttcaggtcgccctgtgtttctttctcgccagtttgggccatggattctggtgtgcatttgttcaatatatcttagtatcttatttaacaatcagtacttctctgatgctcaagagatcaatttactcaaagtagcaaactgtatcatagttgtatactttatcaaacgaggaacctgatgcttgtagtataagcctcattttgttccaaacaagacaggcttcggatacaatcacctggaaatcaatcagtaaacttttgctattcagttttttaaataaaaaatttaggccttacgactttcctcgcaatgtgttcacatgtagattaccttattgcattgcctacttttgtccgttgtgtaaaccaatcttttatcatttatcaaatgattttgctcttaacattaacaaattatcgtttggtcatatgcaactaatgacatcacattaccaagattctggggacccatcgctaccttgtgtcaacagtagactgaccagatcaggtaccattttgaaacctgtgtacaatttcatttctcaataactggccgaacataaatagccaaggcatgggtttatgccaatactcataggttaaatgacactttggtcatatgcatagttgccaccctcaaatgcctatctcatgatagaagtaaatggtggtctaaatcaacaacgactttctataagtaccatgactattattcttgaacaaatgtgtgctcatggttctgagtagatattaccattgccattgttttatatggaagtccagtgccttgtcaatctttggtccacgagtaagtgttttggatattcatgttagtgtacactgtaatcaacagagctggttttctttaacagttttgttatgaaatcatggaactggcaacatgatagaatttttcaaggaaaaaaaggtaatatattaattgtgcagcgtgccaatctaatatgagttatattaattgtgcctagaacctgtctagacaatctggagtaatatattaattgtgcagagctgtctagaacctgccgaaacaatctggagtaatatattaattgtgcagcgtgccaatctaatatgagttatgttctttttggtgttcctttcaagggaaacgctcggcggcgaagctaaagcagagcttgcgctacacgcgctgcgagcagtttctgtctaaagggcaaggtctgatctcatcaagttcagcaggggccagactaataaatcagcttgatagcatccttgcagcggtgccttggactttggcggttagaagagttgcggctctggataaactcgaagctgacctatccaagttcgacgacgggcccttcttcctaggccaattcagcttggcggatgtagcgtacattacgattctggaaagggttcagatatactattcccatcttaggaactacgacatcgccgaaggcaggcccaacctccaggaattcatcgaggagatgaacaagattgaagcgtatgcgcagaccaagaacgatcctctgttcttgcttgatcttgccaagaaccatcttaagattgcctgaagatgtgacaaagcagcattagtccgttgatcggtggaagaccactcgtcagtgttgagttgaatgtttgatcaataaaatacggttgctgactttggacttgcaaagttcactactgataataacacccatgtttcaacaagagtaatgggtacttttgggtatttggcacctgagtatgcagcatctggcaagctcacagaaaaatccgatgtattttctttcggagtcatgcttcttgagcttattactgggcggcgaccaattgacacaacccaattggcactgcttgttataagcacatatgtacttccatttgcatgttgtataatactaataccaattgcaaaattatagttattttttctacccttgttagttaataagcatatttgtggtcaataggttgtattcttattcttgtaaccgtgttaattaatgttatggacttgtagtcttgtattaccttgtgaatatatctgtccctgcctgccatgtgaacgtgcttagcctggaatttgtgatatgtacatatatccatgtgtttgaaatctgtattgtatgtgatattccgtgttgcatgtgatattatgtacgtctaat

SEQ ID NO: 76959 - DNA, 3793 bp, Zea Mays
cccgcgcgcccaccgccgcgcgcagcaccgcgccgcccacccgcggccaccccagcgccccaaatgccgctccaaccctagcctctcgccatgcctttcgatctcgggcggccatgggaaactgatgccgctcgccggtcgccgtcgcgcgggaggacgtcagctcctcgcacttccccgcatccacctcgtcatggagctctgcgagggcggcgagttcttcgaccgcatcgtcgcgcgggggcactacaccgagcgcgccgccaccaatgtcactcgcaccatcgtcgaggtcgtccatttctgccatcggcacgacgtcatccaccgtgacctcaagccggagaacttccttttcgccaataagaaggagaactcgccgccgcgcagcgcccctctcgatatgccgccctgcttcctcctctcctcttgatccatctgccatcccatccccgctctgccagttgcccctcgcttcctcttcggctcttcatccccctcgatccgtcgcccgtgcttcctcctcactatgtcccgtcccctctccatcttgtcgccctgcctccccgcgtctgcgtctgcgcctgccttcggcgtccagagccatatccgcgttggcctccacctacgcacccgcctctagccataagagctcctcccgtgtctgcctttagagatctgctacctccacatcggtgtctagggctcctccattgcctagatctactagagtgagtgagcctacagagctggcctcatccaggctccagttccaccccacggtcatcctctgttgctctacgtttcatgcttctcacatcctctcctcaatctcatcaactgtgctgaaggaggcagatgaaagtatttccgtctcatcaactgtgctgaagaggaggaaaacacctcacttgttgaagggagcagtggagacccggaggaagatcatttggagtctgcagctactaatcttcagcctggcagtgacacttgcattgcaagggaagagttgccagatcagaaggatctggtgaaactgcaagctgttatccgtggacatctagaggcggcccatgcctcacggccaaagcagatcagatgagattttttggtcttgcgtggttctttttaatctactcacatgatacttcttattcattgccatccaatttaattaattgccctcgattgaattggttcctttgccattttacttaggaggataaaagaagacactaccttggcacatgcctgttgtcacaatggacaaaagaagattagtgttgtgtgagatttttttcattcctttgatctattgcatgctatttgtaccctaatcgacaaaatagatgagactcaattcaggagcaaatcaccagtcctgttcacagtccaattcactatggctaaaatatcaaacttatgctccttgaggtttgttttttccttatcttcctttaatatctgatgactgatggactggtgagttcatgatctgcttcatgcttttccttttatatatggtcactacctcactggttagttcatggtgctttttgtctacttctttgcccaaaaaaaatcccggggcgaatttcagcatgcttttcctgcttccgctgtgcaaattcacaggatgcgtgggaaatgtgttcttgtttcgtcgggtggtgttcttgccattcgttttagctcaacacaaaacaaatgcttcttgttcttcaggtcgccctgtgtttctttctcgccagtttgggccatggattctggtgtgcatttgttcaatatatcttagtatcttatttaacaatcagtacttctctgatgctcaagagatcaatttactcaaagtagcaaactgtatcatagttgtatactttatcaaacgaggaacctgatgcttgtagtataagcctcattttgttccaaacaagacaggcttcggatacaatcacctggaaatcaatcagtaaacttttgctattcagttttttaaataaaaaatttaggccttacgactttcctcgcaatgtgttcacatgtagattaccttattgcattgcctacttttgtccgttgtgtaaaccaatcttttatcatttatcaaatgattttgctcttaacattaacaaattatcgtttggtcatatgcaactaatgacatcacattaccaagattctggggacccatcgctaccttgtgtcaacagtagactgaccagatcagttttgttatgaaatcatggaactggcaacatgatagaatttttcaaggaaaaaaagggaaacgctcggcggcgaagctaaagcagagcttgcgctacacgcgctgcgagcagtttctgtctaaagggcaaggtctgatctcatatttgagctccccgtggcactgctcgcccggccagccaccatcccggtcttgcgctcggcggcgtgcatggtgtgctcgtccctgacagtggctagcttctgttttcttaattgatggctagcttctgttttcttaattgatgatttgttttttccttttctgatcgtcaatagggaagagacgacgataacatggacactgttttctaaatggatcagtatttttggtatatacacatgcttttactagtagaggagtatttattttcatttgtagcagccaaggaacttgtgcattccttatgaatcatgagaagaccatgaagatgcacacaaatttgcttgacttctgaccagtaataattagcgaaagaaagaaaatccagaaccatgaatcagcttgatagcagtaacaaatttgcttgacttctgacgagtaagaaattggcagcaagttcagcaggggccagactaataaatcagcttgatagcatccttgcagcggtgccttggactttggcggttagaagagttgcggctctggataaactcgaagctgacctatccaagttcgacgacgggcccttcttcctaggccaattcagcttggcggatgtagcgtacattacgattctggaaagggttcagatatactattcccatcttaggaactacgacatcgccgaaggcaggcccaacctccaggaattcatcgaggagatgaacaagattgaagcgtatgcgcagaccaagaacgatcctctgttcttgcttgatcttgccaagaaccatcttaagattgcctgaagatgtgacaaagcagcattagtccgttgatcggtggaagaccactcgtcagtgttgagttgaatgtttgatcaataaaatacggcatgttgtaagggttgctgactttggacttgcaaagttcactactgataataacacccatgtttcaacaagagtaatgggtacttttgggtatttggcacctgagtatgcagcatctggcaagctcacagaaaaatccgatgtattttctttcggagtcatgcttcttgagcttattactgggcggcgaccaattgacacaacccaattggcactgcttgttataagcacatatgtacttccatttgcatgttgtataatactaataccaattgcaaaattatagttattttttctacccttgttagttaataagcatatttgtggtcaataggttgtattcttattcttgtaaccgtgttaattaatgttatggacttgtagtcttgtattaccttgtgaatatatctgtccctgcctgccatgtgaacgtgcttagcctggaatttgtgatatgtacatatatccatgtgtttgaaatctgtattgtatgtgatattccgtgttgcatgtgatattatgtacgtctaat

SEQ ID NO: 76960 - DNA, 3932 bp, Zea Mays
cccgcgcgcccaccgccgcgcgcagcaccgcgccgcccacccgcggccaccccagcgccccaaatgccgctccaaccctagcctctcgccatgcctttcgatctcgggcggccatgggaaactgatgccgctcgccggtcgccgtcgcgcgggaggacgtcagctcctcgcacttccccgcatccacctcgtcatggagctctgcgagggcggcgagttcttcgaccgcatcgtcgcgcgggggcactacaccgagcgcgccgccaccaatgtcactcgcaccatcgtcgaggtcgtccatttctgccatcggcacgacgtcatccaccgtgacctcaagccggagaacttccttttcgccaataagaaggagaactcgccgccgcgcagcgcccctctcgatatgccgccctgcttcctcctctcctcttgatccatctgccatcccatccccgctctgccagttgcccctcgcttcctcttcggctcttcatccccctcgatccgtcgcccgtgcttcctcctcactatgtcccgtcccctctccatcttgtcgccctgcctccccgcgtctgcgtctgcgcctgccttcggcgtccagagccatatccgcgttggcctccacctacgcacccgcctctagccataagagctcctcccgtgtctgcctttagagatctgctacctccacatcggtgtctagggctcctccattgcctagatctactagagtgagtgagcctacagagctggcctcatccaggctccagttccaccccacggtcatcctctgttgctctacgtttcatgcttctcacatcctctcctcaatctcatcaactgtgctgaaggaggcagatgaaagtatttccgtctcatcaactgtgctgaagaggaggaaaacacctcacttgttgaagggagcagtggagacccggaggaagatcatttggagtctgcagctactaatcttcagcctggcagtgacacttgcattgcaagggaagagttgccagatcagaaggatctggtgaaactgcaagctgttatccgtggacatctagaggcggcccatgcctcacggccaaagcagatcagatgagattttttggtcttgcgtggttctttttaatctactcacatgatacttcttattcattgccatccaatttaattaattgccctcgattgaattggttcctttgccattttacttaggaggataaaagaagacactaccttggcacatgcctgttgtcacaatggacaaaagaagattagtgttgtgtgagatttttttcattcctttgatctattgcatgctatttgtaccctaatcgacaaaatagatgagactcaattcaggagcaaatcaccagtcctgttcacagtccaattcactatggctaaaatatcaaacttatgctccttgaggtttgttttttccttatcttcctttaatatctgatgactgatggactggtgagttcatgatctgcttcatgcttttccttttatatatggtcactacctcactggttagttcatggtgctttttgtctacttctttgcccaaaaaaaatcccggggcgaatttcagcatgcttttcctgcttccgctgtgcaaattcacaggatgcgtgggaaatgtgttcttgtttcgtcgggtggtgttcttgccattcgttttagctcaacacaaaacaaatgcttcttgttcttcaggtcgccctgtgtttctttctcgccagtttgggccatggattctggtgtgcatttgttcaatatatcttagtatcttatttaacaatcagtacttctctgatgctcaagagatcaatttactcaaagtagcaaactgtatcatagttgtatactttatcaaacgaggaacctgatgcttgtagtataagcctcattttgttccaaacaagacaggcttcggatacaatcacctggaaatcaatcagtaaacttttgctattcagttttttaaataaaaaatttaggccttacgactttcctcgcaatgtgttcacatgtagattaccttattgcattgcctacttttgtccgttgtgtaaaccaatcttttatcatttatcaaatgattttgctcttaacattaacaaattatcgtttggtcatatgcaactaatgacatcacattaccaagattctggggacccatcgctaccttgtgtcaacagtagactgaccagatcaggtaccattttgaaacctgtgtacaatttcatttctcaataactggccgaacataaatagccaaggcatgggtttatgccaatactcataggttaaatgacactttggtcatatgcatagttgccaccctcaaatgcctatctcatgatagaagtaaatggtggtctaaatcaacaacgactttctataagtaccatgactattattcttgaacaaatgtgtgctcatggttctgagtagatattaccattgccattgttttatatggaagtccagtgccttgtcaatctttggtccacgagtaagtgttttggatattcatgttagtgtacactgtaatcaacagagctggttttctttaacagttttgttatgaaatcatggaactggcaacatgatagaatttttcaaggaaaaaaaggtaatatattaattgtgcagcgtgccaatctaatatgagttatattaattgtgcctagaacctgtctagacaatctggagtaatatattaattgtgcagagctgtctagaacctgccgaaacaatctggagtaatatattaattgtgcagcgtgccaatctaatatgagttatgttctttttggtgttcctttcaagggaaacgctcggcggcgaagctaaagcagagcttgcgctacacgcgctgcgagcagtttctgtctaaagggcaaggtctgatctcatatttgagctccccgtggcactgctcgcccggccagccaccatcccggtcttgcgctcggcggcgtgcatgggaagagacgacgataacatggacactgttttctaaatggatcagtatttttgttgcggctctggataaactcgaagctgacctatccaagttcgacgacgggcccttcttcctaggccaattcagcttggcggatgtagcgtacattacgattctggaaagggttcagatatactattcccatcttaggaactacgacatcgccgaaggcaggcccaacctccaggaattcatcgaggagatgaacaagattgaagcgtatgcgcagaccaagaacgatcctctgttcttgcttgatcttgccaagaaccatcttaagattgcctgaagatgtgacaaagcagcattagtccgttgatcggtggaagaccactcgtcagtgttgagttgaatgtttgatcaataaaatacggttgctgactttggacttgcaaagttcactactgataataacacccatgtttcaacaagagtaatgggtacttttgggtatttggcacctgagtatgcagcatctggcaagctcacagaaaaatccgatgtattttctttcggagtcatgcttcttgagcttattactgggcggcgaccaattgacacaacccaattggcactgcttgttataagcacatatgtacttccatttgcatgttgtataatactaataccaattgcaaaattatagttattttttctacccttgttagttaataagcatatttgtggtcaataggttgtattcttattcttgtaaccgtgttaattaatgttatggacttgtagtcttgtattaccttgtgaatatatctgtccctgcctgccatgtgaacgtgcttagcctggaatttgtgatatgtacatatatccatgtgtttgaaatctgtattgtatgtgatattccgtgttgcatgtgatattatgtacgtctaat

SEQ ID NO: 76961 - DNA, 3236 bp, Zea Mays
cccgcgcgcccaccgccgcgcgcagcaccgcgccgcccacccgcggccaccccagcgccccaaatgccgctccaaccctagcctctcgccatgcctttcgatctcgggcggccatgggaaactgatgccgctcgccggtcgccgtcgcgcgggaggacgtcagctcctcgcacttccccgcatccacctcgtcatggagctctgcgagggcggcgagttcttcgaccgcatcgtcgcgcgggggcactacaccgagcgcgccgccaccaatgtcactcgcaccatcgtcgaggtcgtccatttctgccatcggcacgacgtcatccaccgtgacctcaagccggagaacttccttttcgccaataagaaggagaactcgccgccgcgcagcgcccctctcgatatgccgccctgcttcctcctctcctcttgatccatctgccatcccatccccgctctgccagttgcccctcgcttcctcttcggctcttcatccccctcgatccgtcgcccgtgcttcctcctcactatgtcccgtcccctctccatcttgtcgccctgcctccccgcgtctgcgtctgcgcctgccttcggcgtccagagccatatccgcgttggcctccacctacgcacccgcctctagccataagagctcctcccgtgtctgcctttagagatctgctacctccacatcggtgtctagggctcctccattgcctagatctactagagtgagtgagcctacagagctggcctcatccaggctccagttccaccccacggtcatcctctgttgctctacgtttcatgcttctcacatcctctcctcaatctcatcaactgtgctgaaggaggcagatgaaagtatttccgtctcatcaactgtgctgaagaggaggaaaacacctcacttgttgaagggagcagtggagacccggaggaagatcatttggagtctgcagctactaatcttcagcctggcagtgacacttgcattgcaagggaagagttgccagatcagaaggatctggtgaaactgcaagctgttatccgtggacatctagaggcggcccatgcctcacggccaaagcagatcagatgagattttttggtcttgcgtggttctttttaatctactcacatgatacttcttattcattgccatccaatttaattaattgccctcgattgaattggttcctttgccattttacttaggaggataaaagaagacactaccttggcacatgcctgttgtcacaatggacaaaagaagattagtgttgtgtgagatttttttcattcctttgatctattgcatgctatttgtaccctaatcgacaaaatagatgagactcaattcaggagcaaatcaccagtcctgttcacagtccaattcactatggctaaaatatcaaacttatgctccttgaggtttgttttttccttatcttcctttaatatctgatgactgatggactggtgagttcatgatctgcttcatgcttttccttttatatatggtcactacctcactggttagttcatggtgctttttgtctacttctttgcccaaaaaaaatcccggggcgaatttcagcatgcttttcctgcttccgctgtgcaaattcacaggatgcgtgggaaatgtgttcttgtttcgtcgggtggtgttcttgccattcgttttagctcaacacaaaacaaatgcttcttgttcttcaggtcgccctgtgtttctttctcgccagtttgggccatggattctggtgtgcatttgttcaatatatcttagtatcttatttaacaatcagtacttctctgatgctcaagagatcaatttactcaaagtagcaaactgtatcatagttgtatactttatcaaacgaggaacctgatgcttgtagtataagcctcattttgttccaaacaagacaggcttcggatacaatcacctggaaatcaatcagtaaacttttgctattcagttttttaaataaaaaatttaggccttacgactttcctcgcaatgtgttcacatgtagattaccttattgcattgcctacttttgtccgttgtgtaaaccaatcttttatcatttatcaaatgattttgctcttaacattaacaaattatcgtttggtcatatgcaactaatgacatcacattaccaagattctggggacccatcgctaccttgtgtcaacagtagactgaccagatcagttttgttatgaaatcatggaactggcaacatgatagaatttttcaaggaaaaaaagggaaacgctcggcggcgaagctaaagcagagcttgcgctacacgcgctgcgagcagtttctgtctaaagggcaagttgcggctctggataaactcgaagctgacctatccaagttcgacgacgggcccttcttcctaggccaattcagcttggcggatgtagcgtacattacgattctggaaagggttcagatatactattcccatcttaggaactacgacatcgccgaaggcaggcccaacctccaggaattcatcgaggagatgaacaagattgaagcgtatgcgcagaccaagaacgatcctctgttcttgcttgatcttgccaagaaccatcttaagattgcctgaagatgtgacaaagcagcattagtccgttgatcggtggaagaccactcgtcagtgttgagttgaatgtttgatcaataaaatacggttgctgactttggacttgcaaagttcactactgataataacacccatgtttcaacaagagtaatgggtacttttgggtatttggcacctgagtatgcagcatctggcaagctcacagaaaaatccgatgtattttctttcggagtcatgcttcttgagcttattactgggcggcgaccaattgacacaacccaattggcactgcttgttataagcacatatgtacttccatttgcatgttgtataatactaataccaattgcaaaattatagttattttttctacccttgttagttaataagcatatttgtggtcaataggttgtattcttattcttgtaaccgtgttaattaatgttatggacttgtagtcttgtattaccttgtgaatatatctgtccctgcctgccatgtgaacgtgcttagcctggaatttgtgatatgtacatatatccatgtgtttgaaatctgtattgtatgtgatattccgtgttgcatgtgatattatgtacgtctaat

SEQ ID NO: 76962 - DNA, 4020 bp, Zea Mays
cccgcgcgcccaccgccgcgcgcagcaccgcgccgcccacccgcggccaccccagcgccccaaatgccgctccaaccctagcctctcgccatgcctttcgatctcgggcggccatgggaaactgatgccgctcgccggtcgccgtcgcgcgggaggacgtcagctcctcgcacttccccgcatccacctcgtcatggagctctgcgagggcggcgagttcttcgaccgcatcgtcgcgcgggggcactacaccgagcgcgccgccaccaatgtcactcgcaccatcgtcgaggtcgtccatttctgccatcggcacgacgtcatccaccgtgacctcaagccggagaacttccttttcgccaataagaaggagaactcgccgccgcgcagcgcccctctcgatatgccgccctgcttcctcctctcctcttgatccatctgccatcccatccccgctctgccagttgcccctcgcttcctcttcggctcttcatccccctcgatccgtcgcccgtgcttcctcctcactatgtcccgtcccctctccatcttgtcgccctgcctccccgcgtctgcgtctgcgcctgccttcggcgtccagagccatatccgcgttggcctccacctacgcacccgcctctagccataagagctcctcccgtgtctgcctttagagatctgctacctccacatcggtgtctagggctcctccattgcctagatctactagagtgagtgagcctacagagctggcctcatccaggctccagttccaccccacggtcatcctctgttgctctacgtttcatgcttctcacatcctctcctcaatctcatcaactgtgctgaaggaggcagatgaaagtatttccgtctcatcaactgtgctgaagaggaggaaaacacctcacttgttgaagggagcagtggagacccggaggaagatcatttggagtctgcagctactaatcttcagcctggcagtgacacttgcattgcaagggaagagttgccagatcagaaggatctggtgaaactgcaagctgttatccgtggacatctagaggcggcccatgcctcacggccaaagcagatcagatgagattttttggtcttgcgtggttctttttaatctactcacatgatacttcttattcattgccatccaatttaattaattgccctcgattgaattggttcctttgccattttacttaggaggataaaagaagacactaccttggcacatgcctgttgtcacaatggacaaaagaagattagtgttgtgtgagatttttttcattcctttgatctattgcatgctatttgtaccctaatcgacaaaatagatgagactcaattcaggagcaaatcaccagtcctgttcacagtccaattcactatggctaaaatatcaaacttatgctccttgaggtttgttttttccttatcttcctttaatatctgatgactgatggactggtgagttcatgatctgcttcatgcttttccttttatatatggtcactacctcactggttagttcatggtgctttttgtctacttctttgcccaaaaaaaatcccggggcgaatttcagcatgcttttcctgcttccgctgtgcaaattcacaggatgcgtgggaaatgtgttcttgtttcgtcgggtggtgttcttgccattcgttttagctcaacacaaaacaaatgcttcttgttcttcaggtcgccctgtgtttctttctcgccagtttgggccatggattctggtgtgcatttgttcaatatatcttagtatcttatttaacaatcagtacttctctgatgctcaagagatcaatttactcaaagtagcaaactgtatcatagttgtatactttatcaaacgaggaacctgatgcttgtagtataagcctcattttgttccaaacaagacaggcttcggatacaatcacctggaaatcaatcagtaaacttttgctattcagttttttaaataaaaaatttaggccttacgactttcctcgcaatgtgttcacatgtagattaccttattgcattgcctacttttgtccgttgtgtaaaccaatcttttatcatttatcaaatgattttgctcttaacattaacaaattatcgtttggtcatatgcaactaatgacatcacattaccaagattctggggacccatcgctaccttgtgtcaacagtagactgaccagatcaggtaccattttgaaacctgtgtacaatttcatttctcaataactggccgaacataaatagccaaggcatgggtttatgccaatactcataggttaaatgacactttggtcatatgcatagttgccaccctcaaatgcctatctcatgatagaagtaaatggtggtctaaatcaacaacgactttctataagtaccatgactattattcttgaacaaatgtgtgctcatggttctgagtagatattaccattgccattgttttatatggaagtccagtgccttgtcaatctttggtccacgagtaagtgttttggatattcatgttagtgtacactgtaatcaacagagctggttttctttaacagttttgttatgaaatcatggaactggcaacatgatagaatttttcaaggaaaaaaaggtaatatattaattgtgcagcgtgccaatctaatatgagttatattaattgtgcctagaacctgtctagacaatctggagtaatatattaattgtgcagagctgtctagaacctgccgaaacaatctggagtaatatattaattgtgcagcgtgccaatctaatatgagttatgttctttttggtgttcctttcaagggaaacgctcggcggcgaagctaaagcagagcttgcgctacacgcgctgcgagcagtttctgtctaaagggcaaggtctgatctcatatttgagctccccgtggcactgctcgcccggccagccaccatcccggtcttgcgctcggcggcgtgcatgggaagagacgacgataacatggacactgttttctaaatggatcagtatttttgcaagttcagcaggggccagactaataaatcagcttgatagcatccttgcagcggtgccttggactttggcggttagaagagttgcggctctggataaactcgaagctgacctatccaagttcgacgacgggcccttcttcctaggccaattcagcttggcggatgtagcgtacattacgattctggaaagggttcagatatactattcccatcttaggaactacgacatcgccgaaggcaggcccaacctccaggaattcatcgaggagatgaacaagattgaagcgtatgcgcagaccaagaacgatcctctgttcttgcttgatcttgccaagaaccatcttaagattgcctgaagatgtgacaaagcagcattagtccgttgatcggtggaagaccactcgtcagtgttgagttgaatgtttgatcaataaaatacggcatgttgttgctgactttggacttgcaaagttcactactgataataacacccatgtttcaacaagagtaatgggtacttttgggtatttggcacctgagtatgcagcatctggcaagctcacagaaaaatccgatgtattttctttcggagtcatgcttcttgagcttattactgggcggcgaccaattgacacaacccaattggcactgcttgttataagcacatatgtacttccatttgcatgttgtataatactaataccaattgcaaaattatagttattttttctacccttgttagttaataagcatatttgtggtcaataggttgtattcttattcttgtaaccgtgttaattaatgttatggacttgtagtcttgtattaccttgtgaatatatctgtccctgcctgccatgtgaacgtgcttagcctggaatttgtgatatgtacatatatccatgtgtttgaaatctgtattgtatgtgatattccgtgttgcatgtgatattatgtacgtctaat

SEQ ID NO: 76963 - DNA, 3260 bp, Zea Mays
cccgcgcgcccaccgccgcgcgcagcaccgcgccgcccacccgcggccaccccagcgccccaaatgccgctccaaccctagcctctcgccatgcctttcgatctcgggcggccatgggaaactgatgccgctcgccggtcgccgtcgcgcgggaggacgtcagctcctcgcacttccccgcatccacctcgtcatggagctctgcgagggcggcgagttcttcgaccgcatcgtcgcgcgggggcactacaccgagcgcgccgccaccaatgtcactcgcaccatcgtcgaggtcgtccatttctgccatcggcacgacgtcatccaccgtgacctcaagccggagaacttccttttcgccaataagaaggagaactcgccgccgcgcagcgcccctctcgatatgccgccctgcttcctcctctcctcttgatccatctgccatcccatccccgctctgccagttgcccctcgcttcctcttcggctcttcatccccctcgatccgtcgcccgtgcttcctcctcactatgtcccgtcccctctccatcttgtcgccctgcctccccgcgtctgcgtctgcgcctgccttcggcgtccagagccatatccgcgttggcctccacctacgcacccgcctctagccataagagctcctcccgtgtctgcctttagagatctgctacctccacatcggtgtctagggctcctccattgcctagatctactagagtgagtgagcctacagagctggcctcatccaggctccagttccaccccacggtcatcctctgttgctctacgtttcatgcttctcacatcctctcctcaatctcatcaactgtgctgaaggaggcagatgaaagtatttccgtctcatcaactgtgctgaagaggaggaaaacacctcacttgttgaagggagcagtggagacccggaggaagatcatttggagtctgcagctactaatcttcagcctggcagtgacacttgcattgcaagggaagagttgccagatcagaaggatctggtgaaactgcaagctgttatccgtggacatctagaggcggcccatgcctcacggccaaagcagatcagatgagattttttggtcttgcgtggttctttttaatctactcacatgatacttcttattcattgccatccaatttaattaattgccctcgattgaattggttcctttgccattttacttaggaggataaaagaagacactaccttggcacatgcctgttgtcacaatggacaaaagaagattaccaagattctggggacccatcgctaccttgtgtcaacagtagactgaccagatcaggtaccattttgaaacctgtgtacaatttcatttctcaataactggccgaacataaatagccaaggcatgggtttatgccaatactcataggttaaatgacactttggtcatatgcatagttgccaccctcaaatgcctatctcatgatagaagtaaatggtggtctaaatcaacaacgactttctataagtaccatgactattattcttgaacaaatgtgtgctcatggttctgagtagatattaccattgccattgttttatatggaagtccagtgccttgtcaatctttggtccacgagtaagtgttttggatattcatgttagtgtacactgtaatcaacagagctggttttctttaacagttttgttatgaaatcatggaactggcaacatgatagaatttttcaaggaaaaaaagggaaacgctcggcggcgaagctaaagcagagcttgcgctacacgcgctgcgagcagtttctgtctaaagggcaaggtctgatctcatatttgagctccccgtggcactgctcgcccggccagccaccatcccggtcttgcgctcggcggcgtgcatggtgtgctcgtccctgacagtggctagcttctgttttcttaattgatggctagcttctgttttcttaattgatgatttgttttttccttttctgatcgtcaatagggaagagacgacgataacatggacactgttttctaaatggatcagtatttttggtatatacacatgcttttactagtagaggagtatttattttcatttgtagcagccaaggaacttgtgcattccttatgaatcatgagaagaccatgaagatgcacacaaatttgcttgacttctgaccagtaataattagcgaaagaaagaaaatccagaaccatgaatcagcttgatagcagtaacaaatttgcttgacttctgacgagtaagaaattggcagcaagttcagcaggggccagactaataaatcagcttgatagcatccttgcagcggtgccttggactttggcggttagaagagttgcggctctggataaactcgaagctgacctatccaagttcgacgacgggcccttcttcctaggccaattcagcttggcggatgtagcgtacattacgattctggaaagggttcagatatactattcccatcttaggaactacgacatcgccgaaggcaggcccaacctccaggaattcatcgaggagatgaacaagattgaagcgtatgcgcagaccaagaacgatcctctgttcttgcttgatcttgccaagaaccatcttaagattgcctgaagatgtgacaaagcagcattagtccgttgatcggtggaagaccactcgtcagtgttgagttgaatgtttgatcaataaaatacggcatgttgttgctgactttggacttgcaaagttcactactgataataacacccatgtttcaacaagagtaatgggtacttttgggtatttggcacctgagtatgcagcatctggcaagctcacagaaaaatccgatgtattttctttcggagtcatgcttcttgagcttattactgggcggcgaccaattgacacaacccaattggcactgcttgttataagcacatatgtacttccatttgcatgttgtataatactaataccaattgcaaaattatagttattttttctacccttgttagttaataagcatatttgtggtcaataggttgtattcttattcttgtaaccgtgttaattaatgttatggacttgtagtcttgtattaccttgtgaatatatctgtccctgcctgccatgtgaacgtgcttagcctggaatttgtgatatgtacatatatccatgtgtttgaaatctgtattgtatgtgatattccgtgttgcatgtgatattatgtacgtctaat

SEQ ID NO: 76964 - DNA, 4361 bp, Zea Mays
cccgcgcgcccaccgccgcgcgcagcaccgcgccgcccacccgcggccaccccagcgccccaaatgccgctccaaccctagcctctcgccatgcctttcgatctcgggcggccatgggaaactgatgccgctcgccggtcgccgtcgcgcgggaggacgtcagctcctcgcacttccccgcatccacctcgtcatggagctctgcgagggcggcgagttcttcgaccgcatcgtcgcgcgggggcactacaccgagcgcgccgccaccaatgtcactcgcaccatcgtcgaggtcgtccatttctgccatcggcacgacgtcatccaccgtgacctcaagccggagaacttccttttcgccaataagaaggagaactcgccgccgcgcagcgcccctctcgatatgccgccctgcttcctcctctcctcttgatccatctgccatcccatccccgctctgccagttgcccctcgcttcctcttcggctcttcatccccctcgatccgtcgcccgtgcttcctcctcactatgtcccgtcccctctccatcttgtcgccctgcctccccgcgtctgcgtctgcgcctgccttcggcgtccagagccatatccgcgttggcctccacctacgcacccgcctctagccataagagctcctcccgtgtctgcctttagagatctgctacctccacatcggtgtctagggctcctccattgcctagatctactagagtgagtgagcctacagagctggcctcatccaggctccagttccaccccacggtcatcctctgttgctctacgtttcatgcttctcacatcctctcctcaatctcatcaactgtgctgaaggaggcagatgaaagtatttccgtctcatcaactgtgctgaagaggaggaaaacacctcacttgttgaagggagcagtggagacccggaggaagatcatttggagtctgcagctactaatcttcagcctggcagtgacacttgcattgcaagggaagagttgccagatcagaaggatctggtgaaactgcaagctgttatccgtggacatctagaggcggcccatgcctcacggccaaagcagatcagatgagattttttggtcttgcgtggttctttttaatctactcacatgatacttcttattcattgccatccaatttaattaattgccctcgattgaattggttcctttgccattttacttaggaggataaaagaagacactaccttggcacatgcctgttgtcacaatggacaaaagaagattagtgttgtgtgagatttttttcattcctttgatctattgcatgctatttgtaccctaatcgacaaaatagatgagactcaattcaggagcaaatcaccagtcctgttcacagtccaattcactatggctaaaatatcaaacttatgctccttgaggtttgttttttccttatcttcctttaatatctgatgactgatggactggtgagttcatgatctgcttcatgcttttccttttatatatggtcactacctcactggttagttcatggtgctttttgtctacttctttgcccaaaaaaaatcccggggcgaatttcagcatgcttttcctgcttccgctgtgcaaattcacaggatgcgtgggaaatgtgttcttgtttcgtcgggtggtgttcttgccattcgttttagctcaacacaaaacaaatgcttcttgttcttcaggtcgccctgtgtttctttctcgccagtttgggccatggattctggtgtgcatttgttcaatatatcttagtatcttatttaacaatcagtacttctctgatgctcaagagatcaatttactcaaagtagcaaactgtatcatagttgtatactttatcaaacgaggaacctgatgcttgtagtataagcctcattttgttccaaacaagacaggcttcggatacaatcacctggaaatcaatcagtaaacttttgctattcagttttttaaataaaaaatttaggccttacgactttcctcgcaatgtgttcacatgtagattaccttattgcattgcctacttttgtccgttgtgtaaaccaatcttttatcatttatcaaatgattttgctcttaacattaacaaattatcgtttggtcatatgcaactaatgacatcacattaccaagattctggggacccatcgctaccttgtgtcaacagtagactgaccagatcaggtaccattttgaaacctgtgtacaatttcatttctcaataactggccgaacataaatagccaaggcatgggtttatgccaatactcataggttaaatgacactttggtcatatgcatagttgccaccctcaaatgcctatctcatgatagaagtaaatggtggtctaaatcaacaacgactttctataagtaccatgactattattcttgaacaaatgtgtgctcatggttctgagtagatattaccattgccattgttttatatggaagtccagtgccttgtcaatctttggtccacgagtaagtgttttggatattcatgttagtgtacactgtaatcaacagagctggttttctttaacagttttgttatgaaatcatggaactggcaacatgatagaatttttcaaggaaaaaaaggtaatatattaattgtgcagcgtgccaatctaatatgagttatattaattgtgcctagaacctgtctagacaatctggagtaatatattaattgtgcagagctgtctagaacctgccgaaacaatctggagtaatatattaattgtgcagcgtgccaatctaatatgagttatgttctttttggtgttcctttcaagggaaacgctcggcggcgaagctaaagcagagcttgcgctacacgcgctgcgagcagtttctgtctaaagggcaaggtctgatctcatgtgagtcatgtctggttggtgtgatacattaatcttaatcaatttttgtgattttggggatttctggtttttggttgacaattcgccagtggtgtacatgacagatttgagctccccgtggcactgctcgcccggccagccaccatcccggtcttgcgctcggcggcgtgcatggtgtgctcgtccctgacagtggctagcttctgttttcttaattgatggctagcttctgttttcttaattgatgatttgttttttccttttctgatcgtcaatagggaagagacgacgataacatggacactgttttctaaatggatcagtatttttgcggtgccttggactttggcggttagaagaggtttataattttatatgatgaaattatgtgcatcttcagttgtttttgcctcactgctctgtaaggacatataaaattggtatttgtactttctaaggttctccttggaatggtagagttttacagggaaccttccatcatcagttgctgacatagctcgaactcgacgtttcttcttcgccagttgcggctctggataaactcgaagctgacctatccaagttcgacgacgggcccttcttcctaggccaattcagcttggcggatgtagcgtacattacgattctggaaagggttcagatatactattcccatcttaggaactacgacatcgccgaaggcaggcccaacctccaggaattcatcgaggagatgaacaagattgaagcgtatgcgcagaccaagaacgatcctctgttcttgcttgatcttgccaagaaccatcttaagattgcctgaagatgtgacaaagcagcattagtccgttgatcggtggaagaccactcgtcagtgttgagttgaatgtttgatcaataaaatacggcatgttgttgctgactttggacttgcaaagttcactactgataataacacccatgtttcaacaagagtaatgggtacttttgggtatttggcacctgagtatgcagcatctggcaagctcacagaaaaatccgatgtattttctttcggagtcatgcttcttgagcttattactgggcggcgaccaattgacacaacccaattggcactgcttgttataagcacatatgtacttccatttgcatgttgtataatactaataccaattgcaaaattatagttattttttctacccttgttagttaataagcatatttgtggtcaataggttgtattcttattcttgtaaccgtgttaattaatgttatggacttgtagtcttgtattaccttgtgaatatatctgtccctgcctgccatgtgaacgtgcttagcctggaatttgtgatatgtacatatatccatgtgtttgaaatctgtattgtatgtgatattccgtgttgcatgtgatattatgtacgtctaat

SEQ ID NO: 76965 - DNA, 3321 bp, Zea Mays
cccgcgcgcccaccgccgcgcgcagcaccgcgccgcccacccgcggccaccccagcgccccaaatgccgctccaaccctagcctctcgccatgcctttcgatctcgggcggccatgggaaactgatgccgctcgccggtcgccgtcgcgcgggaggacgtcagctcctcgcacttccccgcatccacctcgtcatggagctctgcgagggcggcgagttcttcgaccgcatcgtcgcgcgggggcactacaccgagcgcgccgccaccaatgtcactcgcaccatcgtcgaggtcgtccatttctgccatcggcacgacgtcatccaccgtgacctcaagccggagaacttccttttcgccaataagaaggagaactcgccgccgcgcagcgcccctctcgatatgccgccctgcttcctcctctcctcttgatccatctgccatcccatccccgctctgccagttgcccctcgcttcctcttcggctcttcatccccctcgatccgtcgcccgtgcttcctcctcactatgtcccgtcccctctccatcttgtcgccctgcctccccgcgtctgcgtctgcgcctgccttcggcgtccagagccatatccgcgttggcctccacctacgcacccgcctctagccataagagctcctcccgtgtctgcctttagagatctgctacctccacatcggtgtctagggctcctccattgcctagatctactagagtgagtgagcctacagagctggcctcatccaggctccagttccaccccacggtcatcctctgttgctctacgtttcatgcttctcacatcctctcctcaatctcatcaactgtgctgaaggaggcagatgaaagtatttccgtctcatcaactgtgctgaagaggaggaaaacacctcacttgttgaagggagcagtggagacccggaggaagatcatttggagtctgcagctactaatcttcagcctggcagtgacacttgcattgcaagggaagagttgccagatcagaaggatctggtgaaactgcaagctgttatccgtggacatctagaggcggcccatgcctcacggccaaagcagatcagatgagattttttggtcttgcgtggttctttttaatctactcacatgatacttcttattcattgccatccaatttaattaattgccctcgattgaattggttcctttgccattttacttaggaggataaaagaagacactaccttggcacatgcctgttgtcacaatggacaaaagaagattagtgttgtgtgagatttttttcattcctttgatctattgcatgctatttgtaccctaatcgacaaaatagatgagactcaattcaggagcaaatcaccagtcctgttcacagtccaattcactatggctaaaatatcaaacttatgctccttgaggtttgttttttccttatcttcctttaatatctgatgactgatggactggtgagttcatgatctgcttcatgcttttccttttatatatggtcactacctcactggttagttcatggtgctttttgtctacttctttgcccaaaaaaaatcccggggcgaatttcagcatgcttttcctgcttccgctgtgcaaattcacaggatgcgtgggaaatgtgttcttgtttcgtcgggtggtgttcttgccattcgttttagctcaacacaaaacaaatgcttcttgttcttcaggtcgccctgtgtttctttctcgccagtttgggccatggattctggtgtgcatttgttcaatatatcttagtatcttatttaacaatcagtacttctctgatgctcaagagatcaatttactcaaagtagcaaactgtatcatagttgtatactttatcaaacgaggaacctgatgcttgtagtataagcctcattttgttccaaacaagacaggcttcggatacaatcacctggaaatcaatcagtaaacttttgctattcagttttttaaataaaaaatttaggccttacgactttcctcgcaatgtgttcacatgtagattaccttattgcattgcctacttttgtccgttgtgtaaaccaatcttttatcatttatcaaatgattttgctcttaacattaacaaattatcgtttggtcatatgcaactaatgacatcacattaccaagattctggggacccatcgctaccttgtgtcaacagtagactgaccagatcagttttgttatgaaatcatggaactggcaacatgatagaatttttcaaggaaaaaaagggaaacgctcggcggcgaagctaaagcagagcttgcgctacacgcgctgcgagcagtttctgtctaaagggcaaggtctgatctcatttttacagggaaccttccatcatcagttgctgacatagctcgaactcgacgtttcttcttcgccagttgcggctctggataaactcgaagctgacctatccaagttcgacgacgggcccttcttcctaggccaattcagcttggcggatgtagcgtacattacgattctggaaagggttcagatatactattcccatcttaggaactacgacatcgccgaaggcaggcccaacctccaggaattcatcgaggagatgaacaagattgaagcgtatgcgcagaccaagaacgatcctctgttcttgcttgatcttgccaagaaccatcttaagattgcctgaagatgtgacaaagcagcattagtccgttgatcggtggaagaccactcgtcagtgttgagttgaatgtttgatcaataaaatacggcatgttgttgctgactttggacttgcaaagttcactactgataataacacccatgtttcaacaagagtaatgggtacttttgggtatttggcacctgagtatgcagcatctggcaagctcacagaaaaatccgatgtattttctttcggagtcatgcttcttgagcttattactgggcggcgaccaattgacacaacccaattggcactgcttgttataagcacatatgtacttccatttgcatgttgtataatactaataccaattgcaaaattatagttattttttctacccttgttagttaataagcatatttgtggtcaataggttgtattcttattcttgtaaccgtgttaattaatgttatggacttgtagtcttgtattaccttgtgaatatatctgtccctgcctgccatgtgaacgtgcttagcctggaatttgtgatatgtacatatatccatgtgtttgaaatctgtattgtatgtgatattccgtgttgcatgtgatattatgtacgtctaat

SEQ ID NO: 76966 - DNA, 3739 bp, Zea Mays
cccgcgcgcccaccgccgcgcgcagcaccgcgccgcccacccgcggccaccccagcgccccaaatgccgctccaaccctagcctctcgccatgcctttcgatctcgggcggccatgggaaactgatgccgctcgccggtcgccgtcgcgcgggaggacgtcagctcctcgcacttccccgcatccacctcgtcatggagctctgcgagggcggcgagttcttcgaccgcatcgtcgcgcgggggcactacaccgagcgcgccgccaccaatgtcactcgcaccatcgtcgaggtcgtccatttctgccatcggcacgacgtcatccaccgtgacctcaagccggagaacttccttttcgccaataagaaggagaactcgccgccgcgcagcgcccctctcgatatgccgccctgcttcctcctctcctcttgatccatctgccatcccatccccgctctgccagttgcccctcgcttcctcttcggctcttcatccccctcgatccgtcgcccgtgcttcctcctcactatgtcccgtcccctctccatcttgtcgccctgcctccccgcgtctgcgtctgcgcctgccttcggcgtccagagccatatccgcgttggcctccacctacgcacccgcctctagccataagagctcctcccgtgtctgcctttagagatctgctacctccacatcggtgtctagggctcctccattgcctagatctactagagtgagtgagcctacagagctggcctcatccaggctccagttccaccccacggtcatcctctgttgctctacgtttcatgcttctcacatcctctcctcaatctcatcaactgtgctgaaggaggcagatgaaagtatttccgtctcatcaactgtgctgaagaggaggaaaacacctcacttgttgaagggagcagtggagacccggaggaagatcatttggagtctgcagctactaatcttcagcctggcagtgacacttgcattgcaagggaagagttgccagatcagaaggatctggtgaaactgcaagctgttatccgtggacatctagaggcggcccatgcctcacggccaaagcagatcagttaggaggataaaagaagacactaccttggcacatgcctgttgtcacaatggacaaaagaagattagtgttgtgtgagatttttttcattcctttgatctattgcatgctatttgtaccctaatcgacaaaatagatgagactcaattcaggagcaaatcaccagtcctgttcacagtccaattcactatggctaaaatatcaaacttatgctccttgaggtttgttttttccttatcttcctttaatatctgatgactgatggactggtgagttcatgatctgcttcatgcttttccttttatatatggtcactacctcactggttagttcatggtgctttttgtctacttctttgcccaaaaaaaatcccggggcgaatttcagcatgcttttcctgcttccgctgtgcaaattcacaggatgcgtgggaaatgtgttcttgtttcgtcgggtggtgttcttgccattcgttttagctcaacacaaaacaaatgcttcttgttcttcaggtcgccctgtgtttctttctcgccagtttgggccatggattctggtgtgcatttgttcaatatatcttagtatcttatttaacaatcagtacttctctgatgctcaagagatcaatttactcaaagtagcaaactgtatcatagttgtatactttatcaaacgaggaacctgatgcttgtagtataagcctcattttgttccaaacaagacaggcttcggatacaatcacctggaaatcaatcagtaaacttttgctattcagttttttaaataaaaaatttaggccttacgactttcctcgcaatgtgttcacatgtagattaccttattgcattgcctacttttgtccgttgtgtaaaccaatcttttatcatttatcaaatgattttgctcttaacattaacaaattatcgtttggtcatatgcaactaatgacatcacattaccaagattctggggacccatcgctaccttgtgtcaacagtagactgaccagatcagttttgttatgaaatcatggaactggcaacatgatagaatttttcaaggaaaaaaagggaaacgctcggcggcgaagctaaagcagagcttgcgctacacgcgctgcgagcagtttctgtctaaagggcaaggtctgatctcatatttgagctccccgtggcactgctcgcccggccagccaccatcccggtcttgcgctcggcggcgtgcatggtgtgctcgtccctgacagtggctagcttctgttttcttaattgatggctagcttctgttttcttaattgatgatttgttttttccttttctgatcgtcaatagggaagagacgacgataacatggacactgttttctaaatggatcagtatttttggtatatacacatgcttttactagtagaggagtatttattttcatttgtagcagccaaggaacttgtgcattccttatgaatcatgagaagaccatgaagatgcacacaaatttgcttgacttctgaccagtaataattagcgaaagaaagaaaatccagaaccatgaatcagcttgatagcagtaacaaatttgcttgacttctgacgagtaagaaattggcagcaagttcagcaggggccagactaataaatcagcttgatagcatccttgcagcggtgccttggactttggcggttagaagagagttttacagggaaccttccatcatcagttgctgacatagctcgaactcgacgtttcttcttcgccagttgcggctctggataaactcgaagctgacctatccaagttcgacgacgggcccttcttcctaggccaattcagcttggcggatgtagcgtacattacgattctggaaagggttcagatatactattcccatcttaggaactacgacatcgccgaaggcaggcccaacctccaggaattcatcgaggagatgaacaagattgaagcgtatgcgcagaccaagaacgatcctctgttcttgcttgatcttgccaagaaccatcttaagattgcctgaagatgtgacaaagcagcattagtccgttgatcggtggaagaccactcgtcagtgttgagttgaatgtttgatcaataaaatacggcatgttgttgctgactttggacttgcaaagttcactactgataataacacccatgtttcaacaagagtaatgggtacttttgggtatttggcacctgagtatgcagcatctggcaagctcacagaaaaatccgatgtattttctttcggagtcatgcttcttgagcttattactgggcggcgaccaattgacacaacccaattggcactgcttgttataagcacatatgtacttccatttgcatgttgtataatactaataccaattgcaaaattatagttattttttctacccttgttagttaataagcatatttgtggtcaataggttgtattcttattcttgtaaccgtgttaattaatgttatggacttgtagtcttgtattaccttgtgaatatatctgtccctgcctgccatgtgaacgtgcttagcctggaatttgtgatatgtacatatatccatgtgtttgaaatctgtattgtatgtgatattccgtgttgcatgtgatattatgtacgtctaat

SEQ ID NO: 76967 - DNA, 3199 bp, Zea Mays
cccgcgcgcccaccgccgcgcgcagcaccgcgccgcccacccgcggccaccccagcgccccaaatgccgctccaaccctagcctctcgccatgcctttcgatctcgggcggccatgggaaactgatgccgctcgccggtcgccgtcgcgcgggaggacgtcagctcctcgcacttccccgcatccacctcgtcatggagctctgcgagggcggcgagttcttcgaccgcatcgtcgcgcgggggcactacaccgagcgcgccgccaccaatgtcactcgcaccatcgtcgaggtcgtccatttctgccatcggcacgacgtcatccaccgtgacctcaagccggagaacttccttttcgccaataagaaggagaactcgccgccgcgcagcgcccctctcgatatgccgccctgcttcctcctctcctcttgatccatctgccatcccatccccgctctgccagttgcccctcgcttcctcttcggctcttcatccccctcgatccgtcgcccgtgcttcctcctcactatgtcccgtcccctctccatcttgtcgccctgcctccccgcgtctgcgtctgcgcctgccttcggcgtccagagccatatccgcgttggcctccacctacgcacccgcctctagccataagagctcctcccgtgtctgcctttagagatctgctacctccacatcggtgtctagggctcctccattgcctagatctactagagtgagtgagcctacagagctggcctcatccaggctccagttccaccccacggtcatcctctgttgctctacgtttcatgcttctcacatcctctcctcaatctcatcaactgtgctgaaggaggcagatgaaagtatttccgtctcatcaactgtgctgaagaggaggaaaacacctcacttgttgaagggagcagtggagacccggaggaagatcatttggagtctgcagctactaatcttcagcctggcagtgacacttgcattgcaagggaagagttgccagatcagaaggatctggtgaaactgcaagctgttatccgtggacatctagaggcggcccatgcctcacggccaaagcagatcagttaggaggataaaagaagacactaccttggcacatgcctgttgtcacaatggacaaaagaagattagtgttgtgtgagatttttttcattcctttgatctattgcatgctatttgtaccctaatcgacaaaatagatgagactcaattcaggagcaaatcaccagtcctgttcacagtccaattcactatggctaaaatatcaaacttatgctccttgaggtttgttttttccttatcttcctttaatatctgatgactgatggactggtgagttcatgatctgcttcatgcttttccttttatatatggtcactacctcactggttagttcatggtgctttttgtctacttctttgcccaaaaaaaatcccggggcgaatttcagcatgcttttcctgcttccgctgtgcaaattcacaggatgcgtgggaaatgtgttcttgtttcgtcgggtggtgttcttgccattcgttttagctcaacacaaaacaaatgcttcttgttcttcaggtcgccctgtgtttctttctcgccagtttgggccatggattctggtgtgcatttgttcaatatatcttagtatcttatttaacaatcagtacttctctgatgctcaagagatcaatttactcaaagtagcaaactgtatcatagttgtatactttatcaaacgaggaacctgatgcttgtagtataagcctcattttgttccaaacaagacaggcttcggatacaatcacctggaaatcaatcagtaaacttttgctattcagttttttaaataaaaaatttaggccttacgactttcctcgcaatgtgttcacatgtagattaccttattgcattgcctacttttgtccgttgtgtaaaccaatcttttatcatttatcaaatgattttgctcttaacattaacaaattatcgtttggtcatatgcaactaatgacatcacattaccaagattctggggacccatcgctaccttgtgtcaacagtagactgaccagatcagggaaacgctcggcggcgaagctaaagcagagcttgcgctacacgcgctgcgagcagtttctgtctaaagggcaaggtctgatctcatatttgagctccccgtggcactgctcgcccggccagccaccatcccggtcttgcgctcggcggcgtgcatgggaagagacgacgataacatggacactgttttctaaatggatcagtatttttgttgcggctctggataaactcgaagctgacctatccaagttcgacgacgggcccttcttcctaggccaattcagcttggcggatgtagcgtacattacgattctggaaagggttcagatatactattcccatcttaggaactacgacatcgccgaaggcaggcccaacctccaggaattcatcgaggagatgaacaagattgaagcgtatgcgcagaccaagaacgatcctctgttcttgcttgatcttgccaagaaccatcttaagattgcctgaagatgtgacaaagcagcattagtccgttgatcggtggaagaccactcgtcagtgttgagttgaatgtttgatcaataaaatacggttgctgactttggacttgcaaagttcactactgataataacacccatgtttcaacaagagtaatgggtacttttgggtatttggcacctgagtatgcagcatctggcaagctcacagaaaaatccgatgtattttctttcggagtcatgcttcttgagcttattactgggcggcgaccaattgacacaacccaattggcactgcttgttataagcacatatgtacttccatttgcatgttgtataatactaataccaattgcaaaattatagttattttttctacccttgttagttaataagcatatttgtggtcaataggttgtattcttattcttgtaaccgtgttaattaatgttatggacttgtagtcttgtattaccttgtgaatatatctgtccctgcctgccatgtgaacgtgcttagcctggaatttgtgatatgtacatatatccatgtgtttgaaatctgtattgtatgtgatattccgtgttgcatgtgatattatgtacgtctaat

SEQ ID NO: 76968 - DNA, 3870 bp, Zea Mays
cccgcgcgcccaccgccgcgcgcagcaccgcgccgcccacccgcggccaccccagcgccccaaatgccgctccaaccctagcctctcgccatgcctttcgatctcgggcggccatgggaaactgatgccgctcgccggtcgccgtcgcgcgggaggacgtcagctcctcgcacttccccgcatccacctcgtcatggagctctgcgagggcggcgagttcttcgaccgcatcgtcgcgcgggggcactacaccgagcgcgccgccaccaatgtcactcgcaccatcgtcgaggtcgtccatttctgccatcggcacgacgtcatccaccgtgacctcaagccggagaacttccttttcgccaataagaaggagaactcgccgccgcgcagcgcccctctcgatatgccgccctgcttcctcctctcctcttgatccatctgccatcccatccccgctctgccagttgcccctcgcttcctcttcggctcttcatccccctcgatccgtcgcccgtgcttcctcctcactatgtcccgtcccctctccatcttgtcgccctgcctccccgcgtctgcgtctgcgcctgccttcggcgtccagagccatatccgcgttggcctccacctacgcacccgcctctagccataagagctcctcccgtgtctgcctttagagatctgctacctccacatcggtgtctagggctcctccattgcctagatctactagagtgagtgagcctacagagctggcctcatccaggctccagttccaccccacggtcatcctctgttgctctacgtttcatgcttctcacatcctctcctcaatctcatcaactgtgctgaaggaggcagatgaaagtatttccgtctcatcaactgtgctgaagaggaggaaaacacctcacttgttgaagggagcagtggagacccggaggaagatcatttggagtctgcagctactaatcttcagcctggcagtgacacttgcattgcaagggaagagttgccagatcagaaggatctggtgaaactgcaagctgttatccgtggacatctagaggcggcccatgcctcacggccaaagcagatcagttaggaggataaaagaagacactaccttggcacatgcctgttgtcacaatggacaaaagaagattagtgttgtgtgagatttttttcattcctttgatctattgcatgctatttgtaccctaatcgacaaaatagatgagactcaattcaggagcaaatcaccagtcctgttcacagtccaattcactatggctaaaatatcaaacttatgctccttgaggtttgttttttccttatcttcctttaatatctgatgactgatggactggtgagttcatgatctgcttcatgcttttccttttatatatggtcactacctcactggttagttcatggtgctttttgtctacttctttgcccaaaaaaaatcccggggcgaatttcagcatgcttttcctgcttccgctgtgcaaattcacaggatgcgtgggaaatgtgttcttgtttcgtcgggtggtgttcttgccattcgttttagctcaacacaaaacaaatgcttcttgttcttcaggtcgccctgtgtttctttctcgccagtttgggccatggattctggtgtgcatttgttcaatatatcttagtatcttatttaacaatcagtacttctctgatgctcaagagatcaatttactcaaagtagcaaactgtatcatagttgtatactttatcaaacgaggaacctgatgcttgtagtataagcctcattttgttccaaacaagacaggcttcggatacaatcacctggaaatcaatcagtaaacttttgctattcagttttttaaataaaaaatttaggccttacgactttcctcgcaatgtgttcacatgtagattaccttattgcattgcctacttttgtccgttgtgtaaaccaatcttttatcatttatcaaatgattttgctcttaacattaacaaattatcgtttggtcatatgcaactaatgacatcacattaccaagattctggggacccatcgctaccttgtgtcaacagtagactgaccagatcagttttgttatgaaatcatggaactggcaacatgatagaatttttcaaggaaaaaaagggaaacgctcggcggcgaagctaaagcagagcttgcgctacacgcgctgcgagcagtttctgtctaaagggcaaggtctgatctcattggtgtacatgacagatttgagctccccgtggcactgctcgcccggccagccaccatcccggtcttgcgctcggcggcgtgcatggtgtgctcgtccctgacagtggctagcttctgttttcttaattgatggctagcttctgttttcttaattgatgatttgttttttccttttctgatcgtcaatagggaagagacgacgataacatggacactgttttctaaatggatcagtatttttggtatatacacatgcttttactagtagaggagtatttattttcatttgtagcagccaaggaacttgtgcattccttatgaatcatgagaagaccatgaagatgcacacaaatttgcttgacttctgaccagtaataattagcgaaagaaagaaaatccagaaccatgaatcagcttgatagcagtaacaaatttgcttgacttctgacgagtaagaaattggcagcaagttcagcaggggccagactaataaatcagcttgatagcatccttgcagcggtgccttggactttggcggttagaagaggtttataattttatatgatgaaattatgtgcatcttcagttgtttttgcctcactgctctgtaaggacatataaaattggtatttgtactttctaaggttctccttggaatggtagagttttacagggaaccttccatcatcagttgctgacatagctcgaactcgacgtttcttcttcgccagttgcggctctggataaactcgaagctgacctatccaagttcgacgacgggcccttcttcctaggccaattcagcttggcggatgtagcgtacattacgattctggaaagggttcagatatactattcccatcttaggaactacgacatcgccgaaggcaggcccaacctccaggaattcatcgaggagatgaacaagattgaagcgtatgcgcagaccaagaacgatcctctgttcttgcttgatcttgccaagaaccatcttaagattgcctgaagatgtgacaaagcagcattagtccgttgatcggtggaagaccactcgtcagtgttgagttgaatgtttgatcaataaaatacggcatgttgttgctgactttggacttgcaaagttcactactgataataacacccatgtttcaacaagagtaatgggtacttttgggtatttggcacctgagtatgcagcatctggcaagctcacagaaaaatccgatgtattttctttcggagtcatgcttcttgagcttattactgggcggcgaccaattgacacaacccaattggcactgcttgttataagcacatatgtacttccatttgcatgttgtataatactaataccaattgcaaaattatagttattttttctacccttgttagttaataagcatatttgtggtcaataggttgtattcttattcttgtaaccgtgttaattaatgttatggacttgtagtcttgtattaccttgtgaatatatctgtccctgcctgccatgtgaacgtgcttagcctggaatttgtgatatgtacatatatccatgtgtttgaaatctgtattgtatgtgatattccgtgttgcatgtgatattatgtacgtctaat

SEQ ID NO: 76969 - DNA, 3447 bp, Zea Mays
cccgcgcgcccaccgccgcgcgcagcaccgcgccgcccacccgcggccaccccagcgccccaaatgccgctccaaccctagcctctcgccatgcctttcgatctcgggcggccatgggaaactgatgccgctcgccggtcgccgtcgcgcgggaggacgtcagctcctcgcacttccccgcatccacctcgtcatggagctctgcgagggcggcgagttcttcgaccgcatcgtcgcgcgggggcactacaccgagcgcgccgccaccaatgtcactcgcaccatcgtcgaggtcgtccatttctgccatcggcacgacgtcatccaccgtgacctcaagccggagaacttccttttcgccaataagaaggagaactcgccgccgcgcagcgcccctctcgatatgccgccctgcttcctcctctcctcttgatccatctgccatcccatccccgctctgccagttgcccctcgcttcctcttcggctcttcatccccctcgatccgtcgcccgtgcttcctcctcactatgtcccgtcccctctccatcttgtcgccctgcctccccgcgtctgcgtctgcgcctgccttcggcgtccagagccatatccgcgttggcctccacctacgcacccgcctctagccataagagctcctcccgtgtctgcctttagagatctgctacctccacatcggtgtctagggctcctccattgcctagatctactagagaggcagatgaaagtatttccgtctcatcaactgtgctgaagaggaggaaaacacctcacttgttgaagggagcagtggagacccggaggaagatcatttggagtctgcagctactaatcttcagcctggcagtgacacttgcattgcaagggaagagttgccagatcagaaggatctggtgaaactgcaagctgttatccgtggacatctagaggcggcccatgcctcacggccaaagcagatcagttaggaggataaaagaagacactaccttggcacatgcctgttgtcacaatggacaaaagaagattagtgttgtgtgagatttttttcattcctttgatctattgcatgctatttgtaccctaatcgacaaaatagatgagactcaattcaggagcaaatcaccagtcctgttcacagtccaattcactatggctaaaatatcaaacttatgctccttgaggtttgttttttccttatcttcctttaatatctgatgactgatggactggtgagttcatgatctgcttcatgcttttccttttatatatggtcactacctcactggttagttcatggtgctttttgtctacttctttgcccaaaaaaaatcccggggcgaatttcagcatgcttttcctgcttccgctgtgcaaattcacaggatgcgtgggaaatgtgttcttgtttcgtcgggtggtgttcttgccattcgttttagctcaacacaaaacaaatgcttcttgttcttcaggtcgccctgtgtttctttctcgccagtttgggccatggattctggtgtgcatttgttcaatatatcttagtatcttatttaacaatcagtacttctctgatgctcaagagatcaatttactcaaagtagcaaactgtatcatagttgtatactttatcaaacgaggaacctgatgcttgtagtataagcctcattttgttccaaacaagacaggcttcggatacaatcacctggaaatcaatcagtaaacttttgctattcagttttttaaataaaaaatttaggccttacgactttcctcgcaatgtgttcacatgtagattaccttattgcattgcctacttttgtccgttgtgtaaaccaatcttttatcatttatcaaatgattttgctcttaacattaacaaattatcgtttggtcatatgcaactaatgacatcacattaccaagattctggggacccatcgctaccttgtgtcaacagtagactgaccagatcagttttgttatgaaatcatggaactggcaacatgatagaatttttcaaggaaaaaaagggaaacgctcggcggcgaagctaaagcagagcttgcgctacacgcgctgcgagcagtttctgtctaaagggcaaggtctgatctcatatttgagctccccgtggcactgctcgcccggccagccaccatcccggtcttgcgctcggcggcgtgcatgggaagagacgacgataacatggacactgttttctaaatggatcagtatttttggtatatacacatgcttttactagtagaggagtatttattttcatttgtagcagccaaggaacttgtgcattccttatgaatcatgagaagaccatgaagatgcacacaaatttgcttgacttctgaccagtaataattagcgaaagaaagaaaatccagaaccatgaatcagcttgatagcagtaacaaatttgcttgacttctgacgagtaagaaattggcagcaagttcagcaggggccagactaataaatcagcttgatagcatccttgcagcggtgccttggactttggcggttagaagagttgcggctctggataaactcgaagctgacctatccaagttcgacgacgggcccttcttcctaggccaattcagcttggcggatgtagcgtacattacgattctggaaagggttcagatatactattcccatcttaggaactacgacatcgccgaaggcaggcccaacctccaggaattcatcgaggagatgaacaagattgaagcgtatgcgcagaccaagaacgatcctctgttcttgcttgatcttgccaagaaccatcttaagattgcctgaagatgtgacaaagcagcattagtccgttgatcggtggaagaccactcgtcagtgttgagttgaatgtttgatcaataaaatacggcatgttgttgctgactttggacttgcaaagttcactactgataataacacccatgtttcaacaagagtaatgggtacttttgggtatttggcacctgagtatgcagcatctggcaagctcacagaaaaatccgatgtattttctttcggagtcatgcttcttgagcttattactgggcggcgaccaattgacacaacccaattggcactgcttgttataagcacatatgtacttccatttgcatgttgtataatactaataccaattgcaaaattatagttattttttctacccttgttagttaataagcatatttgtggtcaataggttgtattcttattcttgtaaccgtgttaattaatgttatggacttgtagtcttgtattaccttgtgaatatatctgtccctgcctgccatgtgaacgtgcttagcctggaatttgtgatatgtacatatatccatgtgtttgaaatctgtattgtatgtgatattccgtgttgcatgtgatattatgtacgtctaat

SEQ ID NO: 76970 - DNA, 3563 bp, Zea Mays
cccgcgcgcccaccgccgcgcgcagcaccgcgccgcccacccgcggccaccccagcgccccaaatgccgctccaaccctagcctctcgccatgcctttcgatctcgggcggccatgggaaactgatgccgctcgccggtcgccgtcgcgcgggaggacgtcagctcctcgcacttccccgcatccacctcgtcatggagctctgcgagggcggcgagttcttcgaccgcatcgtcgcgcgggggcactacaccgagcgcgccgccaccaatgtcactcgcaccatcgtcgaggtcgtccatttctgccatcggcacgacgtcatccaccgtgacctcaagccggagaacttccttttcgccaataagaaggagaactcgccgccgcgcagcgcccctctcgatatgccgccctgcttcctcctctcctcttgatccatctgccatcccatccccgctctgccagttgcccctcgcttcctcttcggctcttcatccccctcgatccgtcgcccgtgcttcctcctcactatgtcccgtcccctctccatcttgtcgccctgcctccccgcgtctgcgtctgcgcctgccttcggcgtccagagccatatccgcgttggcctccacctacgcacccgcctctagccataagagctcctcccgtgtctgcctttagagatctgctacctccacatcggtgtctagggctcctccattgcctagatctactagagaggcagatgaaagtatttccgtctcatcaactgtgctgaagaggaggaaaacacctcacttgttgaagggagcagtggagacccggaggaagatcatttggagtctgcagctactaatcttcagcctggcagtgacacttgcattgcaagggaagagttgccagatcagaaggatctggtgaaactgcaagctgttatccgtggacatctagaggcggcccatgcctcacggccaaagcagatcagttaggaggataaaagaagacactaccttggcacatgcctgttgtcacaatggacaaaagaagattagtgttgtgtgagatttttttcattcctttgatctattgcatgctatttgtaccctaatcgacaaaatagatgagactcaattcaggagcaaatcaccagtcctgttcacagtccaattcactatggctaaaatatcaaacttatgctccttgaggtttgttttttccttatcttcctttaatatctgatgactgatggactggtgagttcatgatctgcttcatgcttttccttttatatatggtcactacctcactggttagttcatggtgctttttgtctacttctttgcccaaaaaaaatcccggggcgaatttcagcatgcttttcctgcttccgctgtgcaaattcacaggatgcgtgggaaatgtgttcttgtttcgtcgggtggtgttcttgccattcgttttagctcaacacaaaacaaatgcttcttgttcttcaggtcgccctgtgtttctttctcgccagtttgggccatggattctggtgtgcatttgttcaatatatcttagtatcttatttaacaatcagtacttctctgatgctcaagagatcaatttactcaaagtagcaaactgtatcatagttgtatactttatcaaacgaggaacctgatgcttgtagtataagcctcattttgttccaaacaagacaggcttcggatacaatcacctggaaatcaatcagtaaacttttgctattcagttttttaaataaaaaatttaggccttacgactttcctcgcaatgtgttcacatgtagattaccttattgcattgcctacttttgtccgttgtgtaaaccaatcttttatcatttatcaaatgattttgctcttaacattaacaaattatcgtttggtcatatgcaactaatgacatcacattaccaagattctggggacccatcgctaccttgtgtcaacagtagactgaccagatcagggaaacgctcggcggcgaagctaaagcagagcttgcgctacacgcgctgcgagcagtttctgtctaaagggcaaggtctgatctcatatttgagctccccgtggcactgctcgcccggccagccaccatcccggtcttgcgctcggcggcgtgcatggtgtgctcgtccctgacagtggctagcttctgttttcttaattgatggctagcttctgttttcttaattgatgatttgttttttccttttctgatcgtcaatagggaagagacgacgataacatggacactgttttctaaatggatcagtatttttggtatatacacatgcttttactagtagaggagtatttattttcatttgtagcagccaaggaacttgtgcattccttatgaatcatgagaagaccatgaagatgcacacaaatttgcttgacttctgaccagtaataattagcgaaagaaagaaaatccagaaccatgaatcagcttgatagcagtaacaaatttgcttgacttctgacgagtaagaaattggcagcaagttcagcaggggccagactaataaatcagcttgatagcatccttgcagcggtgccttggactttggcggttagaagagagttttacagggaaccttccatcatcagttgctgacatagctcgaactcgacgtttcttcttcgccagttgcggctctggataaactcgaagctgacctatccaagttcgacgacgggcccttcttcctaggccaattcagcttggcggatgtagcgtacattacgattctggaaagggttcagatatactattcccatcttaggaactacgacatcgccgaaggcaggcccaacctccaggaattcatcgaggagatgaacaagattgaagcgtatgcgcagaccaagaacgatcctctgttcttgcttgatcttgccaagaaccatcttaagattgcctgaagatgtgacaaagcagcattagtccgttgatcggtggaagaccactcgtcagtgttgagttgaatgtttgatcaataaaatacggcatgttgttgctgactttggacttgcaaagttcactactgataataacacccatgtttcaacaagagtaatgggtacttttgggtatttggcacctgagtatgcagcatctggcaagctcacagaaaaatccgatgtattttctttcggagtcatgcttcttgagcttattactgggcggcgaccaattgacacaacccaattggcactgcttgttataagcacatatgtacttccatttgcatgttgtataatactaataccaattgcaaaattatagttattttttctacccttgttagttaataagcatatttgtggtcaataggttgtattcttattcttgtaaccgtgttaattaatgttatggacttgtagtcttgtattaccttgtgaatatatctgtccctgcctgccatgtgaacgtgcttagcctggaatttgtgatatgtacatatatccatgtgtttgaaatctgtattgtatgtgatattccgtgttgcatgtgatattatgtacgtctaat

SEQ ID NO: 76971 - DNA, 3019 bp, Zea Mays
cccgcgcgcccaccgccgcgcgcagcaccgcgccgcccacccgcggccaccccagcgccccaaatgccgctccaaccctagcctctcgccatgcctttcgatctcgggcggccatgggaaactgatgccgctcgccggtcgccgtcgcgcgggaggacgtcagctcctcgcacttccccgcatccacctcgtcatggagctctgcgagggcggcgagttcttcgaccgcatcgtcgcgcgggggcactacaccgagcgcgccgccaccaatgtcactcgcaccatcgtcgaggtcgtccatttctgccatcggcacgacgtcatccaccgtgacctcaagccggagaacttccttttcgccaataagaaggagaactcgccgccgcgcagcgcccctctcgatatgccgccctgcttcctcctctcctcttgatccatctgccatcccatccccgctctgccagttgcccctcgcttcctcttcggctcttcatccccctcgatccgtcgcccgtgcttcctcctcactatgtcccgtcccctctccatcttgtcgccctgcctccccgcgtctgcgtctgcgcctgccttcggcgtccagagccatatccgcgttggcctccacctacgcacccgcctctagccataagagctcctcccgtgtctgcctttagagatctgctacctccacatcggtgtctagggctcctccattgcctagatctactagagaggcagatgaaagtatttccgtctcatcaactgtgctgaagaggaggaaaacacctcacttgttgaagggagcagtggagacccggaggaagatcatttggagtctgcagctactaatcttcagcctggcagtgacacttgcattgcaagggaagagttgccagatcagaaggatctggtgaaactgcaagctgttatccgtggacatctagaggcggcccatgcctcacggccaaagcagatcagttaggaggataaaagaagacactaccttggcacatgcctgttgtcacaatggacaaaagaagattagtgttgtgtgagatttttttcattcctttgatctattgcatgctatttgtaccctaatcgacaaaatagatgagactcaattcaggagcaaatcaccagtcctgttcacagtccaattcactatggctaaaatatcaaacttatgctccttgaggtttgttttttccttatcttcctttaatatctgatgactgatggactggtgagttcatgatctgcttcatgcttttccttttatatatggtcactacctcactggttagttcatggtgctttttgtctacttctttgcccaaaaaaaatcccggggcgaatttcagcatgcttttcctgcttccgctgtgcaaattcacaggatgcgtgggaaatgtgttcttgtttcgtcgggtggtgttcttgccattcgttttagctcaacacaaaacaaatgcttcttgttcttcaggtcgccctgtgtttctttctcgccagtttgggccatggattctggtgtgcatttgttcaatatatcttagtatcttatttaacaatcagtacttctctgatgctcaagagatcaatttactcaaagtagcaaactgtatcatagttgtatactttatcaaacgaggaacctgatgcttgtagtataagcctcattttgttccaaacaagacaggcttcggatacaatcacctggaaatcaatcagtaaacttttgctattcagttttttaaataaaaaatttaggccttacgactttcctcgcaatgtgttcacatgtagattaccttattgcattgcctacttttgtccgttgtgtaaaccaatcttttatcatttatcaaatgattttgctcttaacattaacaaattatcgtttggtcatatgcaactaatgacatcacattaccaagattctggggacccatcgctaccttgtgtcaacagtagactgaccagatcagttttgttatgaaatcatggaactggcaacatgatagaatttttcaaggaaaaaaagggaaacgctcggcggcgaagctaaagcagagcttgcgctacacgcgctgcgagcagtttctgtctaaagggcaaggtctgatctcatttgcggctctggataaactcgaagctgacctatccaagttcgacgacgggcccttcttcctaggccaattcagcttggcggatgtagcgtacattacgattctggaaagggttcagatatactattcccatcttaggaactacgacatcgccgaaggcaggcccaacctccaggaattcatcgaggagatgaacaagattgaagcgtatgcgcagaccaagaacgatcctctgttcttgcttgatcttgccaagaaccatcttaagattgcctgaagatgtgacaaagcagcattagtccgttgatcggtggaagaccactcgtcagtgttgagttgaatgtttgatcaataaaatacggcatgttgttgctgactttggacttgcaaagttcactactgataataacacccatgtttcaacaagagtaatgggtacttttgggtatttggcacctgagtatgcagcatctggcaagctcacagaaaaatccgatgtattttctttcggagtcatgcttcttgagcttattactgggcggcgaccaattgacacaacccaattggcactgcttgttataagcacatatgtacttccatttgcatgttgtataatactaataccaattgcaaaattatagttattttttctacccttgttagttaataagcatatttgtggtcaataggttgtattcttattcttgtaaccgtgttaattaatgttatggacttgtagtcttgtattaccttgtgaatatatctgtccctgcctgccatgtgaacgtgcttagcctggaatttgtgatatgtacatatatccatgtgtttgaaatctgtattgtatgtgatattccgtgttgcatgtgatattatgtacgtctaat

SEQ ID NO: 76972 - DNA, 3746 bp, Zea Mays
cccgcgcgcccaccgccgcgcgcagcaccgcgccgcccacccgcggccaccccagcgccccaaatgccgctccaaccctagcctctcgccatgcctttcgatctcgggcggccatgggaaactgatgccgctcgccggtcgccgtcgcgcgggaggacgtcagctcctcgcacttccccgcatccacctcgtcatggagctctgcgagggcggcgagttcttcgaccgcatcgtcgcgcgggggcactacaccgagcgcgccgccaccaatgtcactcgcaccatcgtcgaggtcgtccatttctgccatcggcacgacgtcatccaccgtgacctcaagccggagaacttccttttcgccaataagaaggagaactcgccgccgcgcagcgcccctctcgatatgccgccctgcttcctcctctcctcttgatccatctgccatcccatccccgctctgccagttgcccctcgcttcctcttcggctcttcatccccctcgatccgtcgcccgtgcttcctcctcactatgtcccgtcccctctccatcttgtcgccctgcctccccgcgtctgcgtctgcgcctgccttcggcgtccagagccatatccgcgttggcctccacctacgcacccgcctctagccataagagctcctcccgtgtctgcctttagagatctgctacctccacatcggtgtctagggctcctccattgcctagatctactagagtgagtgagcctacagagctggcctcatccaggctccagttccaccccacggtcatcctctgttgctctacgtttcatgcttctcacatcctctcctcaatctcatcaactgtgctgaaggaggcagatgaaagtatttccgtctcatcaactgtgctgaagaggaggaaaacacctcacttgttgaagggagcagtggagacccggaggaagatcatttggagtctgcagctactaatcttcagcctggcagtgacacttgcattgcaagggaagagttgccagatcagaaggatctggtgaaactgcaagctgttatccgtggacatctagaggcggcccatgcctcacggccaaagcagatcagatgagattttttggtcttgcgtggttctttttaatctactcacatgatacttcttattcattgccatccaatttaattaattgccctcgattgaattggttcctttgccattttacttaggaggataaaagaagacactaccttggcacatgcctgttgtcacaatggacaaaagaagattagtgttgtgtgagatttttttcattcctttgatctattgcatgctatttgtaccctaatcgacaaaatagatgagactcaattcaggagcaaatcaccagtcctgttcacagtccaattcactatggctaaaatatcaaacttatgctccttgaggtttgttttttccttatcttcctttaatatctgatgactgatggactggtgagttcatgatctgcttcatgcttttccttttatatatggtcactacctcactggttagttcatggtgctttttgtctacttctttgcccaaaaaaaatcccggggcgaatttcagcatgcttttcctgcttccgctgtgcaaattcacaggatgcgtgggaaatgtgttcttgtttcgtcgggtggtgttcttgccattcgttttagctcaacacaaaacaaatgcttcttgttcttcaggtcgccctgtgtttctttctcgccagtttgggccatggattctggtgtgcatttgttcaatatatcttagtatcttatttaacaatcagtacttctctgatgctcaagagatcaatttactcaaagtagcaaactgtatcatagttgtatactttatcaaacgaggaacctgatgcttgtagtataagcctcattttgttccaaacaagacaggcttcggatacaatcacctggaaatcaatcagtaaacttttgctattcagttttttaaataaaaaatttaggccttacgactttcctcgcaatgtgttcacatgtagattaccttattgcattgcctacttttgtccgttgtgtaaaccaatcttttatcatttatcaaatgattttgctcttaacattaacaaattatcgtttggtcatatgcaactaatgacatcacattaccaagattctggggacccatcgctaccttgtgtcaacagtagactgaccagatcagggaaacgctcggcggcgaagctaaagcagagcttgcgctacacgcgctgcgagcagtttctgtctaaagggcaaggtctgatctcattggtgtacatgacagatttgagctccccgtggcactgctcgcccggccagccaccatcccggtcttgcgctcggcggcgtgcatggtgtgctcgtccctgacagtggctagcttctgttttcttaattgatggctagcttctgttttcttaattgatgatttgttttttccttttctgatcgtcaatagggaagagacgacgataacatggacactgttttctaaatggatcagtatttttggtatatacacatgcttttactagtagaggagtatttattttcatttgtagcagccaaggaacttgtgcattccttatgaatcatgagaagaccatgaagatgcacacaaatttgcttgacttctgaccagtaataattagcgaaagaaagaaaatccagaaccatgaatcagcttgatagcagtaacaaatttgcttgacttctgacgagtaagaaattggcagcaagttcagcaggggccagactaataaatcagcttgatagcatccttgcagcggtgccttggactttggcggttagaagagttgcggctctggataaactcgaagctgacctatccaagttcgacgacgggcccttcttcctaggccaattcagcttggcggatgtagcgtacattacgattctggaaagggttcagatatactattcccatcttaggaactacgacatcgccgaaggcaggcccaacctccaggaattcatcgaggagatgaacaagattgaagcgtatgcgcagaccaagaacgatcctctgttcttgcttgatcttgccaagaaccatcttaagattgcctgaagatgtgacaaagcagcattagtccgttgatcggtggaagaccactcgtcagtgttgagttgaatgtttgatcaataaaatacggcatgttgttgctgactttggacttgcaaagttcactactgataataacacccatgtttcaacaagagtaatgggtacttttgggtatttggcacctgagtatgcagcatctggcaagctcacagaaaaatccgatgtattttctttcggagtcatgcttcttgagcttattactgggcggcgaccaattgacacaacccaattggcactgcttgttataagcacatatgtacttccatttgcatgttgtataatactaataccaattgcaaaattatagttattttttctacccttgttagttaataagcatatttgtggtcaataggttgtattcttattcttgtaaccgtgttaattaatgttatggacttgtagtcttgtattaccttgtgaatatatctgtccctgcctgccatgtgaacgtgcttagcctggaatttgtgatatgtacatatatccatgtgtttgaaatctgtattgtatgtgatattccgtgttgcatgtgatattatgtacgtctaat

SEQ ID NO: 76973 - DNA, 3500 bp, Zea Mays
cccgcgcgcccaccgccgcgcgcagcaccgcgccgcccacccgcggccaccccagcgccccaaatgccgctccaaccctagcctctcgccatgcctttcgatctcgggcggccatgggaaactgatgccgctcgccggtcgccgtcgcgcgggaggacgtcagctcctcgcacttccccgcatccacctcgtcatggagctctgcgagggcggcgagttcttcgaccgcatcgtcgcgcgggggcactacaccgagcgcgccgccaccaatgtcactcgcaccatcgtcgaggtcgtccatttctgccatcggcacgacgtcatccaccgtgacctcaagccggagaacttccttttcgccaataagaaggagaactcgccgccgcgcagcgcccctctcgatatgccgccctgcttcctcctctcctcttgatccatctgccatcccatccccgctctgccagttgcccctcgcttcctcttcggctcttcatccccctcgatccgtcgcccgtgcttcctcctcactatgtcccgtcccctctccatcttgtcgccctgcctccccgcgtctgcgtctgcgcctgccttcggcgtccagagccatatccgcgttggcctccacctacgcacccgcctctagccataagagctcctcccgtgtctgcctttagagatctgctacctccacatcggtgtctagggctcctccattgcctagatctactagaatgaaagtatttccgtctcatcaactgtgctgaagaggaggaaaacacctcacttgttgaagggagcagtggagacccggaggaagatcatttggagtctgcagctactaatcttcagcctggcagtgacacttgcattgcaagggaagagttgccagatcagaaggatctggtgaaactgcaagctgttatccgtggacatctagaggcggcccatgcctcacggccaaagcagatcagatgagattttttggtcttgcgtggttctttttaatctactcacatgatacttcttattcattgccatccaatttaattaattgccctcgattgaattggttcctttgccattttacttaggaggataaaagaagacactaccttggcacatgcctgttgtcacaatggacaaaagaagattagtgttgtgtgagatttttttcattcctttgatctattgcatgctatttgtaccctaatcgacaaaatagatgagactcaattcaggagcaaatcaccagtcctgttcacagtccaattcactatggctaaaatatcaaacttatgctccttgaggtttgttttttccttatcttcctttaatatctgatgactgatggactggtgagttcatgatctgcttcatgcttttccttttatatatggtcactacctcactggttagttcatggtgctttttgtctacttctttgcccaaaaaaaatcccggggcgaatttcagcatgcttttcctgcttccgctgtgcaaattcacaggatgcgtgggaaatgtgttcttgtttcgtcgggtggtgttcttgccattcgttttagctcaacacaaaacaaatgcttcttgttcttcaggtcgccctgtgtttctttctcgccagtttgggccatggattctggtgtgcatttgttcaatatatcttagtatcttatttaacaatcagtacttctctgatgctcaagagatcaatttactcaaagtagcaaactgtatcatagttgtatactttatcaaacgaggaacctgatgcttgtagtataagcctcattttgttccaaacaagacaggcttcggatacaatcacctggaaatcaatcagtaaacttttgctattcagttttttaaataaaaaatttaggccttacgactttcctcgcaatgtgttcacatgtagattaccttattgcattgcctacttttgtccgttgtgtaaaccaatcttttatcatttatcaaatgattttgctcttaacattaacaaattatcgtttggtcatatgcaactaatgacatcacattaccaagattctggggacccatcgctaccttgtgtcaacagtagactgaccagatcagggaaacgctcggcggcgaagctaaagcagagcttgcgctacacgcgctgcgagcagtttctgtctaaagggcaaggtctgatctcatatttgagctccccgtggcactgctcgcccggccagccaccatcccggtcttgcgctcggcggcgtgcatgggaagagacgacgataacatggacactgttttctaaatggatcagtatttttggtatatacacatgcttttactagtagaggagtatttattttcatttgtagcagccaaggaacttgtgcattccttatgaatcatgagaagaccatgaagatgcacacaaatttgcttgacttctgaccagtaataattagcgaaagaaagaaaatccagaaccatgaatcagcttgatagcagtaacaaatttgcttgacttctgacgagtaagaaattggcagcaagttcagcaggggccagactaataaatcagcttgatagcatccttgcagcggtgccttggactttggcggttagaagagttgcggctctggataaactcgaagctgacctatccaagttcgacgacgggcccttcttcctaggccaattcagcttggcggatgtagcgtacattacgattctggaaagggttcagatatactattcccatcttaggaactacgacatcgccgaaggcaggcccaacctccaggaattcatcgaggagatgaacaagattgaagcgtatgcgcagaccaagaacgatcctctgttcttgcttgatcttgccaagaaccatcttaagattgcctgaagatgtgacaaagcagcattagtccgttgatcggtggaagaccactcgtcagtgttgagttgaatgtttgatcaataaaatacggcatgttgttgctgactttggacttgcaaagttcactactgataataacacccatgtttcaacaagagtaatgggtacttttgggtatttggcacctgagtatgcagcatctggcaagctcacagaaaaatccgatgtattttctttcggagtcatgcttcttgagcttattactgggcggcgaccaattgacacaacccaattggcactgcttgttataagcacatatgtacttccatttgcatgttgtataatactaataccaattgcaaaattatagttattttttctacccttgttagttaataagcatatttgtggtcaataggttgtattcttattcttgtaaccgtgttaattaatgttatggacttgtagtcttgtattaccttgtgaatatatctgtccctgcctgccatgtgaacgtgcttagcctggaatttgtgatatgtacatatatccatgtgtttgaaatctgtattgtatgtgatattccgtgttgcatgtgatattatgtacgtctaat

SEQ ID NO: 76974 - DNA, 3664 bp, Zea Mays
cccgcgcgcccaccgccgcgcgcagcaccgcgccgcccacccgcggccaccccagcgccccaaatgccgctccaaccctagcctctcgccatgcctttcgatctcgggcggccatgggaaactgatgccgctcgccggtcgccgtcgcgcgggaggacgtcagctcctcgcacttccccgcatccacctcgtcatggagctctgcgagggcggcgagttcttcgaccgcatcgtcgcgcgggggcactacaccgagcgcgccgccaccaatgtcactcgcaccatcgtcgaggtcgtccatttctgccatcggcacgacgtcatccaccgtgacctcaagccggagaacttccttttcgccaataagaaggagaactcgccgccgcgcagcgcccctctcgatatgccgccctgcttcctcctctcctcttgatccatctgccatcccatccccgctctgccagttgcccctcgcttcctcttcggctcttcatccccctcgatccgtcgcccgtgcttcctcctcactatgtcccgtcccctctccatcttgtcgccctgcctccccgcgtctgcgtctgcgcctgccttcggcgtccagagccatatccgcgttggcctccacctacgcacccgcctctagccataagagctcctcccgtgtctgcctttagagatctgctacctccacatcggtgtctagggctcctccattgcctagatctactagaatgaaagtatttccgtctcatcaactgtgctgaagaggaggaaaacacctcacttgttgaagggagcagtggagacccggaggaagatcatttggagtctgcagctactaatcttcagcctggcagtgacacttgcattgcaagggaagagttgccagatcagaaggatctggtgaaactgcaagctgttatccgtggacatctagaggcggcccatgcctcacggccaaagcagatcagatgagattttttggtcttgcgtggttctttttaatctactcacatgatacttcttattcattgccatccaatttaattaattgccctcgattgaattggttcctttgccattttacttaggaggataaaagaagacactaccttggcacatgcctgttgtcacaatggacaaaagaagattagtgttgtgtgagatttttttcattcctttgatctattgcatgctatttgtaccctaatcgacaaaatagatgagactcaattcaggagcaaatcaccagtcctgttcacagtccaattcactatggctaaaatatcaaacttatgctccttgaggtttgttttttccttatcttcctttaatatctgatgactgatggactggtgagttcatgatctgcttcatgcttttccttttatatatggtcactacctcactggttagttcatggtgctttttgtctacttctttgcccaaaaaaaatcccggggcgaatttcagcatgcttttcctgcttccgctgtgcaaattcacaggatgcgtgggaaatgtgttcttgtttcgtcgggtggtgttcttgccattcgttttagctcaacacaaaacaaatgcttcttgttcttcaggtcgccctgtgtttctttctcgccagtttgggccatggattctggtgtgcatttgttcaatatatcttagtatcttatttaacaatcagtacttctctgatgctcaagagatcaatttactcaaagtagcaaactgtatcatagttgtatactttatcaaacgaggaacctgatgcttgtagtataagcctcattttgttccaaacaagacaggcttcggatacaatcacctggaaatcaatcagtaaacttttgctattcagttttttaaataaaaaatttaggccttacgactttcctcgcaatgtgttcacatgtagattaccttattgcattgcctacttttgtccgttgtgtaaaccaatcttttatcatttatcaaatgattttgctcttaacattaacaaattatcgtttggtcatatgcaactaatgacatcacattaccaagattctggggacccatcgctaccttgtgtcaacagtagactgaccagatcagggaaacgctcggcggcgaagctaaagcagagcttgcgctacacgcgctgcgagcagtttctgtctaaagggcaaggtctgatctcatatttgagctccccgtggcactgctcgcccggccagccaccatcccggtcttgcgctcggcggcgtgcatggtgtgctcgtccctgacagtggctagcttctgttttcttaattgatggctagcttctgttttcttaattgatgatttgttttttccttttctgatcgtcaatagggaagagacgacgataacatggacactgttttctaaatggatcagtatttttggtatatacacatgcttttactagtagaggagtatttattttcatttgtagcagccaaggaacttgtgcattccttatgaatcatgagaagaccatgaagatgcacacaaatttgcttgacttctgaccagtaataattagcgaaagaaagaaaatccagaaccatgaatcagcttgatagcagtaacaaatttgcttgacttctgacgagtaagaaattggcagcaagttcagcaggggccagactaataaatcagcttgatagcatccttgcagcggtgccttggactttggcggttagaagaggtttataattttatatgatgaaattatgtgcatcttcagttgtttttgcctcactgctctttgcggctctggataaactcgaagctgacctatccaagttcgacgacgggcccttcttcctaggccaattcagcttggcggatgtagcgtacattacgattctggaaagggttcagatatactattcccatcttaggaactacgacatcgccgaaggcaggcccaacctccaggaattcatcgaggagatgaacaagattgaagcgtatgcgcagaccaagaacgatcctctgttcttgcttgatcttgccaagaaccatcttaagattgcctgaagatgtgacaaagcagcattagtccgttgatcggtggaagaccactcgtcagtgttgagttgaatgtttgatcaataaaatacggcatgttgttgctgactttggacttgcaaagttcactactgataataacacccatgtttcaacaagagtaatgggtacttttgggtatttggcacctgagtatgcagcatctggcaagctcacagaaaaatccgatgtattttctttcggagtcatgcttcttgagcttattactgggcggcgaccaattgacacaacccaattggcactgcttgttataagcacatatgtacttccatttgcatgttgtataatactaataccaattgcaaaattatagttattttttctacccttgttagttaataagcatatttgtggtcaataggttgtattcttattcttgtaaccgtgttaattaatgttatggacttgtagtcttgtattaccttgtgaatatatctgtccctgcctgccatgtgaacgtgcttagcctggaatttgtgatatgtacatatatccatgtgtttgaaatctgtattgtatgtgatattccgtgttgcatgtgatattatgtacgtctaat

SEQ ID NO: 76975 - DNA, 3459 bp, Zea Mays
cccgcgcgcccaccgccgcgcgcagcaccgcgccgcccacccgcggccaccccagcgccccaaatgccgctccaaccctagcctctcgccatgcctttcgatctcgggcggccatgggaaactgatgccgctcgccggtcgccgtcgcgcgggaggacgtcagctcctcgcacttccccgcatccacctcgtcatggagctctgcgagggcggcgagttcttcgaccgcatcgtcgcgcgggggcactacaccgagcgcgccgccaccaatgtcactcgcaccatcgtcgaggtcgtccatttctgccatcggcacgacgtcatccaccgtgacctcaagccggagaacttccttttcgccaataagaaggagaactcgccgccgcgcagcgcccctctcgatatgccgccctgcttcctcctctcctcttgatccatctgccatcccatccccgctctgccagttgcccctcgcttcctcttcggctcttcatccccctcgatccgtcgcccgtgcttcctcctcactatgtcccgtcccctctccatcttgtcgccctgcctccccgcgtctgcgtctgcgcctgccttcggcgtccagagccatatccgcgttggcctccacctacgcacccgcctctagccataagagctcctcccgtgtctgcctttagagatctgctacctccacatcggtgtctagggctcctccattgcctagatctactagagtgagtgagcctacagagctggcctcatccaggctccagttccaccccacggtcatcctctgttgctctacgtttcatgcttctcacatcctctcctcaatctcatcaactgtgctgaaggaggcagatgaaagtatttccgtctcatcaactgtgctgaagaggaggaaaacacctcacttgttgaagggagcagtggagacccggaggaagatcatttggagtctgcagctactaatcttcagcctggcagtgacacttgcattgcaagggaagagttgccagatcagaaggatctggtgaaactgcaagctgttatccgtggacatctagaggcggcccatgcctcacggccaaagcagatcagatgagattttttggtcttgcgtggttctttttaatctactcacatgatacttcttattcattgccatccaatttaattaattgccctcgattgaattggttcctttgccattttacttaggaggataaaagaagacactaccttggcacatgcctgttgtcacaatggacaaaagaagattagtgttgtgtgagatttttttcattcctttgatctattgcatgctatttgtaccctaatcgacaaaatagatgagactcaattcaggagcaaatcaccagtcctgttcacagtccaattcactatggctaaaatatcaaacttatgctccttgaggtttgttttttccttatcttcctttaatatctgatgactgatggactggtgagttcatgatctgcttcatgcttttccttttatatatggtcactacctcactggttagttcatggtgctttttgtctacttctttgcccaaaaaaaatcccggggcgaatttcagcatgcttttcctgcttccgctgtgcaaattcacaggatgcgtgggaaatgtgttcttgtttcgtcgggtggtgttcttgccattcgttttagctcaacacaaaacaaatgcttcttgttcttcaggtcgccctgtgtttctttctcgccagtttgggccatggattctggtgtgcatttgttcaatatatcttagtatcttatttaacaatcagtacttctctgatgctcaagagatcaatttactcaaagtagcaaactgtatcatagttgtatactttatcaaacgaggaacctgatgcttgtagtataagcctcattttgttccaaacaagacaggcttcggatacaatcacctggaaatcaatcagtaaacttttgctattcagttttttaaataaaaaatttaggccttacgactttcctcgcaatgtgttcacatgtagattaccttattgcattgcctacttttgtccgttgtgtaaaccaatcttttatcatttatcaaatgattttgctcttaacattaacaaattatcgtttggtcatatgcaactaatgacatcacattaccaagattctggggacccatcgctaccttgtgtcaacagtagactgaccagatcagttttgttatgaaatcatggaactggcaacatgatagaatttttcaaggaaaaaaagggaaacgctcggcggcgaagctaaagcagagcttgcgctacacgcgctgcgagcagtttctgtctaaagggcaaggtctgatctcatatttgagctccccgtggcactgctcgcccggccagccaccatcccggtcttgcgctcggcggcgtgcatgggaagagacgacgataacatggacactgttttctaaatggatcagtatttttgcaagttcagcaggggccagactaataaatcagcttgatagcatccttgcagcggtgccttggactttggcggttagaagagttgcggctctggataaactcgaagctgacctatccaagttcgacgacgggcccttcttcctaggccaattcagcttggcggatgtagcgtacattacgattctggaaagggttcagatatactattcccatcttaggaactacgacatcgccgaaggcaggcccaacctccaggaattcatcgaggagatgaacaagattgaagcgtatgcgcagaccaagaacgatcctctgttcttgcttgatcttgccaagaaccatcttaagattgcctgaagatgtgacaaagcagcattagtccgttgatcggtggaagaccactcgtcagtgttgagttgaatgtttgatcaataaaatacggcatgttgttgctgactttggacttgcaaagttcactactgataataacacccatgtttcaacaagagtaatgggtacttttgggtatttggcacctgagtatgcagcatctggcaagctcacagaaaaatccgatgtattttctttcggagtcatgcttcttgagcttattactgggcggcgaccaattgacacaacccaattggcactgcttgttataagcacatatgtacttccatttgcatgttgtataatactaataccaattgcaaaattatagttattttttctacccttgttagttaataagcatatttgtggtcaataggttgtattcttattcttgtaaccgtgttaattaatgttatggacttgtagtcttgtattaccttgtgaatatatctgtccctgcctgccatgtgaacgtgcttagcctggaatttgtgatatgtacatatatccatgtgtttgaaatctgtattgtatgtgatattccgtgttgcatgtgatattatgtacgtctaat

SEQ ID NO: 76976 - DNA, 3504 bp, Zea Mays
cccgcgcgcccaccgccgcgcgcagcaccgcgccgcccacccgcggccaccccagcgccccaaatgccgctccaaccctagcctctcgccatgcctttcgatctcgggcggccatgggaaactgatgccgctcgccggtcgccgtcgcgcgggaggacgtcagctcctcgcacttccccgcatccacctcgtcatggagctctgcgagggcggcgagttcttcgaccgcatcgtcgcgcgggggcactacaccgagcgcgccgccaccaatgtcactcgcaccatcgtcgaggtcgtccatttctgccatcggcacgacgtcatccaccgtgacctcaagccggagaacttccttttcgccaataagaaggagaactcgccgccgcgcagcgcccctctcgatatgccgccctgcttcctcctctcctcttgatccatctgccatcccatccccgctctgccagttgcccctcgcttcctcttcggctcttcatccccctcgatccgtcgcccgtgcttcctcctcactatgtcccgtcccctctccatcttgtcgccctgcctccccgcgtctgcgtctgcgcctgccttcggcgtccagagccatatccgcgttggcctccacctacgcacccgcctctagccataagagctcctcccgtgtctgcctttagagatctgctacctccacatcggtgtctagggctcctccattgcctagatctactagagtgagtgagcctacagagctggcctcatccaggctccagttccaccccacggtcatcctctgttgctctacgtttcatgcttctcacatcctctcctcaatctcatcaactgtgctgaaggaggcagatgaaagtatttccgtctcatcaactgtgctgaagaggaggaaaacacctcacttgttgaagggagcagtggagacccggaggaagatcatttggagtctgcagctactaatcttcagcctggcagtgacacttgcattgcaagggaagagttgccagatcagaaggatctggtgaaactgcaagctgttatccgtggacatctagaggcggcccatgcctcacggccaaagcagatcagttaggaggataaaagaagacactaccttggcacatgcctgttgtcacaatggacaaaagaagattagtgttgtgtgagatttttttcattcctttgatctattgcatgctatttgtaccctaatcgacaaaatagatgagactcaattcaggagcaaatcaccagtcctgttcacagtccaattcactatggctaaaatatcaaacttatgctccttgaggtttgttttttccttatcttcctttaatatctgatgactgatggactggtgagttcatgatctgcttcatgcttttccttttatatatggtcactacctcactggttagttcatggtgctttttgtctacttctttgcccaaaaaaaatcccggggcgaatttcagcatgcttttcctgcttccgctgtgcaaattcacaggatgcgtgggaaatgtgttcttgtttcgtcgggtggtgttcttgccattcgttttagctcaacacaaaacaaatgcttcttgttcttcaggtcgccctgtgtttctttctcgccagtttgggccatggattctggtgtgcatttgttcaatatatcttagtatcttatttaacaatcagtacttctctgatgctcaagagatcaatttactcaaagtagcaaactgtatcatagttgtatactttatcaaacgaggaacctgatgcttgtagtataagcctcattttgttccaaacaagacaggcttcggatacaatcacctggaaatcaatcagtaaacttttgctattcagttttttaaataaaaaatttaggccttacgactttcctcgcaatgtgttcacatgtagattaccttattgcattgcctacttttgtccgttgtgtaaaccaatcttttatcatttatcaaatgattttgctcttaacattaacaaattatcgtttggtcatatgcaactaatgacatcacattaccaagattctggggacccatcgctaccttgtgtcaacagtagactgaccagatcagggaaacgctcggcggcgaagctaaagcagagcttgcgctacacgcgctgcgagcagtttctgtctaaagggcaaggtctgatctcatatttgagctccccgtggcactgctcgcccggccagccaccatcccggtcttgcgctcggcggcgtgcatgggaagagacgacgataacatggacactgttttctaaatggatcagtatttttggtatatacacatgcttttactagtagaggagtatttattttcatttgtagcagccaaggaacttgtgcattccttatgaatcatgagaagaccatgaagatgcacacaaatttgcttgacttctgaccagtaataattagcgaaagaaagaaaatccagaaccatgaatcagcttgatagcagtaacaaatttgcttgacttctgacgagtaagaaattggcagcaagttcagcaggggccagactaataaatcagcttgatagcatccttgcagcggtgccttggactttggcggttagaagagttgcggctctggataaactcgaagctgacctatccaagttcgacgacgggcccttcttcctaggccaattcagcttggcggatgtagcgtacattacgattctggaaagggttcagatatactattcccatcttaggaactacgacatcgccgaaggcaggcccaacctccaggaattcatcgaggagatgaacaagattgaagcgtatgcgcagaccaagaacgatcctctgttcttgcttgatcttgccaagaaccatcttaagattgcctgaagatgtgacaaagcagcattagtccgttgatcggtggaagaccactcgtcagtgttgagttgaatgtttgatcaataaaatacggttgctgactttggacttgcaaagttcactactgataataacacccatgtttcaacaagagtaatgggtacttttgggtatttggcacctgagtatgcagcatctggcaagctcacagaaaaatccgatgtattttctttcggagtcatgcttcttgagcttattactgggcggcgaccaattgacacaacccaattggcactgcttgttataagcacatatgtacttccatttgcatgttgtataatactaataccaattgcaaaattatagttattttttctacccttgttagttaataagcatatttgtggtcaataggttgtattcttattcttgtaaccgtgttaattaatgttatggacttgtagtcttgtattaccttgtgaatatatctgtccctgcctgccatgtgaacgtgcttagcctggaatttgtgatatgtacatatatccatgtgtttgaaatctgtattgtatgtgatattccgtgttgcatgtgatattatgtacgtctaat

SEQ ID NO: 76977 - DNA, 3071 bp, Zea Mays
cccgcgcgcccaccgccgcgcgcagcaccgcgccgcccacccgcggccaccccagcgccccaaatgccgctccaaccctagcctctcgccatgcctttcgatctcgggcggccatgggaaactgatgccgctcgccggtcgccgtcgcgcgggaggacgtcagctcctcgcacttccccgcatccacctcgtcatggagctctgcgagggcggcgagttcttcgaccgcatcgtcgcgcgggggcactacaccgagcgcgccgccaccaatgtcactcgcaccatcgtcgaggtcgtccatttctgccatcggcacgacgtcatccaccgtgacctcaagccggagaacttccttttcgccaataagaaggagaactcgccgccgcgcagcgcccctctcgatatgccgccctgcttcctcctctcctcttgatccatctgccatcccatccccgctctgccagttgcccctcgcttcctcttcggctcttcatccccctcgatccgtcgcccgtgcttcctcctcactatgtcccgtcccctctccatcttgtcgccctgcctccccgcgtctgcgtctgcgcctgccttcggcgtccagagccatatccgcgttggcctccacctacgcacccgcctctagccataagagctcctcccgtgtctgcctttagagatctgctacctccacatcggtgtctagggctcctccattgcctagatctactagagtgagtgagcctacagagctggcctcatccaggctccagttccaccccacggtcatcctctgttgctctacgtttcatgcttctcacatcctctcctcaatctcatcaactgtgctgaaggaggcagatgaaagtatttccgtctcatcaactgtgctgaagaggaggaaaacacctcacttgttgaagggagcagtggagacccggaggaagatcatttggagtctgcagctactaatcttcagcctggcagtgacacttgcattgcaagggaagagttgccagatcagaaggatctggtgaaactgcaagctgttatccgtggacatctagaggcggcccatgcctcacggccaaagcagatcagttaggaggataaaagaagacactaccttggcacatgcctgttgtcacaatggacaaaagaagattagtgttgtgtgagatttttttcattcctttgatctattgcatgctatttgtaccctaatcgacaaaatagatgagactcaattcaggagcaaatcaccagtcctgttcacagtccaattcactatggctaaaatatcaaacttatgctccttgaggtttgttttttccttatcttcctttaatatctgatgactgatggactggtgagttcatgatctgcttcatgcttttccttttatatatggtcactacctcactggttagttcatggtgctttttgtctacttctttgcccaaaaaaaatcccggggcgaatttcagcatgcttttcctgcttccgctgtgcaaattcacaggatgcgtgggaaatgtgttcttgtttcgtcgggtggtgttcttgccattcgttttagctcaacacaaaacaaatgcttcttgttcttcaggtcgccctgtgtttctttctcgccagtttgggccatggattctggtgtgcatttgttcaatatatcttagtatcttatttaacaatcagtacttctctgatgctcaagagatcaatttactcaaagtagcaaactgtatcatagttgtatactttatcaaacgaggaacctgatgcttgtagtataagcctcattttgttccaaacaagacaggcttcggatacaatcacctggaaatcaatcagtaaacttttgctattcagttttttaaataaaaaatttaggccttacgactttcctcgcaatgtgttcacatgtagattaccttattgcattgcctacttttgtccgttgtgtaaaccaatcttttatcatttatcaaatgattttgctcttaacattaacaaattatcgtttggtcatatgcaactaatgacatcacattaccaagattctggggacccatcgctaccttgtgtcaacagtagactgaccagatcagggaaacgctcggcggcgaagctaaagcagagcttgcgctacacgcgctgcgagcagtttctgtctaaagggcaagttgcggctctggataaactcgaagctgacctatccaagttcgacgacgggcccttcttcctaggccaattcagcttggcggatgtagcgtacattacgattctggaaagggttcagatatactattcccatcttaggaactacgacatcgccgaaggcaggcccaacctccaggaattcatcgaggagatgaacaagattgaagcgtatgcgcagaccaagaacgatcctctgttcttgcttgatcttgccaagaaccatcttaagattgcctgaagatgtgacaaagcagcattagtccgttgatcggtggaagaccactcgtcagtgttgagttgaatgtttgatcaataaaatacggcatgttgttgctgactttggacttgcaaagttcactactgataataacacccatgtttcaacaagagtaatgggtacttttgggtatttggcacctgagtatgcagcatctggcaagctcacagaaaaatccgatgtattttctttcggagtcatgcttcttgagcttattactgggcggcgaccaattgacacaacccaattggcactgcttgttataagcacatatgtacttccatttgcatgttgtataatactaataccaattgcaaaattatagttattttttctacccttgttagttaataagcatatttgtggtcaataggttgtattcttattcttgtaaccgtgttaattaatgttatggacttgtagtcttgtattaccttgtgaatatatctgtccctgcctgccatgtgaacgtgcttagcctggaatttgtgatatgtacatatatccatgtgtttgaaatctgtattgtatgtgatattccgtgttgcatgtgatattatgtacgtctaat

SEQ ID NO: 76978 - DNA, 3780 bp, Zea Mays
cccgcgcgcccaccgccgcgcgcagcaccgcgccgcccacccgcggccaccccagcgccccaaatgccgctccaaccctagcctctcgccatgcctttcgatctcgggcggccatgggaaactgatgccgctcgccggtcgccgtcgcgcgggaggacgtcagctcctcgcacttccccgcatccacctcgtcatggagctctgcgagggcggcgagttcttcgaccgcatcgtcgcgcgggggcactacaccgagcgcgccgccaccaatgtcactcgcaccatcgtcgaggtcgtccatttctgccatcggcacgacgtcatccaccgtgacctcaagccggagaacttccttttcgccaataagaaggagaactcgccgccgcgcagcgcccctctcgatatgccgccctgcttcctcctctcctcttgatccatctgccatcccatccccgctctgccagttgcccctcgcttcctcttcggctcttcatccccctcgatccgtcgcccgtgcttcctcctcactatgtcccgtcccctctccatcttgtcgccctgcctccccgcgtctgcgtctgcgcctgccttcggcgtccagagccatatccgcgttggcctccacctacgcacccgcctctagccataagagctcctcccgtgtctgcctttagagatctgctacctccacatcggtgtctagggctcctccattgcctagatctactagagtgagtgagcctacagagctggcctcatccaggctccagttccaccccacggtcatcctctgttgctctacgtttcatgcttctcacatcctctcctcaatctcatcaactgtgctgaaggaggcagatgaaagtatttccgtctcatcaactgtgctgaagaggaggaaaacacctcacttgttgaagggagcagtggagacccggaggaagatcatttggagtctgcagctactaatcttcagcctggcagtgacacttgcattgcaagggaagagttgccagatcagaaggatctggtgaaactgcaagctgttatccgtggacatctagaggcggcccatgcctcacggccaaagcagatcagatgagattttttggtcttgcgtggttctttttaatctactcacatgatacttcttattcattgccatccaatttaattaattgccctcgattgaattggttcctttgccattttacttaggaggataaaagaagacactaccttggcacatgcctgttgtcacaatggacaaaagaagattagtgttgtgtgagatttttttcattcctttgatctattgcatgctatttgtaccctaatcgacaaaatagatgagactcaattcaggagcaaatcaccagtcctgttcacagtccaattcactatggctaaaatatcaaacttatgctccttgaggtttgttttttccttatcttcctttaatatctgatgactgatggactggtgagttcatgatctgcttcatgcttttccttttatatatggtcactacctcactggttagttcatggtgctttttgtctacttctttgcccaaaaaaaatcccggggcgaatttcagcatgcttttcctgcttccgctgtgcaaattcacaggatgcgtgggaaatgtgttcttgtttcgtcgggtggtgttcttgccattcgttttagctcaacacaaaacaaatgcttcttgttcttcaggtcgccctgtgtttctttctcgccagtttgggccatggattctggtgtgcatttgttcaatatatcttagtatcttatttaacaatcagtacttctctgatgctcaagagatcaatttactcaaagtagcaaactgtatcatagttgtatactttatcaaacgaggaacctgatgcttgtagtataagcctcattttgttccaaacaagacaggcttcggatacaatcacctggaaatcaatcagtaaacttttgctattcagttttttaaataaaaaatttaggccttacgactttcctcgcaatgtgttcacatgtagattaccttattgcattgcctacttttgtccgttgtgtaaaccaatcttttatcatttatcaaatgattttgctcttaacattaacaaattatcgtttggtcatatgcaactaatgacatcacattaccaagattctggggacccatcgctaccttgtgtcaacagtagactgaccagatcagttttgttatgaaatcatggaactggcaacatgatagaatttttcaaggaaaaaaagggaaacgctcggcggcgaagctaaagcagagcttgcgctacacgcgctgcgagcagtttctgtctaaagggcaaggtctgatctcatatttgagctccccgtggcactgctcgcccggccagccaccatcccggtcttgcgctcggcggcgtgcatggtgtgctcgtccctgacagtggctagcttctgttttcttaattgatggctagcttctgttttcttaattgatgatttgttttttccttttctgatcgtcaatagggaagagacgacgataacatggacactgttttctaaatggatcagtatttttggtatatacacatgcttttactagtagaggagtatttattttcatttgtagcagccaaggaacttgtgcattccttatgaatcatgagaagaccatgaagatgcacacaaatttgcttgacttctgaccagtaataattagcgaaagaaagaaaatccagaaccatgaatcagcttgatagcagtaacaaatttgcttgacttctgacgagtaagaaattggcagcaagttcagcaggggccagactaataaatcagcttgatagcatccttgcagcggtgccttggactttggcggttagaagagttgcggctctggataaactcgaagctgacctatccaagttcgacgacgggcccttcttcctaggccaattcagcttggcggatgtagcgtacattacgattctggaaagggttcagatatactattcccatcttaggaactacgacatcgccgaaggcaggcccaacctccaggaattcatcgaggagatgaacaagattgaagcgtatgcgcagaccaagaacgatcctctgttcttgcttgatcttgccaagaaccatcttaagattgcctgaagatgtgacaaagcagcattagtccgttgatcggtggaagaccactcgtcagtgttgagttgaatgtttgatcaataaaatacggttgctgactttggacttgcaaagttcactactgataataacacccatgtttcaacaagagtaatgggtacttttgggtatttggcacctgagtatgcagcatctggcaagctcacagaaaaatccgatgtattttctttcggagtcatgcttcttgagcttattactgggcggcgaccaattgacacaacccaattggcactgcttgttataagcacatatgtacttccatttgcatgttgtataatactaataccaattgcaaaattatagttattttttctacccttgttagttaataagcatatttgtggtcaataggttgtattcttattcttgtaaccgtgttaattaatgttatggacttgtagtcttgtattaccttgtgaatatatctgtccctgcctgccatgtgaacgtgcttagcctggaatttgtgatatgtacatatatccatgtgtttgaaatctgtattgtatgtgatattccgtgttgcatgtgatattatgtacgtctaat

SEQ ID NO: 76979 - DNA, 3211 bp, Zea Mays
cccgcgcgcccaccgccgcgcgcagcaccgcgccgcccacccgcggccaccccagcgccccaaatgccgctccaaccctagcctctcgccatgcctttcgatctcgggcggccatgggaaactgatgccgctcgccggtcgccgtcgcgcgggaggacgtcagctcctcgcacttccccgcatccacctcgtcatggagctctgcgagggcggcgagttcttcgaccgcatcgtcgcgcgggggcactacaccgagcgcgccgccaccaatgtcactcgcaccatcgtcgaggtcgtccatttctgccatcggcacgacgtcatccaccgtgacctcaagccggagaacttccttttcgccaataagaaggagaactcgccgccgcgcagcgcccctctcgatatgccgccctgcttcctcctctcctcttgatccatctgccatcccatccccgctctgccagttgcccctcgcttcctcttcggctcttcatccccctcgatccgtcgcccgtgcttcctcctcactatgtcccgtcccctctccatcttgtcgccctgcctccccgcgtctgcgtctgcgcctgccttcggcgtccagagccatatccgcgttggcctccacctacgcacccgcctctagccataagagctcctcccgtgtctgcctttagagatctgctacctccacatcggtgtctagggctcctccattgcctagatctactagagtgagtgagcctacagagctggcctcatccaggctccagttccaccccacggtcatcctctgttgctctacgtttcatgcttctcacatcctctcctcaatctcatcaactgtgctgaaggaggcagatgaaagtatttccgtctcatcaactgtgctgaagaggaggaaaacacctcacttgttgaagggagcagtggagacccggaggaagatcatttggagtctgcagctactaatcttcagcctggcagtgacacttgcattgcaagggaagagttgccagatcagaaggatctggtgaaactgcaagctgttatccgtggacatctagaggcggcccatgcctcacggccaaagcagatcagttaggaggataaaagaagacactaccttggcacatgcctgttgtcacaatggacaaaagaagattagtgttgtgtgagatttttttcattcctttgatctattgcatgctatttgtaccctaatcgacaaaatagatgagactcaattcaggagcaaatcaccagtcctgttcacagtccaattcactatggctaaaatatcaaacttatgctccttgaggtttgttttttccttatcttcctttaatatctgatgactgatggactggtgagttcatgatctgcttcatgcttttccttttatatatggtcactacctcactggttagttcatggtgctttttgtctacttctttgcccaaaaaaaatcccggggcgaatttcagcatgcttttcctgcttccgctgtgcaaattcacaggatgcgtgggaaatgtgttcttgtttcgtcgggtggtgttcttgccattcgttttagctcaacacaaaacaaatgcttcttgttcttcaggtcgccctgtgtttctttctcgccagtttgggccatggattctggtgtgcatttgttcaatatatcttagtatcttatttaacaatcagtacttctctgatgctcaagagatcaatttactcaaagtagcaaactgtatcatagttgtatactttatcaaacgaggaacctgatgcttgtagtataagcctcattttgttccaaacaagacaggcttcggatacaatcacctggaaatcaatcagtaaacttttgctattcagttttttaaataaaaaatttaggccttacgactttcctcgcaatgtgttcacatgtagattaccttattgcattgcctacttttgtccgttgtgtaaaccaatcttttatcatttatcaaatgattttgctcttaacattaacaaattatcgtttggtcatatgcaactaatgacatcacattaccaagattctggggacccatcgctaccttgtgtcaacagtagactgaccagatcagggaaacgctcggcggcgaagctaaagcagagcttgcgctacacgcgctgcgagcagtttctgtctaaagggcaaggtctgatctcatcatccttgcagcggtgccttggactttggcggttagaagaggttctccttggaatggtagagttttacagggaaccttccatcatcagttgctgacatagctcgaactcgacgtttcttcttcgccagttgcggctctggataaactcgaagctgacctatccaagttcgacgacgggcccttcttcctaggccaattcagcttggcggatgtagcgtacattacgattctggaaagggttcagatatactattcccatcttaggaactacgacatcgccgaaggcaggcccaacctccaggaattcatcgaggagatgaacaagattgaagcgtatgcgcagaccaagaacgatcctctgttcttgcttgatcttgccaagaaccatcttaagattgcctgaagatgtgacaaagcagcattagtccgttgatcggtggaagaccactcgtcagtgttgagttgaatgtttgatcaataaaatacggcatgttgttgctgactttggacttgcaaagttcactactgataataacacccatgtttcaacaagagtaatgggtacttttgggtatttggcacctgagtatgcagcatctggcaagctcacagaaaaatccgatgtattttctttcggagtcatgcttcttgagcttattactgggcggcgaccaattgacacaacccaattggcactgcttgttataagcacatatgtacttccatttgcatgttgtataatactaataccaattgcaaaattatagttattttttctacccttgttagttaataagcatatttgtggtcaataggttgtattcttattcttgtaaccgtgttaattaatgttatggacttgtagtcttgtattaccttgtgaatatatctgtccctgcctgccatgtgaacgtgcttagcctggaatttgtgatatgtacatatatccatgtgtttgaaatctgtattgtatgtgatattccgtgttgcatgtgatattatgtacgtctaat

SEQ ID NO: 76980 - DNA, 2984 bp, Zea Mays
cactttcaccagctctcactcttatccacccgcgcgcccaccgccgcgcgcagcaccgcgccgcccacccgcggccaccccagcgccccaaatgccgctccaaccctagcctctcgccatgcctttcgatctcgggcggccatgggaaactgatgccgctcgccggtcgccgtcgcgcgggaggacgtcagctcctcgcacttccccgcatccacctcgtcatggagctctgcgagggcggcgagttcttcgaccgcatcgtcgcgcgggggcactacaccgagcgcgccgccaccaatgtcactcgcaccatcgtcgaggtcgtccatttctgccatcggcacgacgtcatccaccgtgacctcaagccggagaacttccttttcgccaataagaaggagaactcgccgccgcgcagcgcccctctcgatatgccgccctgcttcctcctctcctcttgatccatctgccatcccatccccgctctgccagttgcccctcgcttcctcttcggctcttcatccccctcgatccgtcgcccgtgcttcctcctcactatgtcccgtcccctctccatcttgtcgccctgcctccccgcgtctgcgtctgcgcctgccttcggcgtccagagccatatccgcgttggcctccacctacgcacccgcctctagccataagagctcctcccgtgtctgcctttagagatctgctacctccacatcggtgtctagggctcctccattgcctagatctactagagaggcagatgaaagtatttccgtctcatcaactgtgctgaagaggaggaaaacacctcacttgttgaagggagcagtggagacccggaggaagatcatttggagtctgcagctactaatcttcagcctggcagtgacacttgcattgcaagggaagagttgccagatcagaaggatctggtgaaactgcaagctgttatccgtggacatctagaggcggcccatgcctcacggccaaagcagatcagttaggaggataaaagaagacactaccttggcacatgcctgttgtcacaatggacaaaagaagattagtgttgtgtgagatttttttcattcctttgatctattgcatgctatttgtaccctaatcgacaaaatagatgagactcaattcaggagcaaatcaccagtcctgttcacagtccaattcactatggctaaaatatcaaacttatgctccttgaggtttgttttttccttatcttcctttaatatctgatgactgatggactggtgagttcatgatctgcttcatgcttttccttttatatatggtcactacctcactggttagttcatggtgctttttgtctacttctttgcccaaaaaaaatcccggggcgaatttcagcatgcttttcctgcttccgctgtgcaaattcacaggatgcgtgggaaatgtgttcttgtttcgtcgggtggtgttcttgccattcgttttagctcaacacaaaacaaatgcttcttgttcttcaggtcgccctgtgtttctttctcgccagtttgggccatggattctggtgtgcatttgttcaatatatcttagtatcttatttaacaatcagtacttctctgatgctcaagagatcaatttactcaaagtagcaaactgtatcatagttgtatactttatcaaacgaggaacctgatgcttgtagtataagcctcattttgttccaaacaagacaggcttcggatacaatcacctggaaatcaatcagtaaacttttgctattcagttttttaaataaaaaatttaggccttacgactttcctcgcaatgtgttcacatgtagattaccttattgcattgcctacttttgtccgttgtgtaaaccaatcttttatcatttatcaaatgattttgctcttaacattaacaaattatcgtttggtcatatgcaactaatgacatcacattaccaagattctggggacccatcgctaccttgtgtcaacagtagactgaccagatcagggaaacgctcggcggcgaagctaaagcagagcttgcgctacacgcgctgcgagcagtttctgtctaaagggcaaggtctgatctcatttgcggctctggataaactcgaagctgacctatccaagttcgacgacgggcccttcttcctaggccaattcagcttggcggatgtagcgtacattacgattctggaaagggttcagatatactattcccatcttaggaactacgacatcgccgaaggcaggcccaacctccaggaattcatcgaggagatgaacaagattgaagcgtatgcgcagaccaagaacgatcctctgttcttgcttgatcttgccaagaaccatcttaagattgcctgaagatgtgacaaagcagcattagtccgttgatcggtggaagaccactcgtcagtgttgagttgaatgtttgatcaataaaatacggttgctgactttggacttgcaaagttcactactgataataacacccatgtttcaacaagagtaatgggtacttttgggtatttggcacctgagtatgcagcatctggcaagctcacagaaaaatccgatgtattttctttcggagtcatgcttcttgagcttattactgggcggcgaccaattgacacaacccaattggcactgcttgttataagcacatatgtacttccatttgcatgttgtataatactaataccaattgcaaaattatagttattttttctacccttgttagttaataagcatatttgtggtcaataggttgtattcttattcttgtaaccgtgttaattaatgttatggacttgtagtcttgtattaccttgtgaatatatctgtccctgcctgccatgtgaacgtgcttagcctggaatttgtgatatgtacatatatccatgtgtttgaaatctgtattgtatgtgatattccgtgttgcatgtgatattatgtacgtctaat

SEQ ID NO: 76981 - DNA, 3996 bp, Zea Mays
cactttcaccagctctcactcttatccacccgcgcgcccaccgccgcgcgcagcaccgcgccgcccacccgcggccaccccagcgccccaaatgccgctccaaccctagcctctcgccatgcctttcgatctcgggcggccatgggaaactgatgccgctcgccggtcgccgtcgcgcgggaggacgtcagctcctcgcacttccccgcatccacctcgtcatggagctctgcgagggcggcgagttcttcgaccgcatcgtcgcgcgggggcactacaccgagcgcgccgccaccaatgtcactcgcaccatcgtcgaggtcgtccatttctgccatcggcacgacgtcatccaccgtgacctcaagccggagaacttccttttcgccaataagaaggagaactcgccgccgcgcagcgcccctctcgatatgccgccctgcttcctcctctcctcttgatccatctgccatcccatccccgctctgccagttgcccctcgcttcctcttcggctcttcatccccctcgatccgtcgcccgtgcttcctcctcactatgtcccgtcccctctccatcttgtcgccctgcctccccgcgtctgcgtctgcgcctgccttcggcgtccagagccatatccgcgttggcctccacctacgcacccgcctctagccataagagctcctcccgtgtctgcctttagagatctgctacctccacatcggtgtctagggctcctccattgcctagatctactagagtgagtgagcctacagagctggcctcatccaggctccagttccaccccacggtcatcctctgttgctctacgtttcatgcttctcacatcctctcctcaatctcatcaactgtgctgaaggaggcagatgaaagtatttccgtctcatcaactgtgctgaagaggaggaaaacacctcacttgttgaagggagcagtggagacccggaggaagatcatttggagtctgcagctactaatcttcagcctggcagtgacacttgcattgcaagggaagagttgccagatcagaaggatctggtgaaactgcaagctgttatccgtggacatctagaggcggcccatgcctcacggccaaagcagatcagttaggaggataaaagaagacactaccttggcacatgcctgttgtcacaatggacaaaagaagattagtgttgtgtgagatttttttcattcctttgatctattgcatgctatttgtaccctaatcgacaaaatagatgagactcaattcaggagcaaatcaccagtcctgttcacagtccaattcactatggctaaaatatcaaacttatgctccttgaggtttgttttttccttatcttcctttaatatctgatgactgatggactggtgagttcatgatctgcttcatgcttttccttttatatatggtcactacctcactggttagttcatggtgctttttgtctacttctttgcccaaaaaaaatcccggggcgaatttcagcatgcttttcctgcttccgctgtgcaaattcacaggatgcgtgggaaatgtgttcttgtttcgtcgggtggtgttcttgccattcgttttagctcaacacaaaacaaatgcttcttgttcttcaggtcgccctgtgtttctttctcgccagtttgggccatggattctggtgtgcatttgttcaatatatcttagtatcttatttaacaatcagtacttctctgatgctcaagagatcaatttactcaaagtagcaaactgtatcatagttgtatactttatcaaacgaggaacctgatgcttgtagtataagcctcattttgttccaaacaagacaggcttcggatacaatcacctggaaatcaatcagtaaacttttgctattcagttttttaaataaaaaatttaggccttacgactttcctcgcaatgtgttcacatgtagattaccttattgcattgcctacttttgtccgttgtgtaaaccaatcttttatcatttatcaaatgattttgctcttaacattaacaaattatcgtttggtcatatgcaactaatgacatcacattaccaagattctggggacccatcgctaccttgtgtcaacagtagactgaccagatcaggtaccattttgaaacctgtgtacaatttcatttctcaataactggccgaacataaatagccaaggcatgggtttatgccaatactcataggttaaatgacactttggtcatatgcatagttgccaccctcaaatgcctatctcatgatagaagtaaatggtggtctaaatcaacaacgactttctataagtaccatgactattattcttgaacaaatgtgtgctcatggttctgagtagatattaccattgccattgttttatatggaagtccagtgccttgtcaatctttggtccacgagtaagtgttttggatattcatgttagtgtacactgtaatcaacagagctggttttctttaacagttttgttatgaaatcatggaactggcaacatgatagaatttttcaaggaaaaaaaggtaatatattaattgtgcagcgtgccaatctaatatgagttatattaattgtgcctagaacctgtctagacaatctggagtaatatattaattgtgcagagctgtctagaacctgccgaaacaatctggagtaatatattaattgtgcagcgtgccaatctaatatgagttatgttctttttggtgttcctttcaagggaaacgctcggcggcgaagctaaagcagagcttgcgctacacgcgctgcgagcagtttctgtctaaagggcaaggtctgatctcatatttgagctccccgtggcactgctcgcccggccagccaccatcccggtcttgcgctcggcggcgtgcatggtgtgctcgtccctgacagtggctagcttctgttttcttaattgatggctagcttctgttttcttaattgatgatttgttttttccttttctgatcgtcaatagggaagagacgacgataacatggacactgttttctaaatggatcagtatttttgcatccttgcagcggtgccttggactttggcggttagaagagttgcggctctggataaactcgaagctgacctatccaagttcgacgacgggcccttcttcctaggccaattcagcttggcggatgtagcgtacattacgattctggaaagggttcagatatactattcccatcttaggaactacgacatcgccgaaggcaggcccaacctccaggaattcatcgaggagatgaacaagattgaagcgtatgcgcagaccaagaacgatcctctgttcttgcttgatcttgccaagaaccatcttaagattgcctgaagatgtgacaaagcagcattagtccgttgatcggtggaagaccactcgtcagtgttgagttgaatgtttgatcaataaaatacggcatgttgttgctgactttggacttgcaaagttcactactgataataacacccatgtttcaacaagagtaatgggtacttttgggtatttggcacctgagtatgcagcatctggcaagctcacagaaaaatccgatgtattttctttcggagtcatgcttcttgagcttattactgggcggcgaccaattgacacaacccaattggcactgcttgttataagcacatatgtacttccatttgcatgttgtataatactaataccaattgcaaaattatagttattttttctacccttgttagttaataagcatatttgtggtcaataggttgtattcttattcttgtaaccgtgttaattaatgttatggacttgtagtcttgtattaccttgtgaatatatctgtccctgcctgccatgtgaacgtgcttagcctggaatttgtgatatgtacatatatccatgtgtttgaaatctgtattgtatgtgatattccgtgttgcatgtgatattatgtacgtctaat

SEQ ID NO: 76982 - DNA, 2993 bp, Zea Mays
gtcactttcaccagctctcactcttatccacccgcgcgcccaccgccgcgcgcagcaccgcgccgcccacccgcggccaccccagcgccccaaatgccgctccaaccctagcctctcgccatgcctttcgatctcgggcggccatgggaaactgatgccgctcgccggtcgccgtcgcgcgggaggacgtcagctcctcgcacttccccgcatccacctcgtcatggagctctgcgagggcggcgagttcttcgaccgcatcgtcgcgcgggggcactacaccgagcgcgccgccaccaatgtcactcgcaccatcgtcgaggtcgtccatttctgccatcggcacgacgtcatccaccgtgacctcaagccggagaacttccttttcgccaataagaaggagaactcgccgccgcgcagcgcccctctcgatatgccgccctgcttcctcctctcctcttgatccatctgccatcccatccccgctctgccagttgcccctcgcttcctcttcggctcttcatccccctcgatccgtcgcccgtgcttcctcctcactatgtcccgtcccctctccatcttgtcgccctgcctccccgcgtctgcgtctgcgcctgccttcggcgtccagagccatatccgcgttggcctccacctacgcacccgcctctagccataagagctcctcccgtgtctgcctttagagatctgctacctccacatcggtgtctagggctcctccattgcctagatctactagagaggcagatgaaagtatttccgtctcatcaactgtgctgaagaggaggaaaacacctcacttgttgaagggagcagtggagacccggaggaagatcatttggagtctgcagctactaatcttcagcctggcagtgacacttgcattgcaagggaagagttgccagatcagaaggatctggtgaaactgcaagctgttatccgtggacatctagaggcggcccatgcctcacggccaaagcagatcagttaggaggataaaagaagacactaccttggcacatgcctgttgtcacaatggacaaaagaagattagtgttgtgtgagatttttttcattcctttgatctattgcatgctatttgtaccctaatcgacaaaatagatgagactcaattcaggagcaaatcaccagtcctgttcacagtccaattcactatggctaaaatatcaaacttatgctccttgaggtttgttttttccttatcttcctttaatatctgatgactgatggactggtgagttcatgatctgcttcatgcttttccttttatatatggtcactacctcactggttagttcatggtgctttttgtctacttctttgcccaaaaaaaatcccggggcgaatttcagcatgcttttcctgcttccgctgtgcaaattcacaggatgcgtgggaaatgtgttcttgtttcgtcgggtggtgttcttgccattcgttttagctcaacacaaaacaaatgcttcttgttcttcaggtcgccctgtgtttctttctcgccagtttgggccatggattctggtgtgcatttgttcaatatatcttagtatcttatttaacaatcagtacttctctgatgctcaagagatcaatttactcaaagtagcaaactgtatcatagttgtatactttatcaaacgaggaacctgatgcttgtagtataagcctcattttgttccaaacaagacaggcttcggatacaatcacctggaaatcaatcagtaaacttttgctattcagttttttaaataaaaaatttaggccttacgactttcctcgcaatgtgttcacatgtagattaccttattgcattgcctacttttgtccgttgtgtaaaccaatcttttatcatttatcaaatgattttgctcttaacattaacaaattatcgtttggtcatatgcaactaatgacatcacattaccaagattctggggacccatcgctaccttgtgtcaacagtagactgaccagatcagggaaacgctcggcggcgaagctaaagcagagcttgcgctacacgcgctgcgagcagtttctgtctaaagggcaaggtctgatctcatttgcggctctggataaactcgaagctgacctatccaagttcgacgacgggcccttcttcctaggccaattcagcttggcggatgtagcgtacattacgattctggaaagggttcagatatactattcccatcttaggaactacgacatcgccgaaggcaggcccaacctccaggaattcatcgaggagatgaacaagattgaagcgtatgcgcagaccaagaacgatcctctgttcttgcttgatcttgccaagaaccatcttaagattgcctgaagatgtgacaaagcagcattagtccgttgatcggtggaagaccactcgtcagtgttgagttgaatgtttgatcaataaaatacggcatgttgttgctgactttggacttgcaaagttcactactgataataacacccatgtttcaacaagagtaatgggtacttttgggtatttggcacctgagtatgcagcatctggcaagctcacagaaaaatccgatgtattttctttcggagtcatgcttcttgagcttattactgggcggcgaccaattgacacaacccaattggcactgcttgttataagcacatatgtacttccatttgcatgttgtataatactaataccaattgcaaaattatagttattttttctacccttgttagttaataagcatatttgtggtcaataggttgtattcttattcttgtaaccgtgttaattaatgttatggacttgtagtcttgtattaccttgtgaatatatctgtccctgcctgccatgtgaacgtgcttagcctggaatttgtgatatgtacatatatccatgtgtttgaaatctgtattgtatgtgatattccgtgttgcatgtgatattatgtacgtctaat

SEQ ID NO: 76983 - DNA, 3656 bp, Zea Mays
gtcactttcaccagctctcactcttatccacccgcgcgcccaccgccgcgcgcagcaccgcgccgcccacccgcggccaccccagcgccccaaatgccgctccaaccctagcctctcgccatgcctttcgatctcgggcggccatgggaaactgatgccgctcgccggtcgccgtcgcgcgggaggacgtcagctcctcgcacttccccgcatccacctcgtcatggagctctgcgagggcggcgagttcttcgaccgcatcgtcgcgcgggggcactacaccgagcgcgccgccaccaatgtcactcgcaccatcgtcgaggtcgtccatttctgccatcggcacgacgtcatccaccgtgacctcaagccggagaacttccttttcgccaataagaaggagaactcgccgccgcgcagcgcccctctcgatatgccgccctgcttcctcctctcctcttgatccatctgccatcccatccccgctctgccagttgcccctcgcttcctcttcggctcttcatccccctcgatccgtcgcccgtgcttcctcctcactatgtcccgtcccctctccatcttgtcgccctgcctccccgcgtctgcgtctgcgcctgccttcggcgtccagagccatatccgcgttggcctccacctacgcacccgcctctagccataagagctcctcccgtgtctgcctttagagatctgctacctccacatcggtgtctagggctcctccattgcctagatctactagagtgagtgagcctacagagctggcctcatccaggctccagttccaccccacggtcatcctctgttgctctacgtttcatgcttctcacatcctctcctcaatctcatcaactgtgctgaaggaggcagatgaaagtatttccgtctcatcaactgtgctgaagaggaggaaaacacctcacttgttgaagggagcagtggagacccggaggaagatcatttggagtctgcagctactaatcttcagcctggcagtgacacttgcattgcaagggaagagttgccagatcagaaggatctggtgaaactgcaagctgttatccgtggacatctagaggcggcccatgcctcacggccaaagcagatcagttaggaggataaaagaagacactaccttggcacatgcctgttgtcacaatggacaaaagaagattagtgttgtgtgagatttttttcattcctttgatctattgcatgctatttgtaccctaatcgacaaaatagatgagactcaattcaggagcaaatcaccagtcctgttcacagtccaattcactatggctaaaatatcaaacttatgctccttgaggtttgttttttccttatcttcctttaatatctgatgactgatggactggtgagttcatgatctgcttcatgcttttccttttatatatggtcactacctcactggttagttcatggtgctttttgtctacttctttgcccaaaaaaaatcccggggcgaatttcagcatgcttttcctgcttccgctgtgcaaattcacaggatgcgtgggaaatgtgttcttgtttcgtcgggtggtgttcttgccattcgttttagctcaacacaaaacaaatgcttcttgttcttcaggtcgccctgtgtttctttctcgccagtttgggccatggattctggtgtgcatttgttcaatatatcttagtatcttatttaacaatcagtacttctctgatgctcaagagatcaatttactcaaagtagcaaactgtatcatagttgtatactttatcaaacgaggaacctgatgcttgtagtataagcctcattttgttccaaacaagacaggcttcggatacaatcacctggaaatcaatcagtaaacttttgctattcagttttttaaataaaaaatttaggccttacgactttcctcgcaatgtgttcacatgtagattaccttattgcattgcctacttttgtccgttgtgtaaaccaatcttttatcatttatcaaatgattttgctcttaacattaacaaattatcgtttggtcatatgcaactaatgacatcacattaccaagattctggggacccatcgctaccttgtgtcaacagtagactgaccagatcaggtaccattttgaaacctgtgtacaatttcatttctcaataactggccgaacataaatagccaaggcatgggtttatgccaatactcataggttaaatgacactttggtcatatgcatagttgccaccctcaaatgcctatctcatgatagaagtaaatggtggtctaaatcaacaacgactttctataagtaccatgactattattcttgaacaaatgtgtgctcatggttctgagtagatattaccattgccattgttttatatggaagtccagtgccttgtcaatctttggtccacgagtaagtgttttggatattcatgttagtgtacactgtaatcaacagagctggttttctttaacagttttgttatgaaatcatggaactggcaacatgatagaatttttcaaggaaaaaaagggaaacgctcggcggcgaagctaaagcagagcttgcgctacacgcgctgcgagcagtttctgtctaaagggcaaggtctgatctcatatttgagctccccgtggcactgctcgcccggccagccaccatcccggtcttgcgctcggcggcgtgcatgggaagagacgacgataacatggacactgttttctaaatggatcagtatttttgttgcggctctggataaactcgaagctgacctatccaagttcgacgacgggcccttcttcctaggccaattcagcttggcggatgtagcgtacattacgattctggaaagggttcagatatactattcccatcttaggaactacgacatcgccgaaggcaggcccaacctccaggaattcatcgaggagatgaacaagattgaagcgtatgcgcagaccaagaacgatcctctgttcttgcttgatcttgccaagaaccatcttaagattgcctgaagatgtgacaaagcagcattagtccgttgatcggtggaagaccactcgtcagtgttgagttgaatgtttgatcaataaaatacggcatgttgttgctgactttggacttgcaaagttcactactgataataacacccatgtttcaacaagagtaatgggtacttttgggtatttggcacctgagtatgcagcatctggcaagctcacagaaaaatccgatgtattttctttcggagtcatgcttcttgagcttattactgggcggcgaccaattgacacaacccaattggcactgcttgttataagcacatatgtacttccatttgcatgttgtataatactaataccaattgcaaaattatagttattttttctacccttgttagttaataagcatatttgtggtcaataggttgtattcttattcttgtaaccgtgttaattaatgttatggacttgtagtcttgtattaccttgtgaatatatctgtccctgcctgccatgtgaacgtgcttagcctggaatttgtgatatgtacatatatccatgtgtttgaaatctgtattgtatgtgatattccgtgttgcatgtgatattatgtacgtctaat

SEQ ID NO: 76984 - DNA, 4203 bp, Zea Mays
gtcactttcaccagctctcactcttatccacccgcgcgcccaccgccgcgcgcagcaccgcgccgcccacccgcggccaccccagcgccccaaatgccgctccaaccctagcctctcgccatgcctttcgatctcgggcggccatgggaaactgatgccgctcgccggtcgccgtcgcgcgggaggacgtcagctcctcgcacttccccgcatccacctcgtcatggagctctgcgagggcggcgagttcttcgaccgcatcgtcgcgcgggggcactacaccgagcgcgccgccaccaatgtcactcgcaccatcgtcgaggtcgtccatttctgccatcggcacgacgtcatccaccgtgacctcaagccggagaacttccttttcgccaataagaaggagaactcgccgccgcgcagcgcccctctcgatatgccgccctgcttcctcctctcctcttgatccatctgccatcccatccccgctctgccagttgcccctcgcttcctcttcggctcttcatccccctcgatccgtcgcccgtgcttcctcctcactatgtcccgtcccctctccatcttgtcgccctgcctccccgcgtctgcgtctgcgcctgccttcggcgtccagagccatatccgcgttggcctccacctacgcacccgcctctagccataagagctcctcccgtgtctgcctttagagatctgctacctccacatcggtgtctagggctcctccattgcctagatctactagagaggcagatgaaagtatttccgtctcatcaactgtgctgaagaggaggaaaacacctcacttgttgaagggagcagtggagacccggaggaagatcatttggagtctgcagctactaatcttcagcctggcagtgacacttgcattgcaagggaagagttgccagatcagaaggatctggtgaaactgcaagctgttatccgtggacatctagaggcggcccatgcctcacggccaaagcagatcagttaggaggataaaagaagacactaccttggcacatgcctgttgtcacaatggacaaaagaagattagtgttgtgtgagatttttttcattcctttgatctattgcatgctatttgtaccctaatcgacaaaatagatgagactcaattcaggagcaaatcaccagtcctgttcacagtccaattcactatggctaaaatatcaaacttatgctccttgaggtttgttttttccttatcttcctttaatatctgatgactgatggactggtgagttcatgatctgcttcatgcttttccttttatatatggtcactacctcactggttagttcatggtgctttttgtctacttctttgcccaaaaaaaatcccggggcgaatttcagcatgcttttcctgcttccgctgtgcaaattcacaggatgcgtgggaaatgtgttcttgtttcgtcgggtggtgttcttgccattcgttttagctcaacacaaaacaaatgcttcttgttcttcaggtcgccctgtgtttctttctcgccagtttgggccatggattctggtgtgcatttgttcaatatatcttagtatcttatttaacaatcagtacttctctgatgctcaagagatcaatttactcaaagtagcaaactgtatcatagttgtatactttatcaaacgaggaacctgatgcttgtagtataagcctcattttgttccaaacaagacaggcttcggatacaatcacctggaaatcaatcagtaaacttttgctattcagttttttaaataaaaaatttaggccttacgactttcctcgcaatgtgttcacatgtagattaccttattgcattgcctacttttgtccgttgtgtaaaccaatcttttatcatttatcaaatgattttgctcttaacattaacaaattatcgtttggtcatatgcaactaatgacatcacattaccaagattctggggacccatcgctaccttgtgtcaacagtagactgaccagatcaggtaccattttgaaacctgtgtacaatttcatttctcaataactggccgaacataaatagccaaggcatgggtttatgccaatactcataggttaaatgacactttggtcatatgcatagttgccaccctcaaatgcctatctcatgatagaagtaaatggtggtctaaatcaacaacgactttctataagtaccatgactattattcttgaacaaatgtgtgctcatggttctgagtagatattaccattgccattgttttatatggaagtccagtgccttgtcaatctttggtccacgagtaagtgttttggatattcatgttagtgtacactgtaatcaacagagctggttttctttaacagttttgttatgaaatcatggaactggcaacatgatagaatttttcaaggaaaaaaaggtaatatattaattgtgcagcgtgccaatctaatatgagttatattaattgtgcctagaacctgtctagacaatctggagtaatatattaattgtgcagagctgtctagaacctgccgaaacaatctggagtaatatattaattgtgcagcgtgccaatctaatatgagttatgttctttttggtgttcctttcaagggaaacgctcggcggcgaagctaaagcagagcttgcgctacacgcgctgcgagcagtttctgtctaaagggcaaggtctgatctcatatttgagctccccgtggcactgctcgcccggccagccaccatcccggtcttgcgctcggcggcgtgcatggtgtgctcgtccctgacagtggctagcttctgttttcttaattgatggctagcttctgttttcttaattgatgatttgttttttccttttctgatcgtcaatagggaagagacgacgataacatggacactgttttctaaatggatcagtatttttggtatatacacatgcttttactagtagaggagtatttattttcatttgtagcagccaaggaacttgtgcattccttatgaatcatgagaagaccatgaagatgcacacaaatttgcttgacttctgaccagtaataattagcgaaagaaagaaaatccagaaccatgaatcagcttgatagcagtaacaaatttgcttgacttctgacgagtaagaaattggcagcaagttcagcaggggccagactaataaatcagcttgatagcatccttgcagcggtgccttggactttggcggttagaagagagttttacagggaaccttccatcatcagttgctgacatagctcgaactcgacgtttcttcttcgccagttgcggctctggataaactcgaagctgacctatccaagttcgacgacgggcccttcttcctaggccaattcagcttggcggatgtagcgtacattacgattctggaaagggttcagatatactattcccatcttaggaactacgacatcgccgaaggcaggcccaacctccaggaattcatcgaggagatgaacaagattgaagcgtatgcgcagaccaagaacgatcctctgttcttgcttgatcttgccaagaaccatcttaagattgcctgaagatgtgacaaagcagcattagtccgttgatcggtggaagaccactcgtcagtgttgagttgaatgtttgatcaataaaatacggttgctgactttggacttgcaaagttcactactgataataacacccatgtttcaacaagagtaatgggtacttttgggtatttggcacctgagtatgcagcatctggcaagctcacagaaaaatccgatgtattttctttcggagtcatgcttcttgagcttattactgggcggcgaccaattgacacaacccaattggcactgcttgttataagcacatatgtacttccatttgcatgttgtataatactaataccaattgcaaaattatagttattttttctacccttgttagttaataagcatatttgtggtcaataggttgtattcttattcttgtaaccgtgttaattaatgttatggacttgtagtcttgtattaccttgtgaatatatctgtccctgcctgccatgtgaacgtgcttagcctggaatttgtgatatgtacatatatccatgtgtttgaaatctgtattgtatgtgatattccgtgttgcatgtgatattatgtacgtctaat

SEQ ID NO: 76985 - DNA, 4045 bp, Zea Mays
acttaacccaaaatacctagatccctatcccgcgccgcgagtcactttcaccagctctcactcttatccacccgcgcgcccaccgccgcgcgcagcaccgcgccgcccacccgcggccaccccagcgccccaaatgccgctccaaccctagcctctcgccatgcctttcgatctcgggcggccatgggaaactgatgccgctcgccggtcgccgtcgcgcgggaggacgtcagctcctcgcacttccccgcatccacctcgtcatggagctctgcgagggcggcgagttcttcgaccgcatcgtcgcgcgggggcactacaccgagcgcgccgccaccaatgtcactcgcaccatcgtcgaggtcgtccatttctgccatcggcacgacgtcatccaccgtgacctcaagccggagaacttccttttcgccaataagaaggagaactcgccgccgcgcagcgcccctctcgatatgccgccctgcttcctcctctcctcttgatccatctgccatcccatccccgctctgccagttgcccctcgcttcctcttcggctcttcatccccctcgatccgtcgcccgtgcttcctcctcactatgtcccgtcccctctccatcttgtcgccctgcctccccgcgtctgcgtctgcgcctgccttcggcgtccagagccatatccgcgttggcctccacctacgcacccgcctctagccataagagctcctcccgtgtctgcctttagagatctgctacctccacatcggtgtctagggctcctccattgcctagatctactagagaggcagatgaaagtatttccgtctcatcaactgtgctgaagaggaggaaaacacctcacttgttgaagggagcagtggagacccggaggaagatcatttggagtctgcagctactaatcttcagcctggcagtgacacttgcattgcaagggaagagttgccagatcagaaggatctggtgaaactgcaagctgttatccgtggacatctagaggcggcccatgcctcacggccaaagcagatcagttaggaggataaaagaagacactaccttggcacatgcctgttgtcacaatggacaaaagaagattagtgttgtgtgagatttttttcattcctttgatctattgcatgctatttgtaccctaatcgacaaaatagatgagactcaattcaggagcaaatcaccagtcctgttcacagtccaattcactatggctaaaatatcaaacttatgctccttgaggtttgttttttccttatcttcctttaatatctgatgactgatggactggtgagttcatgatctgcttcatgcttttccttttatatatggtcactacctcactggttagttcatggtgctttttgtctacttctttgcccaaaaaaaatcccggggcgaatttcagcatgcttttcctgcttccgctgtgcaaattcacaggatgcgtgggaaatgtgttcttgtttcgtcgggtggtgttcttgccattcgttttagctcaacacaaaacaaatgcttcttgttcttcaggtcgccctgtgtttctttctcgccagtttgggccatggattctggtgtgcatttgttcaatatatcttagtatcttatttaacaatcagtacttctctgatgctcaagagatcaatttactcaaagtagcaaactgtatcatagttgtatactttatcaaacgaggaacctgatgcttgtagtataagcctcattttgttccaaacaagacaggcttcggatacaatcacctggaaatcaatcagtaaacttttgctattcagttttttaaataaaaaatttaggccttacgactttcctcgcaatgtgttcacatgtagattaccttattgcattgcctacttttgtccgttgtgtaaaccaatcttttatcatttatcaaatgattttgctcttaacattaacaaattatcgtttggtcatatgcaactaatgacatcacattaccaagattctggggacccatcgctaccttgtgtcaacagtagactgaccagatcaggtaccattttgaaacctgtgtacaatttcatttctcaataactggccgaacataaatagccaaggcatgggtttatgccaatactcataggttaaatgacactttggtcatatgcatagttgccaccctcaaatgcctatctcatgatagaagtaaatggtggtctaaatcaacaacgactttctataagtaccatgactattattcttgaacaaatgtgtgctcatggttctgagtagatattaccattgccattgttttatatggaagtccagtgccttgtcaatctttggtccacgagtaagtgttttggatattcatgttagtgtacactgtaatcaacagagctggttttctttaacagttttgttatgaaatcatggaactggcaacatgatagaatttttcaaggaaaaaaagggaaacgctcggcggcgaagctaaagcagagcttgcgctacacgcgctgcgagcagtttctgtctaaagggcaaggtctgatctcatatttgagctccccgtggcactgctcgcccggccagccaccatcccggtcttgcgctcggcggcgtgcatggtgtgctcgtccctgacagtggctagcttctgttttcttaattgatggctagcttctgttttcttaattgatgatttgttttttccttttctgatcgtcaatagggaagagacgacgataacatggacactgttttctaaatggatcagtatttttggtatatacacatgcttttactagtagaggagtatttattttcatttgtagcagccaaggaacttgtgcattccttatgaatcatgagaagaccatgaagatgcacacaaatttgcttgacttctgaccagtaataattagcgaaagaaagaaaatccagaaccatgaatcagcttgatagcagtaacaaatttgcttgacttctgacgagtaagaaattggcagcaagttcagcaggggccagactaataaatcagcttgatagcatccttgcagcggtgccttggactttggcggttagaagaggtttataattttatatgatgaaattatgtgcatcttcagttgtttttgcctcactgctctttgcggctctggataaactcgaagctgacctatccaagttcgacgacgggcccttcttcctaggccaattcagcttggcggatgtagcgtacattacgattctggaaagggttcagatatactattcccatcttaggaactacgacatcgccgaaggcaggcccaacctccaggaattcatcgaggagatgaacaagattgaagcgtatgcgcagaccaagaacgatcctctgttcttgcttgatcttgccaagaaccatcttaagattgcctgaagatgtgacaaagcagcattagtccgttgatcggtggaagaccactcgtcagtgttgagttgaatgtttgatcaataaaatacggcatgttgttgctgactttggacttgcaaagttcactactgataataacacccatgtttcaacaagagtaatgggtacttttgggtatttggcacctgagtatgcagcatctggcaagctcacagaaaaatccgatgtattttctttcggagtcatgcttcttgagcttattactgggcggcgaccaattgacacaacccaattggcactgcttgttataagcacatatgtacttccatttgcatgttgtataatactaataccaattgcaaaattatagttattttttctacccttgttagttaataagcatatttgtggtcaataggttgtattcttattcttgtaaccgtgttaattaatgttatggacttgtagtcttgtattaccttgtgaatatatctgtccctgcctgccatgtgaacgtgcttagcctggaatttgtgatatgtacatatatccatgtgtttgaaatctgtattgtatgtgatattccgtgttgcatgtgatattatgtacgtctaat

SEQ ID NO: 76986 - DNA, 3881 bp, Zea Mays
acttaacccaaaatacctagatccctatcccgcgccgcgagtcactttcaccagctctcactcttatccacccgcgcgcccaccgccgcgcgcagcaccgcgccgcccacccgcggccaccccagcgccccaaatgccgctccaaccctagcctctcgccatgcctttcgatctcgggcggccatgggaaactgatgccgctcgccggtcgccgtcgcgcgggaggacgtcagctcctcgcacttccccgcatccacctcgtcatggagctctgcgagggcggcgagttcttcgaccgcatcgtcgcgcgggggcactacaccgagcgcgccgccaccaatgtcactcgcaccatcgtcgaggtcgtccatttctgccatcggcacgacgtcatccaccgtgacctcaagccggagaacttccttttcgccaataagaaggagaactcgccgccgcgcagcgcccctctcgatatgccgccctgcttcctcctctcctcttgatccatctgccatcccatccccgctctgccagttgcccctcgcttcctcttcggctcttcatccccctcgatccgtcgcccgtgcttcctcctcactatgtcccgtcccctctccatcttgtcgccctgcctccccgcgtctgcgtctgcgcctgccttcggcgtccagagccatatccgcgttggcctccacctacgcacccgcctctagccataagagctcctcccgtgtctgcctttagagatctgctacctccacatcggtgtctagggctcctccattgcctagatctactagagaggcagatgaaagtatttccgtctcatcaactgtgctgaagaggaggaaaacacctcacttgttgaagggagcagtggagacccggaggaagatcatttggagtctgcagctactaatcttcagcctggcagtgacacttgcattgcaagggaagagttgccagatcagaaggatctggtgaaactgcaagctgttatccgtggacatctagaggcggcccatgcctcacggccaaagcagatcagttaggaggataaaagaagacactaccttggcacatgcctgttgtcacaatggacaaaagaagattagtgttgtgtgagatttttttcattcctttgatctattgcatgctatttgtaccctaatcgacaaaatagatgagactcaattcaggagcaaatcaccagtcctgttcacagtccaattcactatggctaaaatatcaaacttatgctccttgaggtttgttttttccttatcttcctttaatatctgatgactgatggactggtgagttcatgatctgcttcatgcttttccttttatatatggtcactacctcactggttagttcatggtgctttttgtctacttctttgcccaaaaaaaatcccggggcgaatttcagcatgcttttcctgcttccgctgtgcaaattcacaggatgcgtgggaaatgtgttcttgtttcgtcgggtggtgttcttgccattcgttttagctcaacacaaaacaaatgcttcttgttcttcaggtcgccctgtgtttctttctcgccagtttgggccatggattctggtgtgcatttgttcaatatatcttagtatcttatttaacaatcagtacttctctgatgctcaagagatcaatttactcaaagtagcaaactgtatcatagttgtatactttatcaaacgaggaacctgatgcttgtagtataagcctcattttgttccaaacaagacaggcttcggatacaatcacctggaaatcaatcagtaaacttttgctattcagttttttaaataaaaaatttaggccttacgactttcctcgcaatgtgttcacatgtagattaccttattgcattgcctacttttgtccgttgtgtaaaccaatcttttatcatttatcaaatgattttgctcttaacattaacaaattatcgtttggtcatatgcaactaatgacatcacattaccaagattctggggacccatcgctaccttgtgtcaacagtagactgaccagatcaggtaccattttgaaacctgtgtacaatttcatttctcaataactggccgaacataaatagccaaggcatgggtttatgccaatactcataggttaaatgacactttggtcatatgcatagttgccaccctcaaatgcctatctcatgatagaagtaaatggtggtctaaatcaacaacgactttctataagtaccatgactattattcttgaacaaatgtgtgctcatggttctgagtagatattaccattgccattgttttatatggaagtccagtgccttgtcaatctttggtccacgagtaagtgttttggatattcatgttagtgtacactgtaatcaacagagctggttttctttaacagttttgttatgaaatcatggaactggcaacatgatagaatttttcaaggaaaaaaagggaaacgctcggcggcgaagctaaagcagagcttgcgctacacgcgctgcgagcagtttctgtctaaagggcaaggtctgatctcatatttgagctccccgtggcactgctcgcccggccagccaccatcccggtcttgcgctcggcggcgtgcatgggaagagacgacgataacatggacactgttttctaaatggatcagtatttttggtatatacacatgcttttactagtagaggagtatttattttcatttgtagcagccaaggaacttgtgcattccttatgaatcatgagaagaccatgaagatgcacacaaatttgcttgacttctgaccagtaataattagcgaaagaaagaaaatccagaaccatgaatcagcttgatagcagtaacaaatttgcttgacttctgacgagtaagaaattggcagcaagttcagcaggggccagactaataaatcagcttgatagcatccttgcagcggtgccttggactttggcggttagaagagttgcggctctggataaactcgaagctgacctatccaagttcgacgacgggcccttcttcctaggccaattcagcttggcggatgtagcgtacattacgattctggaaagggttcagatatactattcccatcttaggaactacgacatcgccgaaggcaggcccaacctccaggaattcatcgaggagatgaacaagattgaagcgtatgcgcagaccaagaacgatcctctgttcttgcttgatcttgccaagaaccatcttaagattgcctgaagatgtgacaaagcagcattagtccgttgatcggtggaagaccactcgtcagtgttgagttgaatgtttgatcaataaaatacggcatgttgttgctgactttggacttgcaaagttcactactgataataacacccatgtttcaacaagagtaatgggtacttttgggtatttggcacctgagtatgcagcatctggcaagctcacagaaaaatccgatgtattttctttcggagtcatgcttcttgagcttattactgggcggcgaccaattgacacaacccaattggcactgcttgttataagcacatatgtacttccatttgcatgttgtataatactaataccaattgcaaaattatagttattttttctacccttgttagttaataagcatatttgtggtcaataggttgtattcttattcttgtaaccgtgttaattaatgttatggacttgtagtcttgtattaccttgtgaatatatctgtccctgcctgccatgtgaacgtgcttagcctggaatttgtgatatgtacatatatccatgtgtttgaaatctgtattgtatgtgatattccgtgttgcatgtgatattatgtacgtctaat

SEQ ID NO: 76987 - DNA, 4046 bp, Zea Mays
acttaacccaaaatacctagatccctatcccgcgccgcgagtcactttcaccagctctcactcttatccacccgcgcgcccaccgccgcgcgcagcaccgcgccgcccacccgcggccaccccagcgccccaaatgccgctccaaccctagcctctcgccatgcctttcgatctcgggcggccatgggaaactgatgccgctcgccggtcgccgtcgcgcgggaggacgtcagctcctcgcacttccccgcatccacctcgtcatggagctctgcgagggcggcgagttcttcgaccgcatcgtcgcgcgggggcactacaccgagcgcgccgccaccaatgtcactcgcaccatcgtcgaggtcgtccatttctgccatcggcacgacgtcatccaccgtgacctcaagccggagaacttccttttcgccaataagaaggagaactcgccgccgcgcagcgcccctctcgatatgccgccctgcttcctcctctcctcttgatccatctgccatcccatccccgctctgccagttgcccctcgcttcctcttcggctcttcatccccctcgatccgtcgcccgtgcttcctcctcactatgtcccgtcccctctccatcttgtcgccctgcctccccgcgtctgcgtctgcgcctgccttcggcgtccagagccatatccgcgttggcctccacctacgcacccgcctctagccataagagctcctcccgtgtctgcctttagagatctgctacctccacatcggtgtctagggctcctccattgcctagatctactagaatgaaagtatttccgtctcatcaactgtgctgaagaggaggaaaacacctcacttgttgaagggagcagtggagacccggaggaagatcatttggagtctgcagctactaatcttcagcctggcagtgacacttgcattgcaagggaagagttgccagatcagaaggatctggtgaaactgcaagctgttatccgtggacatctagaggcggcccatgcctcacggccaaagcagatcagttaggaggataaaagaagacactaccttggcacatgcctgttgtcacaatggacaaaagaagattagtgttgtgtgagatttttttcattcctttgatctattgcatgctatttgtaccctaatcgacaaaatagatgagactcaattcaggagcaaatcaccagtcctgttcacagtccaattcactatggctaaaatatcaaacttatgctccttgaggtttgttttttccttatcttcctttaatatctgatgactgatggactggtgagttcatgatctgcttcatgcttttccttttatatatggtcactacctcactggttagttcatggtgctttttgtctacttctttgcccaaaaaaaatcccggggcgaatttcagcatgcttttcctgcttccgctgtgcaaattcacaggatgcgtgggaaatgtgttcttgtttcgtcgggtggtgttcttgccattcgttttagctcaacacaaaacaaatgcttcttgttcttcaggtcgccctgtgtttctttctcgccagtttgggccatggattctggtgtgcatttgttcaatatatcttagtatcttatttaacaatcagtacttctctgatgctcaagagatcaatttactcaaagtagcaaactgtatcatagttgtatactttatcaaacgaggaacctgatgcttgtagtataagcctcattttgttccaaacaagacaggcttcggatacaatcacctggaaatcaatcagtaaacttttgctattcagttttttaaataaaaaatttaggccttacgactttcctcgcaatgtgttcacatgtagattaccttattgcattgcctacttttgtccgttgtgtaaaccaatcttttatcatttatcaaatgattttgctcttaacattaacaaattatcgtttggtcatatgcaactaatgacatcacattaccaagattctggggacccatcgctaccttgtgtcaacagtagactgaccagatcaggtaccattttgaaacctgtgtacaatttcatttctcaataactggccgaacataaatagccaaggcatgggtttatgccaatactcataggttaaatgacactttggtcatatgcatagttgccaccctcaaatgcctatctcatgatagaagtaaatggtggtctaaatcaacaacgactttctataagtaccatgactattattcttgaacaaatgtgtgctcatggttctgagtagatattaccattgccattgttttatatggaagtccagtgccttgtcaatctttggtccacgagtaagtgttttggatattcatgttagtgtacactgtaatcaacagagctggttttctttaacagttttgttatgaaatcatggaactggcaacatgatagaatttttcaaggaaaaaaagggaaacgctcggcggcgaagctaaagcagagcttgcgctacacgcgctgcgagcagtttctgtctaaagggcaaggtctgatctcatatttgagctccccgtggcactgctcgcccggccagccaccatcccggtcttgcgctcggcggcgtgcatggtgtgctcgtccctgacagtggctagcttctgttttcttaattgatggctagcttctgttttcttaattgatgatttgttttttccttttctgatcgtcaatagggaagagacgacgataacatggacactgttttctaaatggatcagtatttttggtatatacacatgcttttactagtagaggagtatttattttcatttgtagcagccaaggaacttgtgcattccttatgaatcatgagaagaccatgaagatgcacacaaatttgcttgacttctgaccagtaataattagcgaaagaaagaaaatccagaaccatgaatcagcttgatagcagtaacaaatttgcttgacttctgacgagtaagaaattggcagcaagttcagcaggggccagactaataaatcagcttgatagcatccttgcagcggtgccttggactttggcggttagaagagagttttacagggaaccttccatcatcagttgctgacatagctcgaactcgacgtttcttcttcgccagttgcggctctggataaactcgaagctgacctatccaagttcgacgacgggcccttcttcctaggccaattcagcttggcggatgtagcgtacattacgattctggaaagggttcagatatactattcccatcttaggaactacgacatcgccgaaggcaggcccaacctccaggaattcatcgaggagatgaacaagattgaagcgtatgcgcagaccaagaacgatcctctgttcttgcttgatcttgccaagaaccatcttaagattgcctgaagatgtgacaaagcagcattagtccgttgatcggtggaagaccactcgtcagtgttgagttgaatgtttgatcaataaaatacggcatgttgttgctgactttggacttgcaaagttcactactgataataacacccatgtttcaacaagagtaatgggtacttttgggtatttggcacctgagtatgcagcatctggcaagctcacagaaaaatccgatgtattttctttcggagtcatgcttcttgagcttattactgggcggcgaccaattgacacaacccaattggcactgcttgttataagcacatatgtacttccatttgcatgttgtataatactaataccaattgcaaaattatagttattttttctacccttgttagttaataagcatatttgtggtcaataggttgtattcttattcttgtaaccgtgttaattaatgttatggacttgtagtcttgtattaccttgtgaatatatctgtccctgcctgccatgtgaacgtgcttagcctggaatttgtgatatgtacatatatccatgtgtttgaaatctgtattgtatgtgatattccgtgttgcatgtgatattatgtacgtctaat

SEQ ID NO: 76988 - DNA, 8386 bp, Zea Mays
caataatccaatttagcctgtattatttgtaacatgtatcacacctctaggttttgtgatctagccaccacctcatctttgctgcactccccatgagaagatcgcctctgcttctgttgtagctttgtatatcaacattttttggtcttaatgttatgtggtgggctttggacaaacataaagtttcaatgaagtgtgttggactcattaagaacatgtacaacaatgttgtgactaatgttcgaacaagtcatggggacacaaatgacttcccaattagaataagactacatcaagggtcaactttgagcccttactttttttgccttggtgacggatgaggtcacaaggggtatataaggggatatcctttggtgtatgccttttaaggaagatatagtgctaatagatgaaagtcgggcaggagtaaatagtaagggcttgtttgtttccatagtgctaaagtttagcacatgctaaagtttagcacctactaaacttttgctaaattttagcacttgagggctgtttgaatacaagtgctaaactttagcacaataccctaatcaatgcctaaacaagggaccatttttagcatagtttagcacctttggtggagctaaagtgctaaagggtgctaaactttagtgcaacacttttagccacaaagagacaagaatattgatgttagttcaagtagtgcctaggaaggacgtctttaggtatttagagtcaatgctacatagagacgagaatattgatgatgttagccatataatcaaagcagggtggatgaagtgccatcaagcatgtggcgttctatatgacaagagggtatcacaggagctaagagacaagttttataggacggcgattcgaccaactatattgtatggcacagaatcttggcctaaaaaagacaacatatttagtagataactgttgcgaaaatgtgtatgttgcggttgatttgtggccttacaagaagggattgagtctagattgattatatacgtgataggctgggggagcaccaattgaagaaaagattgttcaacatcggttgagatggtttggacatgtccatcggagacctctagaggcacccatgcatagtgggatcctatggcgcgatagcaataggaaaagaggaagaggaagactgaagttaataaggaaagaggcaataaattaagatttgaaaggatgaaatatgcccaatgtccttgaatagaagtgcatggaaaacaactatccatgtgctcgaacattgactgatgggttttgttaggttttaactctagtctatcccaacttgcttgggaccaaaatgctttattgtcgtcgttgttgtcatcatactcttcatccagtatgtcatgtggcagcatcaagcccagtctttcctcttcttcagcagtgagtcatcctgagggctgaggtagatcccaatccggcagttgtgccctgctcgttgtgactcctcccttgcggaatcatctccacccactacggtctgtgcactgcagatcgatcttcaggcaaccatcatgtccatcgtcgattccacctggatttgtcgtgtgctctcacccgtctgtctgtgtggggcctcttcatgcatcgacggcggcctaaatattgctcttcatgcatcgacgatggcctgaagattggtcaacgacgcacagaccgtagtgggtggatatgattttgcaggggaggagtcgcaacaagcgaggaatggctgtcagatttggatttacctctggatgacttgtactgctgaagaagaggaaggacaatgacttgctgctgctgcattacgtgctggatgaagaatgcgatgaagactaaaaacattctagatctagaaaactgcctcgagcagagacgatcctccttggggagcacagtgaagatgaaggtggtgagtggtgaatggatgcctgtatcacaaaacctagagttgtggtactatgttacaaatggggattgaattcgatgatgcattgaggcgcaatggggattatatagagtacataagagacacatgagagaaacccctagactaggagattacaccaaatacccttaagtattataccttcacaagtgtcactcatgttactcctgttttgggttaggttagggctctcttatatttacctgattacccctattgtaatgagcttggcccacctaactctatataatatactcccaaccctggattaaggttagggtttcccacatgctaacttggtgccagagctaggtcttattttgctcctctctctccctcactcctagccgtcagccaccttccctggacgccaagacctctcctcccaggccacaacccctcctcccgatcaccttccctggcctggcctcttagaccgccgcccctcctcccctctcggtccgcgccccatcgtcgtcgtccgggcgagcactcgacctctagcgtgtcgattgagctacggatcccgaccgcccgcactcgtctctgctcgcactccatgatgccggcctcctgtggccctatcgtggatcatctctctacagccgtcgggacgctccaaccgatggcgtggtttgtccatcttccccgctgccgggcggctcgcgaccctgccaccaccagccatcttccccgttgccggctcaggcttctccatgggtgaccgtggccccttctccagcctcccacttggtaccagcaggctctacacgaccaccatcggccccgctgttgccctacacagcaccaccaccagcggctacatcttctcaggctccgacaacatggcctccctcgccgtggccgctgatgagggcctgatcctcggtgcgctccctgctgcccccctttctgctgcctcgacggccctctacaccgccctcgcaagcgcgggcgtggcgcctccctttcacttccccagtatcaccaccgacatcgcctggccacctcccctgccgcgccagcccccgagccgttgcgctgaccctaactccgtcacggtccccgtgcctcccttggctctcttctcgcatcccttgtcttcggcgtcccctcctcccaccgactgggtcgccgactctagcgcctcgttccacaccactcccgacccagagctgtcgctttcccccacccccataaccccaccttcccttccttcgtcattgtcggcaaatgggtcgactctgcctgtcacctcagtaggtgacacggtccttcctggcacgttgtacctcaacaacatccttgttgcccccaacatcatccagaaccccctctcggtccgtcgcttcaccactgacaaacgtcgctctatggagtttgatccctaggggctcaccatacgggatcttaccactcgtgctgttgttgctcgctacgacagttccagccccctataccccattcgcttccccacccaaccttctttcgcccatgttgtccaaccctacgttgttgcctccacttccccaacttccacttggcactgttgtcttggccacccaggccatgacgtcctctcttgactctcgaccattccttgccctcgcggcgacaccacctcgctttgccatacctatcggcttgggcatcatactcgcttactcttctattcttccatatcccgagctactcaccccttcgacctcatccactgtgacctttggacatcccatgttcccatctactccacctctcgctcctttctctcccacagcgttcagttcgactctcgtgcccctacacttcccctctgaacggccaggccaaacggattatttgcaccaccactaacatgatctgttgcatcatattttaggtgtctcttcctgccaactattgggcagaggccctgaacactgctacccatctcctcaaccgccttccctccaagccggtgagtcaccccacccccacttcaccctgtatggcacaacccccttctatgcccaccttcgtgtttttggtcgtgcatgctatcccaacaatttcgccactgctcctcacaaattctcccctcgctccactcgtcttttcctcggttactgccatgaccacaaggggtactgatgccttgatctcctcacccactgcatcatctcattattctctcctcgacaccgattgcgtcgatgtttctcttccgctgccctctttcattccgcccatggccacgtcgcctttgactgtgctccgcatgtccccgctgcctctgcctcttcctgtgccgcctgcaccacacgcggccccgttgacccctcccgcgcccccgtcgactccgcccgcgcctaggggtggtaatggaccgcgatccaaatgtttcttcacagattgttagggccctaaattaattttagttaaaaaatgaacaagaatagagcctgatcctaatccaatccgattctttaaattttattgtgtaaaatttagagcccattgtcatccctacccgcgccacgaccccgtcgacctcgcctgcgctacgcgggaccaggggcgacggcaaggggggcaatgtcccccctaatgctctaattctataggagctattagttttttagctaattctcatgtaaatgatgcaaaaaatccttctaacacccctagtctaatttgcccccctaatatcatatcctagcttcgcccccggcgctacctcgtcgccctcacatgcgccatgtgtggccccgtcacctgcgtcccaaccgacacgtttcgccgaccacactcgcgtttaccaccgccgcgggtggactgatccaccggtcctacccaccccaccggttcgttcctgtgctgagccgccggtgtaccactcggtcgccattcaccgcgaccccggccacttccacccgatggtgacgtgtcgctcggccgacatccttctcgtcggtcggctggttctgacgactgatgccgcttcggctacctccctggttccctcctccgttcacgccggtctcgccgatacccactagcgccgcgccatggaagaggagtaggcgaccctaatggccaaccacacttgggacctagtgccacgtccatccggcaccaacgtggtcaccgtcaagtggatcttctgccataagctcacctccgatggctcgctcgaccgctacaaggctcgttgggtccttttagggcttcactcaatgccttggagtggactacgacaagacctttagccccatcgtcaagtttcctaccattcgagctattctctccctcaccctctctcggaattaggtggtccatcaactcgacgtcaagaatgccttcctccacgacactctaacaaagacgatctactgtagccagctcatcggctttgtcgactccgctcgcccggatctggtctaccggttgaaccgctccctgtacggcctcaagcaggtgccaatgtcttgggacagtcgtttcacctcctacttggtctcacttggcttcgtcgagaccaaatctgacacgtccctattcatccattggcacgggacgacaccgtctacctaacgacttcgtgctcacggtgtctagggctgcccttcctcagcgcacgatcgtcacccttcagtgtgagtttgcgatgaaaaacctagggcctctccaccactttttcgagatcatcgcagagcggtggcctcaggatctcttcctccaccagtgctagtacgccctcgacatcctggagcgggctgtcatgtccaactgaagccctgctccacgcctgtcgacactcaggcgaagctcttcgtggacgacggacccccggtcgccgacgcgacggcctactggagcctcatcgatgctctccagtatctgacattctcccgacttgacatcacctacgccgttcagcaggtgtgccttcacatgcacacctcacaggagccccacctcaccgttcttaagcggattcttcgctacctccgaggctccatcgactatatccttctccttcgaccctcaccgacttcggagctcgtgggtctacaccgacgctgactaggctgggtgcctcgacacgtgacgatccacatccggttatgtcgtgttcttgggcgctaacctcgtctcctgggcctcaaagcggcaacctgtcgtctcctgctctagcgttgaggacgagtactgctatggccaacgacgtggtcgaggcctcctggctccaccagcttctccaggagctccacaaccccctcgagcgctccaccctcgtctactgcgacaacgtcagcgcagtctacctctccaccagtcatgtactacatcagcgcacaaagcatgtggagattgatctttacttcacccgtgagtgtgtcgccaccggtgatgttcgcgttctcagcgtctcgaccacgtcgcagttcgatgacatcttcactaaggggctatcgtcgagtgtattcattgagtttcgctgcagtctcaacatcggtacatgatagagttgagactgcggggagggggtgttagactccttgttagacatctgtacatgatacctgatgacccatattgtaatgggcttggctcatctaacttctctatataataatactcccaaccctggattagggttagggtttcccacattctaactacgcaaactgacatatttgttatttttctgctgtttctccttcagttggctgacatcaccattcccccaattgactactctcgaaacatttccagttactatagctgatcaatgaatgttacgtgcttcccttgattttcggtactcagggacaaatgactgggaaagactgaattactttatggtgtgatggagaaaacacttagcttgcttcagatgggctttaccgaggaagaggtatcatcagctattgacaattttgaccagagagcaactgttcaggagctggctgactcaattttggcaaggcgaatagccaatagcattgagcagaaagagataaaagttgaatctgacttcctagacgaggcagaaactgattattcttcataccagccctcatactctgatatgacataggggcctccagtagtcaccttggcgatccatggtctatggggcagcgtgcagggacaaatgatatgtctgttaaggtagaactggaggcaatgacaccaggtcgccgtgcaaatgtacaaggtgaccttgctaaacccccatttttcctatatggaaatgtggttgaggttccaaaagacacatggcatcaactcaaacaattcttatataatgtggagcctgagtttgtgaacagtcagtccttctccgctctaactcgaagggaaggttacattcacaaccttccagtggagaaaagaagtgtcgtggttccaaagtctccaatgactattgaagaagcacttccattcactcgacagtggtggccatcatgggatacaagaaaacatatcagtgttattactacagaggctgcagggattgagcagacatgtgaaagattggggggcatggttagagagtcaagaggagtgctttcacaagcaagacaaatgcagattatacaccagtgcagggtttcaaaccttatttgggtcggtcgggacaggttaggccctttggagcctcgtcaagtggaaaagatactaggttacccttataaccacacaaatttgtttgaattaaaccaacctgatcgacttgctgccatgaaatatgcattccagactgatacattgtcatatcttttatcagtcctgaaaggtaagtatcaagatggaataagagtgttatccatctacagtggcattggaggtgcagaagtagcacttcatcgtctaggcatccctttgaaatgtgtgatatctgttgaggaatctgaggtgaatagaaaaattctaagaaggtggtggttgaaaactgaacaaactggagtactaaggcaacatgcaggaatttggaagctcaaaacacatgtgattgaagacttggtgaaagagtttggtggttttgatctgattatcggtgggaattatacttcttgcaaaggtggtactacagtaaatacgacaatgggcatggattcgaaccgcttctatgagtataaccgtgttgtcaaaagggtaaggactgcagttggactcagttgaagagtccatctttaatgaagatcgcacgtcttcataaaactagcctgtaggaggatatagaatcatctgatccgtaaatgtaggatgctacaagtaaactttacaagtcttgggacttgattattgcaagcaattgacttatcctttattttggtttgtgtttgttggtcacttctaatgtttgataatcattctgcgttactcctttcaaagttgtgggttaaaatctttcattgctgcctgtttgct

SEQ ID NO: 76989 - DNA, 3245 bp, Zea Mays
atcaccacgatccacgaagacggccacgagggtgtccaccgcacgctgcaccgtatccgacacgacttccacttgcctagcatgtgtcgcctggtctaggacttcgtccgctcgtgcgcgacatgccagcggtacaagtccgaacacttgcacctcgccggactactacaaccgctgccagtgccctccatcgtctaggccgacatcgccatggactttgtcgaagcgcttccccgcgtgcacgggaagacgaccatcctctccatcgtcgaccgcttcagcaagtctgcctccacgggattccacagtccatcgtctccgaccgggaccccgtcttcacgtcgacattttggagcgagctcatgcgcctctcaggcaccaagctcctcatgtcatcggcgttccacccgcagacggatggccagacggaggcggcaaacagggtcatcatcatgtacctcaggtgtttcaccggcgatcgccattggcaatggttgcgttggctcccctgggcagagtatacatataacaccgcctaccagtcgtccctgcaggagacgccattccgggtggtctacgaccgcaaaccccctaccatccgatcctatgagcccgggacacgcgcgtcgccgcggtcgcacaagacatggaggcccgggagtccttcctcgccgacatccgttatcgcctccatcaggctcaagaggtgcagaagcgccactacgatcggcttcatcggctggtcgcctaccaggtgggcgagtgggtgctgctgcgcctacgccaacgccaggccgcctctctgccgcgcaccactacaggaaagctcaagccatgctacgtcggtccctaccgcatcgtcgagctcgtcaacgacgtcgccgttcgattggaattgccaccaggagcacagcttcatgatgtgtttcatgttggagtggtcaagaggtttattggcacgccaccggctacgcctcccgccctgcccaccatcctccatggcgcggtgctgcccgaacctgaccgggtggtgaactcatgtctggcgcgcgacgttcgccagctgctcgtccattggcgcgatgaaccagctacctcgactacaatggaagacctcaacgatttccgaaaccgctacccggacattcagctcgaggacgagctgaatcttgaggggggggagatgtcatgtgcggtcgcacatatacgcgccgcaggcgtgcgcgcgatgtttgccgcgccacggaacgtgccgcgcgtgagctggaacagcaaggcaatggataagtagaaagttgggattagttgccttgttggttacctagaatttaggagtgattagctccatattagttaccttgttggttacctagaatttaggagtgattagctccttgcggttcagatttggacctatatattgtattcggttggatgaggaaagtaagcagaaattactaccaatctaatctctcctctctctctctctcatgtcagcgcctagggggaataacctaggcatcaacctgagcgacgacgtgggggaataaccccgccggcgaccacagaacacgactacgatctccgtagccgcggttcagttaccctcggaccggaggtccttgacagtttcccccttgagcgtctcatggaaagactgaattactttatggtgtgatggagaaaacacttagcttgcttcagatgggctttaccgaggaagaggtatcatcagctattgacaattttgaccagagagcaactgttcaggagctggctgactcaattttggcaaggcgaatagccaatagcattgagcagaaagagataaaagttgaatctgacttcctagacgaggcagaaactgattattcttcataccagccctcatactctgatatgacataggggcctccagtagtcaccttggcgatccatggtctatggggcagcgtgcagggacaaatgatatgtctgttaaggtagaactggaggcaatgacaccaggtcgccgtgcaaatgtacaaggtgaccttgctaaacccccatttttcctatatggaaatgtggttgaggttccaaaagacacatggcatcaactcaaacaattcttatataatgtggagcctgagtttgtgaacagtcagtccttctccgctctaactcgaagggaaggttacattcacaaccttccagtggagaaaagaagtgtcgtggttccaaagtctccaatgactattgaagaagcacttccattcactcgacagtggtggccatcatgggatacaagaaaacatatcagtgttattactacagaggctgcagggattgagcagacatgtgaaagattggggggcatggttagagagtcaagaggagtgctttcacaagcaagacaaatgcagattatacaccagtgcagggtttcaaaccttatttgggtcggtcgggacaggttaggccctttggagcctcgtcaagtggaaaagatactaggttacccttataaccacacaaatttgtttgaattaaaccaacctgatcgacttgctgccatgaaatatgcattccagactgatacattgtcatatcttttatcagtcctgaaaggtaagtatcaagatggaataagagtgttatccatctacagtggcattggaggtgcagaagtagcacttcatcgtctaggcatccctttgaaatgtgtgatatctgttgaggaatctgaggtgaatagaaaaattctaagaaggtggtggttgaaaactgaacaaactggagtactaaggcaacatgcaggaatttggaagctcaaaacacatgtgattgaagacttggtgaaagagtttggtggttttgatctgattatcggtgggaattatacttcttgcaaaggtggtactacagtaaatacgacaatgggcatggattcgaaccgcttctatgagtataaccgtgttgtcaaaagggtaaggactgcagttggactcagttgaagagtccatctttaatgaagatcgcacgtcttcataaaactagcctgtaggaggatatagaatcatctgatccgtaaatgtaggatgctacaagtaaactttacaagtcttgggacttgattattgcaagcaattgacttatcctttattttggtttgtgtttgttggtcacttctaatgtttgataatcattctgcgttactcctttcaaagttgtgggttaaaatctttcattgctgcctgtttgct

SEQ ID NO: 76990 - DNA, 2313 bp, Zea Mays
acgtgcagccgaacaaagccgcgggcgctgctgttgcgttttgttcccactaccgtccgccacagcctacgcaccttgccggctcgcgggggttttgccgtgcgccttctccctcctcctcgctcgcggcgacgaccgggggaccgcagccaccgtacgccaggtgcgcaggtcttctttgggcccgtcgccggcgacgagcacccaccaggggcgtccgagtctggaatcctatctgatcggaaaatggttaaggtcgaagatcaggccgaggacggcggcgcagatgctgatgccaggggtctcagggagtctgctctggatccgctgcctgtctcggtgcatgccagcttgaaggaggaggaaggtcaaccaagttcttcatctggtaaactaagatcacagtttattggaatggggttttcatccaagctggtagacaaggttctccagagacatggtgatgatgattctaacacaattttggaatctcttctgtcctattctgaccttcagcagtctggatcagagtcatcagattctttcggaagtttttttgataatgataatgaagagaacaattctccttcagagtctaggaaaggaatctaccaagacatcaagccagagcttgattctttctcagagaagtggtcatttttactcagaacaatgaacttttcacaacaagaagttgatttagccttcaagcaactagggaaagactgaattactttatggtgtgatggagaaaacacttagcttgcttcagatgggctttaccgaggaagaggtatcatcagctattgacaattttgaccagagagcaactgttcaggagctggctgactcaattttggcaaggcgaatagccaatagcattgagcagaaagagataaaagttgaatctgacttcctagacgaggcagaaactgattattcttcataccagccctcatactctgatatgacataggggcctccagtagtcaccttggcgatccatggtctatggggcagcgtgcagggacaaatgatatgtctgttaaggtagaactggaggcaatgacaccaggtcgccgtgcaaatgtacaaggtgaccttgctaaacccccatttttcctatatggaaatgtggttgaggttccaaaagacacatggcatcaactcaaacaattcttatataatgtggagcctgagtttgtgaacagtcagtccttctccgctctaactcgaagggaaggttacattcacaaccttccagtggagaaaagaagtgtcgtggttccaaagtctccaatgactattgaagaagcacttccattcactcgacagtggtggccatcatgggatacaagaaaacatatcagtgttattactacagaggctgcagggattgagcagacatgtgaaagattggggggcatggttagagagtcaagaggagtgctttcacaagcaagacaaatgcagattatacaccagtgcagggtttcaaaccttatttgggtcggtcgggacaggttaggccctttggagcctcgtcaagtggaaaagatactaggttacccttataaccacacaaatttgtttgaattaaaccaacctgatcgacttgctgccatgaaatatgcattccagactgatacattgtcatatcttttatcagtcctgaaaggtaagtatcaagatggaataagagtgttatccatctacagtggcattggaggtgcagaagtagcacttcatcgtctaggcatccctttgaaatgtgtgatatctgttgaggaatctgaggtgaatagaaaaattctaagaaggtggtggttgaaaactgaacaaactggagtactaaggcaacatgcaggaatttggaagctcaaaacacatgtgattgaagacttggtgaaagagtttggtggttttgatctgattatcggtgggaattatacttcttgcaaaggtggtactacagtaaatacgacaatgggcatggattcgaaccgcttctatgagtataaccgtgttgtcaaaagggtaaggactgcagttggactcagttgaagagtccatctttaatgaagatcgcacgtcttcataaaactagcctgtaggaggatatagaatcatctgatccgtaaatgtaggatgctacaagtaaactttacaagtcttgggacttgattattgcaagcaattgacttatcctttattttggtttgtgtttgttggtcacttctaatgtttgataatcattctgcgttactcctttcaaagttgtgggttaaaatctttcattgctgcctgtttgct

SEQ ID NO: 76991 - DNA, 2373 bp, Zea Mays
acgtgcagccgaacaaagccgcgggcgctgctgttgcgttttgttcccactaccgtccgccacagcctacgcaccttgccggctcgcgggggttttgccgtgcgccttctccctcctcctcgctcgcggcgacgaccgggggaccgcagccaccgtacgccaggtgcgcaggtcttctttgggcccgtcgccggcgacgagcacccaccaggggcgtccgagtctggaatcctatctgatcggaaaatggttaaggtcgaagatcaggccgaggacggcggcgcagatgctgatgccaggggtctcagggagtctgctctggatccgctgcctgtctcggtgcatgccagcttgaaggaggaggaaggtcaaccaagttcttcatctggtaaactaagatcacagtttattggaatggggttttcatccaagctggtagacaaggttctccagagacatggtgatgatgattctaacacaattttggaatctcttctgtcctattctgaccttcagcagtctggatcagagtcatcagattctttcggaagtttttttgataatgataatgaagagaacaattctccttcagagtctaggaaaggaatctaccaagacatcaagagcttgattctttctcagagaagtggtcatttttactcagaacaatgaacttttcacaacaagaagttgatttagccttcaagcaactagggaaagactgaattactttatggtgtgatggagaaaacacttagcttgcttcagatgggctttaccgaggaagaggtatcatcagctattgacaattttgaccagagagcaactgttcaggagctggctgactcaattttggcaaggcgaatagccaatagcattgagcagaaagagataaaagttgaatctgacttcctagacgaggcagaaactgattattcttcataccagccctcatactctgatgtaagctattatgacgatgacaacaacaatacacgggttaaaagggctaagcatatatttatagatgacataggggcctccagtagtcaccttggcgatccatggtctatggggcagcgtgcagggacaaatgatatgtctgttaaggtagaactggaggcaatgacaccaggtcgccgtgcaaatgtacaaggtgaccttgctaaacccccatttttcctatatggaaatgtggttgaggttccaaaagacacatggcatcaactcaaacaattcttatataatgtggagcctgagtttgtgaacagtcagtccttctccgctctaactcgaagggaaggttacattcacaaccttccagtggagaaaagaagtgtcgtggttccaaagtctccaatgactattgaagaagcacttccattcactcgacagtggtggccatcatgggatacaagaaaacatatcagtgttattactacagaggctgcagggattgagcagacatgtgaaagattggggggcatggttagagagtcaagaggagtgctttcacaagcaagacaaatgcagattatacaccagtgcagggtttcaaaccttatttgggtcggtcgggacaggttaggccctttggagcctcgtcaagtggaaaagatactaggttacccttataaccacacaaatttgtttgaattaaaccaacctgatcgacttgctgccatgaaatatgcattccagactgatacattgtcatatcttttatcagtcctgaaaggtaagtatcaagatggaataagagtgttatccatctacagtggcattggaggtgcagaagtagcacttcatcgtctaggcatccctttgaaatgtgtgatatctgttgaggaatctgaggtgaatagaaaaattctaagaaggtggtggttgaaaactgaacaaactggagtactaaggcaacatgcaggaatttggaagctcaaaacacatgtgattgaagacttggtgaaagagtttggtggttttgatctgattatcggtgggaattatacttcttgcaaaggtggtactacagtaaatacgacaatgggcatggattcgaaccgcttctatgagtataaccgtgttgtcaaaagggtaaggactgcagttggactcagttgaagagtccatctttaatgaagatcgcacgtcttcataaaactagcctgtaggaggatatagaatcatctgatccgtaaatgtaggatgctacaagtaaactttacaagtcttgggacttgattattgcaagcaattgacttatcctttattttggtttgtgtttgttggtcacttctaatgtttgataatcattctgcgttactcctttcaaagttgtgggttaaaatctttcattgctgcctgtttgct

SEQ ID NO: 76992 - DNA, 2275 bp, Zea Mays
acgtgcagccgaacaaagccgcgggcgctgctgttgcgttttgttcccactaccgtccgccacagcctacgcaccttgccggctcgcgggggttttgccgtgcgccttctccctcctcctcgctcgcggcgacgaccgggggaccgcagccaccgtacgccaggtgcgcaggtcttctttgggcccgtcgccggcgacgagcacccaccaggttaaggtcgaagatcaggccgaggacggcggcgcagatgctgatgccaggggtctcagggagtctgctctggatccgctgcctgtctcggtgcatgccagcttgaaggaggaggaaggtcaaccaagttcttcatctggtaaactaagatcacagtttattggaatggggttttcatccaagctggtagacaaggttctccagagacatggtgatgatgattctaacacaattttggaatctcttctgtcctattctgaccttcagcagtctggatcagagtcatcagattctttcggaagtttttttgataatgataatgaagagaacaattctccttcagagtctaggaaaggaatctaccaagacatcaagccagagcttgattctttctcagagaagtggtcatttttactcagaacaatgaacttttcacaacaagaagttgatttagccttcaagcaactagggaaagactgaattactttatggtgtgatggagaaaacacttagcttgcttcagatgggctttaccgaggaagaggtatcatcagctattgacaattttgaccagagagcaactgttcaggagctggctgactcaattttggcaaggcgaatagccaatagcattgagcagaaagagataaaagttgaatctgacttcctagacgaggcagaaactgattattcttcataccagccctcatactctgatatgacataggggcctccagtagtcaccttggcgatccatggtctatggggcagcgtgcagggacaaatgatatgtctgttaaggtagaactggaggcaatgacaccaggtcgccgtgcaaatgtacaaggtgaccttgctaaacccccatttttcctatatggaaatgtggttgaggttccaaaagacacatggcatcaactcaaacaattcttatataatgtggagcctgagtttgtgaacagtcagtccttctccgctctaactcgaagggaaggttacattcacaaccttccagtggagaaaagaagtgtcgtggttccaaagtctccaatgactattgaagaagcacttccattcactcgacagtggtggccatcatgggatacaagaaaacatatcagtgttattactacagaggctgcagggattgagcagacatgtgaaagattggggggcatggttagagagtcaagaggagtgctttcacaagcaagacaaatgcagattatacaccagtgcagggtttcaaaccttatttgggtcggtcgggacaggttaggccctttggagcctcgtcaagtggaaaagatactaggttacccttataaccacacaaatttgtttgaattaaaccaacctgatcgacttgctgccatgaaatatgcattccagactgatacattgtcatatcttttatcagtcctgaaaggtaagtatcaagatggaataagagtgttatccatctacagtggcattggaggtgcagaagtagcacttcatcgtctaggcatccctttgaaatgtgtgatatctgttgaggaatctgaggtgaatagaaaaattctaagaaggtggtggttgaaaactgaacaaactggagtactaaggcaacatgcaggaatttggaagctcaaaacacatgtgattgaagacttggtgaaagagtttggtggttttgatctgattatcggtgggaattatacttcttgcaaaggtggtactacagtaaatacgacaatgggcatggattcgaaccgcttctatgagtataaccgtgttgtcaaaagggtaaggactgcagttggactcagttgaagagtccatctttaatgaagatcgcacgtcttcataaaactagcctgtaggaggatatagaatcatctgatccgtaaatgtaggatgctacaagtaaactttacaagtcttgggacttgattattgcaagcaattgacttatcctttattttggtttgtgtttgttggtcacttctaatgtttgataatcattctgcgttactcctttcaaagttgtgggttaaaatctttcattgctgcctgtttgct

SEQ ID NO: 76993 - DNA, 2309 bp, Zea Mays
acgtgcagccgaacaaagccgcgggcgctgctgttgcgttttgttcccactaccgtccgccacagcctacgcaccttgccggctcgcgggggttttgccgtgcgccttctccctcctcctcgctcgcggcgacgaccgggggaccgcagccaccgtacgccaggtgcgcaggtcttctttgggcccgtcgccggcgacgagcacccaccaggggcgtccgagtctggaatcctatctgatcggaaaatggttaaggtcgaagatcaggccgaggacggcggcgcagatgctgatgccaggggtctcagggagtctgctctggatccgctgcctgtctcggtgcatgccagcttgaaggaggaggtcaaccaagttcttcatctggtaaactaagatcacagtttattggaatggggttttcatccaagctggtagacaaggttctccagagacatggtgatgatgattctaacacaattttggaatctcttctgtcctattctgaccttcagcagtctggatcagagtcatcagattctttcggaagtttttttgataatgataatgaagagaacaattctccttcagagtctaggaaaggaatctaccaagacatcaagccagagcttgattctttctcagagaagtggtcatttttactcagaacaatgaacttttcacaacaagaagttgatttagccttcaagcaactagggaaagactgaattactttatggtgtgatggagaaaacacttagcttgcttcagatgggctttaccgaggaagaggtatcatcagctattgacaattttgaccagagagcaactgttcaggagctggctgactcaattttggcaaggcgaatagccaatagcattgagcagaaagagataaaagttgaatctgacttcctagacgaggcagaaactgattattcttcataccagccctcatactctgatatgacataggggcctccagtagtcaccttggcgatccatggtctatggggcagcgtgcagggacaaatgatatgtctgttaaggtagaactggaggcaatgacaccaggtcgccgtgcaaatgtacaaggtgaccttgctaaacccccatttttcctatatggaaatgtggttgaggttccaaaagacacatggcatcaactcaaacaattcttatataatgtggagcctgagtttgtgaacagtcagtccttctccgctctaactcgaagggaaggttacattcacaaccttccagtggagaaaagaagtgtcgtggttccaaagtctccaatgactattgaagaagcacttccattcactcgacagtggtggccatcatgggatacaagaaaacatatcagtgttattactacagaggctgcagggattgagcagacatgtgaaagattggggggcatggttagagagtcaagaggagtgctttcacaagcaagacaaatgcagattatacaccagtgcagggtttcaaaccttatttgggtcggtcgggacaggttaggccctttggagcctcgtcaagtggaaaagatactaggttacccttataaccacacaaatttgtttgaattaaaccaacctgatcgacttgctgccatgaaatatgcattccagactgatacattgtcatatcttttatcagtcctgaaaggtaagtatcaagatggaataagagtgttatccatctacagtggcattggaggtgcagaagtagcacttcatcgtctaggcatccctttgaaatgtgtgatatctgttgaggaatctgaggtgaatagaaaaattctaagaaggtggtggttgaaaactgaacaaactggagtactaaggcaacatgcaggaatttggaagctcaaaacacatgtgattgaagacttggtgaaagagtttggtggttttgatctgattatcggtgggaattatacttcttgcaaaggtggtactacagtaaatacgacaatgggcatggattcgaaccgcttctatgagtataaccgtgttgtcaaaagggtaaggactgcagttggactcagttgaagagtccatctttaatgaagatcgcacgtcttcataaaactagcctgtaggaggatatagaatcatctgatccgtaaatgtaggatgctacaagtaaactttacaagtcttgggacttgattattgcaagcaattgacttatcctttattttggtttgtgtttgttggtcacttctaatgtttgataatcattctgcgttactcctttcaaagttgtgggttaaaatctttcattgctgcctgtttgct

SEQ ID NO: 76994 - DNA, 3126 bp, Zea Mays
gcttgtccgttagttgctgctcccagttcagtaggccctctccataccacagcgcagcgtcagagatcccactacttcttgtttctagtctagtataaataaatgtgcatccaagtcactgatcaggagcaccaagccagctagcaactcaaaggaggaagactagaagatatatagccttctccttgtgtgacactcataaataaactgttagcagcttgcgagcactgcaagatctttctgctggcatctgaatagtcagctgctggcatctatccgggcacctctcgaccagccagaggcaggtgattttcatttcccatgcatctatccggtcactctgcatagtagtgctcctctctgtccttctcatatctaacttactctccatatacctgatcccaaactagctggccaacatggcgaacgatgaccctgtggacgacgaaaaccccagatccaacaccactaataacagcatcaatgacaagttggctgaagtgttcgacatggtctcagtccacaaacatcagtataaaatgccgacgttcgccttccacaccaacaagacgatcaccgaagctttacatcggcctctactgcgagcacaagctagcatggcctctccaccagaggttgactcgtatgtctgttttctggtttctcataccagaattaacgttcttgaccttgtaaggcctcttcttgaccttgatcagtcccgatattgccgtgtttgccagccttctgcatccacctactttctgttcccttctatccctcctgagctaattgttgctcctatgtaatccgtgtttattatttcggtaccatgatgatgaaattagttttaatttattgtaagactagttcagttaatgttttcaccctgtggatgctctgcaatacatgaacatacatatgcaaacactcattcatccatttattttttattaaacaccatcaagtttttaaaaagagagacatgtacagtacaatcacccaaggacaattttagcaactagccccaatacattttagataattgaaaaagggtctctagctcagatgaccttatcacaactcaacgcatcgaagcaaaagagtttttgaagacaaagataatcgaagtcctgattctaaataatgaaagtcatgcataggatgcaaagagttgcattgttgtgatctctagagcctagcaaggcccaaccatgagcacttgttgaccttcacacgattgcaattgccaactaggcatagaaccgactctagtgggtatgtctgaatataaccccccaaagatatttgtgacgataaacaaagcagcccctacttttgatttgtgtctcctacttgttagtactctgtttttaggataactgtaatatataggattccaaaatcatgacccctatttttattggactcatttggtagtcacatatatttcatttatttttattcccatattctattttaggataattgtaatatataggatggaggacatggaggctatgctcgggataagggctagtagcgagacttagccagggaaggacggtgtcgtgtggatggcaagttcatggtaggataatcaattggaaggttgaactcaaatggatggccacctaggaacacctaagcgttggaggcgaggatgatgacaacaaatgccacatcccaatgttcattccaacttgaatttttcaataacatctctttgaagcttgcaatctcaccaatttcttcctgaaaatctaactaaaatactcgatacattacactatatgtttgtctcactagctttgttgtttgaaggttctttgtcatttgtagtttgactctcagtgcccatctatttggtaggttttggtcatgtttatttagcaggtcttggtcaggtgaagcctttttggaccttcaccactatggaacccgatgccttagagttggacatgtctttgtctaataaaggcctttggacctttgtcattatgtaacttgatgcttgagagttagatagttttcatcgagcgaaggttttgtacatgcgaacacaaggttgacctgacccttgtggttcgtgttgatgatgagtgattgtcaatgggtagtgtcttaggtcgagtcaaggactgacccataagattatgtatgtgcaaccatgtcggtcggcttctggtatgcaagtgtggagcacagggatggtggtcgatggctaaggtaaaggtcatgtgggcttgtgctgatggacagggagcggtgaagaacgagtgatgggtcttggctcctgggacacacacttgcgcgaggatgtggcaaagcagtccatgtttcttacgcgatcgaggactagcagcacacgtgtctaggatgtggagtacgtgcacgtggtgcgatacttatgtcggtttagtggttgagcctcaaaaccacccaacactacagacatcgagtttttaactgggtttagcctcaaacccggtggtggcagtttcggtggaaactggaggtaacacatggcatgatcatggagggtgcatcaaggcaaagcaacctcgtgtgaaggatatggccgtcagatgaaaactccaggagttggtccattttgccccggtggagtggataggctctatgtaaataggggtagtttaggaaatggaaataaccctatataaatagagtggagggctggttagttcaaaatctctttcgatgccatttgttttgatcacttgttttaaaactcctagttttcctctctaggtagtcaccagtttagctgggagatccacaacaattttgttctatcaactatgcctataatctgcaacgattaatccgaggaagggtcgctagtttggcccacatgttttggttggcttcaatctcagttttgttcccttgctgaatttttgaagtcgtgtgttcttgagttcttcccttcccttctattgaggatttgtggagaaccttcgagttcttgtgatatgggtgttgttagggattgatttgttaggagatagactctttggatcactgcgtactcccacacagtgcagttcttggtcgtgatttgagttcattcctctttcagctcatttttagaaaacctgaaca

SEQ ID NO: 76995 - DNA, 3040 bp, Zea Mays
gcttgtccgttagttgctgctcccagttcagtaggccctctccataccacagcgcagcgtcagagatcccactacttcttgtttctagtctagtataaataaatgtgcatccaagtcactgatcaggagcaccaagccagctagcaactcaaaggaggaagactagaagatatatagccttctccttgtgtgacactcataaataaactgttagcagcttgcgagcactgcaagatctttctgctggcatctgaatagtcagctgctggcatctatccgggcacctctcgaccagccagaggcagatacctgatcccaaactagctggccaacatggcgaacgatgaccctgtggacgacgaaaaccccagatccaacaccactaataacagcatcaatgacaagttggctgaagtgttcgacatggtctcagtccacaaacatcagtataaaatgccgacgttcgccttccacaccaacaagacgatcaccgaagctttacatcggcctctactgcgagcacaagctagcatggcctctccaccagaggttgactcgtatgtctgttttctggtttctcataccagaattaacgttcttgaccttgtaaggcctcttcttgaccttgatcagtcccgatattgccgtgtttgccagccttctgcatccacctactttctgttcccttctatccctcctgagctaattgttgctcctatgtaatccgtgtttattatttcggtaccatgatgatgaaattagttttaatttattgtaagactagttcagttaatgttttcaccctgtggatgctctgcaatacatgaacatacatatgcaaacactcattcatccatttattttttattaaacaccatcaagtttttaaaaagagagacatgtacagtacaatcacccaaggacaattttagcaactagccccaatacattttagataattgaaaaagggtctctagctcagatgaccttatcacaactcaacgcatcgaagcaaaagagtttttgaagacaaagataatcgaagtcctgattctaaataatgaaagtcatgcataggatgcaaagagttgcattgttgtgatctctagagcctagcaaggcccaaccatgagcacttgttgaccttcacacgattgcaattgccaactaggcatagaaccgactctagtgggtatgtctgaatataaccccccaaagatatttgtgacgataaacaaagcagcccctacttttgatttgtgtctcctacttgttagtactctgtttttaggataactgtaatatataggattccaaaatcatgacccctatttttattggactcatttggtagtcacatatatttcatttatttttattcccatattctattttaggataattgtaatatataggatggaggacatggaggctatgctcgggataagggctagtagcgagacttagccagggaaggacggtgtcgtgtggatggcaagttcatggtaggataatcaattggaaggttgaactcaaatggatggccacctaggaacacctaagcgttggaggcgaggatgatgacaacaaatgccacatcccaatgttcattccaacttgaatttttcaataacatctctttgaagcttgcaatctcaccaatttcttcctgaaaatctaactaaaatactcgatacattacactatatgtttgtctcactagctttgttgtttgaaggttctttgtcatttgtagtttgactctcagtgcccatctatttggtaggttttggtcatgtttatttagcaggtcttggtcaggtgaagcctttttggaccttcaccactatggaacccgatgccttagagttggacatgtctttgtctaataaaggcctttggacctttgtcattatgtaacttgatgcttgagagttagatagttttcatcgagcgaaggttttgtacatgcgaacacaaggttgacctgacccttgtggttcgtgttgatgatgagtgattgtcaatgggtagtgtcttaggtcgagtcaaggactgacccataagattatgtatgtgcaaccatgtcggtcggcttctggtatgcaagtgtggagcacagggatggtggtcgatggctaaggtaaaggtcatgtgggcttgtgctgatggacagggagcggtgaagaacgagtgatgggtcttggctcctgggacacacacttgcgcgaggatgtggcaaagcagtccatgtttcttacgcgatcgaggactagcagcacacgtgtctaggatgtggagtacgtgcacgtggtgcgatacttatgtcggtttagtggttgagcctcaaaaccacccaacactacagacatcgagtttttaactgggtttagcctcaaacccggtggtggcagtttcggtggaaactggaggtaacacatggcatgatcatggagggtgcatcaaggcaaagcaacctcgtgtgaaggatatggccgtcagatgaaaactccaggagttggtccattttgccccggtggagtggataggctctatgtaaataggggtagtttaggaaatggaaataaccctatataaatagagtggagggctggttagttcaaaatctctttcgatgccatttgttttgatcacttgttttaaaactcctagttttcctctctaggtagtcaccagtttagctgggagatccacaacaattttgttctatcaactatgcctataatctgcaacgattaatccgaggaagggtcgctagtttggcccacatgttttggttggcttcaatctcagttttgttcccttgctgaatttttgaagtcgtgtgttcttgagttcttcccttcccttctattgaggatttgtggagaaccttcgagttcttgtgatatgggtgttgttagggattgatttgttaggagatagactctttggatcactgcgtactcccacacagtgcagttcttggtcgtgatttgagttcattcctctttcagctcatttttagaaaacctgaaca

SEQ ID NO: 76996 - DNA, 1370 bp, Zea Mays
gttagaagttcgaacattttcggagatacccaagacaatgccatatgcaaaaggaatgcaaattgaagtttccaagttgggaagacaattctgttgttgcttggtcacctgcagttgtcgcaaagactatctggaagaataacctattagtcgactacactctttcaaagtgttacggtactacattgtctgaggagattgttgatgtgaagcatgtgaggccttgcccaccacaagcatcagagattagtttctgcatcaatgatgaggttgaagcattccaaggtgattgctggtggctaggggtgattactaatgttcttccagaattcaagtacacatttaagtcaacgcatttagggacggaagttgaggtgaaccagaaatttctgaggcttcgatatgactgggttggtgatcaatgggaacaagaatcaaagaatgtgcccaaggcaaaatttacacaaggtgtcaaggttgaagtctgcagcgacgatgaaggttttcgtggagcctggttcgaggcgactgttgttaaagctgtcggcagcaagttcctcgtggagtatgctacgctgaaggccgatgacgggaccaagcctctgaaagaatctgtagaagcacggcacatcagaccttgccctccagatatccctgccactgatggattcaaactacttgacgaggtcgatgccttctgcaacgacgcgtggtgggtcggtgtggtatccaaggtcctcggcgagaagaggtgcacggtctacttcaggccttggaaggaagagatggagttcgagcatgcgcagctgaggttgcactgtgactggatgggcgggaggtggatgcgggcttccccggcactggagatgtgaaggctgaagagccacgcgatggcgttagacagtagcttggtgattgtatggggtaatacccatagttaaaagtgtgtcgtcactaaggtaccatgttatgttgtcttcctgcatgaagttgtcctgtgccatctgcagcaagttggatgatgatcattgtgcagttgctgcaagttgccacaccaccatcaggtctgaatctgaacgcttgccaatggttgatcccattgtgttgtactaggaactagtaagcgcattcagccagtgttaagggtgaagaaccgggagctgtggtgctaaatgttaggggtgtcgagtgaacccttattgatcgccggcgacttgtttgttttgcactagactgcttgttttagcatccctatatgctatcttaaggttgtctccaacagtgaactgtaaatggtctgctccgctaaatttagagttctgtggcttcctctaccctcccaacaaagcaacaagacctggtaaaacgtc

SEQ ID NO: 76997 - DNA, 1372 bp, Zea Mays
aaaggaaaaagaagaagggaaggggagatacccaagacaatgccatatgcaaaaggaatgcaaattgaagtttccaagttgggaagacaattctgttgttgcttggtcacctgcagttgtcgcaaagactatctggaagaataacctattagtcgactacactctttcaaagtgttacggtactacattgtctgaggagattgttgatgtgaagcatgtgaggccttgcccaccacaagcatcagagattagtttctgcatcaatgatgaggttgaagcattccaaggtgattgctggtggctaggggtgattactaatgttcttccagaattcaagtacacatttaagtcaacgcatttagggacggaagttgaggtgaaccagaaatttctgaggcttcgatatgactgggttggtgatcaatgggaacaagaatcaaagaatgtgcccaaggcaaaatttacacaaggtgtcaaggttgaagtctgcagcgacgatgaaggttttcgtggagcctggttcgaggcgactgttgttaaagctgtcggcagcaagttcctcgtggagtatgctacgctgaaggccgatgacgggaccaagcctctgaaagaatctgtagaagcacggcacatcagaccttgccctccagatatccctgccactgatggattcaaactacttgacgaggtcgatgccttctgcaacgacgcgtggtgggtcggtgtggtatccaaggtcctcggcgagaagaggtgcacggtctacttcaggccttggaaggaagagatggagttcgagcatgcgcagctgaggttgcactgtgactggatgggcgggaggtggatgcgggcttccccggcactggagatgtgaaggctgaagagccacgcgatggcgttagacagtagcttggtgattgtatggggtaatacccatagttaaaagtgtgtcgtcactaaggtaccatgttatgttgtcttcctgcatgaagttgtcctgtgccatctgcagcaagttggatgatgatcattgtgcagttgctgcaagttgccacaccaccatcaggtctgaatctgaacgcttgccaatggttgatcccattgtgttgtactaggaactagtaagcgcattcagccagtgttaagggtgaagaaccgggagctgtggtgctaaatgttaggggtgtcgagtgaacccttattgatcgccggcgacttgtttgttttgcactagactgcttgttttagcatccctatatgctatcttaaggttgtctccaacagtgaactgtaaatggtctgctccgctaaatttagagttctgtggcttcctctaccctcccaacaaagcaacaagacctggtaaaacgtc

SEQ ID NO: 76998 - DNA, 1819 bp, Zea Mays
gttgccctcgactggagcagtcagtccactccagtacctctgccgcacgctgctcccgccgcgccaccagctcaccaccgctgctagccacgatgcggtcgccgcgaatccccggccgccgcgacgcggcgtcgccgcagacgccaaaggggttcaacccgggcgaccccgtggaggtggtccccgacgaggcaggcctgcacggggcccacttcgctgccgtcgtcgtggggcccagcgccaagccccgcggctacaccgtcgaatacgactccctcctcgagtccgagggctccgaccgcccgctccgggaggcactgccggcgcggagccttcgccctcgcccgcgccggcgcgcccagcaaggtcagggtatgcttcccggagaccagggaggtcatggagttcgacgccgccgacgtccgcccgcacctcgagtgggttgacggcgagtggcgctccccagataacatgatacccaagacaatgccatatgcaaaaggaatgcaaattgaagtttccaagttgggaagacaattctgttgttgcttggtcacctgcagttgtcgcaaagactatctggaagaataacctattagtcgactacactctttcaaagtgttacggtactacattgtctgaggagattgttgatgtgaagcatgtgaggccttgcccaccacaagcatcagagattagtttctgcatcaatgatgaggttgaagcattccaaggtgattgctggtggctaggggtgattactaatgttcttccagaattcaagtacacatttaagtcaacgcatttagggacggaagttgaggtgaaccagaaatttctgaggcttcgatatgactgggttggtgatcaatgggaacaagaatcaaagaatgtgcccaaggcaaaatttacacaaggtgtcaaggttgaagtctgcagcgacgatgaaggttttcgtggagcctggttcgaggcgactgttgttaaagctgtcggcagcaagttcctcgtggagtatgctacgctgaaggccgatgacgggaccaagcctctgaaagaatctgtagaagcacggcacatcagaccttgccctccagatatccctgccactgatggattcaaactacttgacgaggtcgatgccttctgcaacgacgcgtggtgggtcggtgtggtatccaaggtcctcggcgagaagaggtgcacggtctacttcaggccttggaaggaagagatggagttcgagcatgcgcagctgaggttgcactgtgactggatgggcgggaggtggatgcgggcttccccggcactggagatgtgaaggctgaagagccacgcgatggcgttagacagtagcttggtgattgtatggggtaatacccatagttaaaagtgtgtcgtcactaaggtaccatgttatgttgtcttcctgcatgaagttgtcctgtgccatctgcagcaagttggatgatgatcattgtgcagttgctgcaagttgccacaccaccatcaggtctgaatctgaacgcttgccaatggttgatcccattgtgttgtactaggaactagtaagcgcattcagccagtgttaagggtgaagaaccgggagctgtggtgctaaatgttaggggtgtcgagtgaacccttattgatcgccggcgacttgtttgttttgcactagactgcttgttttagcatccctatatgctatcttaaggttgtctccaacagtgaactgtaaatggtctgctccgctaaatttagagttctgtggcttcctctaccctcccaacaaagcaacaagacctggtaaaacgtc

SEQ ID NO: 76999 - DNA, 1716 bp, Zea Mays
gaggggtctcggcaatgatgctcctctgattctccccacccgtggctgcgcccatccgtctacaagtaccacctggccgcgcgatggaaaaccataatccattacattctcagattgctgaagtgaaaatggacatctcagcatcagcttctgttgcatcagggaacaaattctgcaagggtggtgcctgtgatttctctgattccagtaactcctcgaaagatgccaaggagagatccacgtccatgaggaagcttataatcgcagtgatcctttgcatcatattcatgacggtggaagtggtcgggggcatcaaagcaaacagtcttgccatcttaactgatgcggcgcaccttctttctgatgtggcagcatttgccatatcgttattctctctctgggctgctggatgggaagcaacaccgcagcagtcatatgggttcttccggattgagattcttggtgccttggtctccattcagctcatatggctacttgctggcatactggtatatgaggctattgtaaggctcattaacgagagtggcgatgtgcagggctccctcatgtttgctgtgtcggcgtttggactgtttgtcaacattataatggctgtattgctaggccatgaccacgggcacggccatggacacagccatggacatccacatgaccatggtcatggtgattcagacgatggccattctcaccatgaagaaccagaacagggccatgttcatcatcatgagcatagccatggaagttctattactgtcacaacacatcaccaccaccactcaggcactggacaacaccatgacgctgaggagccactgatcaagcacgaggccgactgtgagggcacccaatctgctgctaagaagcctcgacgcaatataaacgtacacagcgcttaccttcatgtgcttggggactccatccagagcatcggggtgatgatcggcggggctatcatctggtacaagcccgagtggaaaatcatcgatctgatctgcaccctcatcttctcggtggtcgtgctgttcaccacgatcaggatgctgcgcaacatcctcgaggtcctgatggaaagcacgccccgtgagatcgacgccaccaggctggagagggggctctgcgagatggaaggcgtggttgccgtccacgagctgcatatctgggccatcacagtggggaaggtgctactggcttgccatgtgacggtcgccagggaagccgacgcagacgagatccttgacaaggtgattgggtacatcaagacggagtacaacatcagccatgtgaccattcaggtcgagcgtgaatagagggggagctgtcttttgggctgtcagggcataaatggcgtcacgccttcactggttatcttactctgtcggttaaaacttttttttggcacctgggaaggcatcaggcagccatcggagtcttgatgtgcttgcaagttcatctgtggttcaagctttgatggtcagtagtgttatctgttactactagtctattaggcgggggtaggcgtcaaccagtgtgtacgggtttgattttcggtcatgctgttaacagcattgcggttcgtcgaactggatatgtagtttagtacgctgtgtcatcacctcttgtgtaagggaacgcttcttttctgtggtatggaagatgtgaacttcgtgatataaacaaaatagtaatataaagcaa

SEQ ID NO: 77000 - DNA, 1811 bp, Zea Mays
gaggggtctcggcaatgatgctcctctgattctccccacccgtggctgcgcccatccgtctacaagtaccacctggccgcgcggttggttccaatttccagacggcagtccactggtttttgcttgcatatcctttgtttaggccagagttgagttgtgttccaacttccaagtcttgggttgcggaatcgccggcctcgctcaatcgattgctgaagtgaaaatggacatctcagcatcagcttctgttgcatcagggaacaaattctgcaagggtggtgcctgtgatttctctgattccagtaactcctcgaaagatgccaaggagagatccacgtccatgaggaagcttataatcgcagtgatcctttgcatcatattcatgacggtggaagtggtcgggggcatcaaagcaaacagtcttgccatcttaactgatgcggcgcaccttctttctgatgtggcagcatttgccatatcgttattctctctctgggctgctggatgggaagcaacaccgcagcagtcatatgggttcttccggattgagattcttggtgccttggtctccattcagctcatatggctacttgctggcatactggtatatgaggctattgtaaggctcattaacgagagtggcgatgtgcagggctccctcatgtttgctgtgtcggcgtttggactgtttgtcaacattataatggctgtattgctaggccatgaccacgggcacggccatggacacagccatggacatccacatgaccatggtcatggtgattcagacgatggccattctcaccatgaagaaccagaacagggccatgttcatcatcatgagcatagccatggaagttctattactgtcacaacacatcaccaccaccactcaggcactggacaacaccatgacgctgaggagccactgatcaagcacgaggccgactgtgagggcacccaatctgctgctaagaagcctcgacgcaatataaacgtacacagcgcttaccttcatgtgcttggggactccatccagagcatcggggtgatgatcggcggggctatcatctggtacaagcccgagtggaaaatcatcgatctgatctgcaccctcatcttctcggtggtcgtgctgttcaccacgatcaggatgctgcgcaacatcctcgaggtcctgatggaaagcacgccccgtgagatcgacgccaccaggctggagagggggctctgcgagatggaaggcgtggttgccgtccacgagctgcatatctgggccatcacagtggggaaggtgctactggcttgccatgtgacggtcgccagggaagccgacgcagacgagatccttgacaaggtgattgggtacatcaagacggagtacaacatcagccatgtgaccattcaggtcgagcgtgaatagagggggagctgtcttttgggctgtcagggcataaatggcgtcacgccttcactggttatcttactctgtcggttaaaacttttttttggcacctgggaaggcatcaggcagccatcggagtcttgatgtgcttgcaagttcatctgtggttcaagctttgatggtcagtagtgttatctgttactactagtctattaggcgggggtaggcgtcaaccagtgtgtacgggtttgattttcggtcatgctgttaacagcattgcggttcgtcgaactggatatgtagtttagtacgctgtgtcatcacctcttgtgtaagggaacgcttcttttctgtggtatggaagatgtgaacttcgtgatataaacaaaatagtaatataaagcaa

SEQ ID NO: 77001 - DNA, 1894 bp, Zea Mays
cttttgtgttataaccgtctcattggttgcagtagcagccagccagtcacgctgttcgagcagagccccatcccctgatccccgtgccaggccgctcggccctcgacgccgtgagtcaggcaggcaggcgcctctttctgtccctccactcgggtctccacgccgccgccgccgccgccgcctcgaccgccccacgcatccgccgctcctctacccatcctcggcccgcggcccagggagaagaccgcacgggcgggcgagatggaaaaccataatccattacattctcagattgctgaagtgaaaatggacatctcagcatcagcttctgttgcatcagggaacaaattctgcaagggtggtgcctgtgatttctctgattccagtaactcctcgaaagatgccaaggagagatccacgtccatgaggaagcttataatcgcagtgatcctttgcatcatattcatgacggtggaagtggtcgggggcatcaaagcaaacagtcttgccatcttaactgatgcggcgcaccttctttctgatgtggcagcatttgccatatcgttattctctctctgggctgctggatgggaagcaacaccgcagcagtcatatgggttcttccggattgagattcttggtgccttggtctccattcagctcatatggctacttgctggcatactggtatatgaggctattgtaaggctcattaacgagagtggcgatgtgcagggctccctcatgtttgctgtgtcggcgtttggactgtttgtcaacattataatggctgtattgctaggccatgaccacgggcacggccatggacacagccatggacatccacatgaccatggtcatggtgattcagacgatggccattctcaccatgaagaaccagaacagggccatgttcatcatcatgagcatagccatggaagttctattactgtcacaacacatcaccaccaccactcaggcactggacaacaccatgacgctgaggagccactgatcaagcacgaggccgactgtgagggcacccaatctgctgctaagaagcctcgacgcaatataaacgtacacagcgcttaccttcatgtgcttggggactccatccagagcatcggggtgatgatcggcggggctatcatctggtacaagcccgagtggaaaatcatcgatctgatctgcaccctcatcttctcggtggtcgtgctgttcaccacgatcaggatgctgcgcaacatcctcgaggtcctgatggaaagcacgccccgtgagatcgacgccaccaggctggagagggggctctgcgagatggaaggcgtggttgccgtccacgagctgcatatctgggccatcacagtggggaaggtgctactggcttgccatgtgacggtcgccagggaagccgacgcagacgagatccttgacaaggtgattgggtacatcaagacggagtacaacatcagccatgtgaccattcaggtcgagcgtgaatagagggggagctgtcttttgggctgtcagggcataaatggcgtcacgccttcactggttatcttactctgtcggttaaaacttttttttggcacctgggaaggcatcaggcagccatcggagtcttgatgtgcttgcaagttcatctgtggttcaagctttgatggtcagtagtgttatctgttactactagtctattaggcgggggtaggcgtcaaccagtgtgtacgggtttgattttcggtcatgctgttaacagcattgcggttcgtcgaactggatatgtagtttagtacgctgtgtcatcacctcttgtgtaagggaacgcttcttttctgtggtatggaagatgtgaacttcgtgatataaacaaaatagtaatataaagcaa

SEQ ID NO: 77002 - DNA, 2100 bp, Zea Mays
ttgaaggcctggctcacgaaagcaccttatccatttcgtctcccgcgccgcgcgtctcccttcccggctgtcgacggcgccttgcaggcttgcaccgacccgcggtcatggcgccgtccgtgtccaagatgctctcgacgcctccgtaccacgcatattacacctggcgtcgccgcctccttccccaagaaacagccgcgtcgcccaatccgagcccggcgagccgtcgaatcgcgccgccgctcaggtgttgccgttgcgcgtgcagccggagtccagcgaggcgcttcgtcccgatctgcgcctcggcatcagaccgcgcaggcgcgacgacggcggccctggtcgaagccgaggaggaagcagagctcgacggcccgccgatggtccagctgtcttcagacatcctccgtacggagcttagtttgctcaaggccgacgcgcccccggccggtggcgactcgtctctcggcatcaccgcccttgaggaccaagacagcgaggatggccgccactcgggaggaagagaaaccgctgcttacccagctgccatgaacgcgttgtacgcggcctgcctcgctgggattctgggaacgtgaccgagcagctgtggaacttcacctggcccgccgccatcgccacgctgcaccccagcctcctccccgtcgccgtcctcggcttcttctcaaagctcgtggtgttcgcggtgggcccgctggtgggggatcttgtgagctcgctcccccggatcccagcgtaccgatcactaacggtgatccagacggcggcgcacctggtgtccgcggcgatggtcacgtacgccttcaccgtcccccgggctccagctgcatcggcgctgctcctgcggccgtggttcgccacgctggtggcgtccacagccgtcgaccgcctctcctgcgtctccctcggcgtcatcgcagagcgcgacttcgtcgtccagctagcaggggaaggcaggccgatcgcgctggcgcgggcgaacgcggcgctcagcagggtcgatctcctctgcgagacggcgggagcgtccatcttcgccgtgctgctctccaggaaccacccgctgacctgcgtcaggctctcctgcgccgtctcgctctgctccctgccccttctgttttttctaggcggcgcgatgaatcgtctcgctgacggcatcttggaccgctctgctagtgccggtccggccccgctggagcgcccaggacgacatgggagcgcggcggttggcaaagcctgggagaccatcaggcacggctggacagagtacctccggcagcctgtgctaccggcgagcctcgcctacgtgctcgtctgcttcaacgtcgcgctcgcgcccggcgctctcatgaccaccttcctcatccacctcggcgtgagcgcgtcggtgctcggtgcgttcggcgggtcgtcggcggtggtggggattctggccacgttcgtgactccatatcttgtcaaggagctgggcattctcaaggccggagcggcagggctggtcgcgcagagcgcgctcctcggcgcggcagtcgtggtcttcgtcactggccccgtctcacggcgcggcgctctcttcgcctttcttggcttcatcgtggcttcgcggctggggcacatggcgtacagcgtcatcggactgcaggtggtgcagacgggaaaccccatggggaaggccaagctgatcggcgccacggagatcgcggtggccagcctcgccgagctcgccatgatggccgtcgccgtcgtcgctggggacgccgcgcacttcggctgcctggccgcgctctcggccgcatcggtcgccgccgccgcttgcctgttctgcgcgtggctggccaaccccaccgacgacctcaggaggctcttcccatgttgatacaggaataggactaggagacgcaaatttttggagaatagccaattcgtgtacctagctccaaatgttttgcaggtataagctccaattttttttccgtgttctgcatccactttgatttttgaaatcaatattagaggaaggacataaacttgcaataaactttatccaaaaataattaagtggcagacattaatatcgtg

SEQ ID NO: 77003 - DNA, 2106 bp, Zea Mays
ttgaaggcctggctcacgaaagcaccttatccatttcgtctcccgcgccgcgcgtctcccttcccggctgtcgacggcgccttgcaggcttgcaccgacccgcggtcatggcgccgtccgtgtccaagatgctctcgacgcctccgtaccacgcatattacacctggcgtcgccgcctccttccccaagaaacagccgcgtcgcccaatccgagcccggcgagccgtcgaatcgcgccgccgctcaggtgttgccgttgcgcgtgcagccggagtccagcgaggcgcttcgtcccgatctgcgcctcggcatcagaccgcgcaggcgcgacgacggcggccctggtcgaagccgaggaggaagcagagctcgacggcccgccgatggtccagctgtcttcagacatcctccgtacggagcttagtttgctcaaggccgacgcgcccccggccggtggcgactcgtctctcggcatcaccgcccttgaggaccaagacagcgaggatggccgccactcgggaggaagagaaaccgctgcttacccagctgccatgaacggtatgcaacgcagcgttgtacgcggcctgcctcgctgggattctgggaacgtgaccgagcagctgtggaacttcacctggcccgccgccatcgccacgctgcaccccagcctcctccccgtcgccgtcctcggcttcttctcaaagctcgtggtgttcgcggtgggcccgctggtgggggatcttgtgagctcgctcccccggatcccagcgtaccgatcactaacggtgatccagacggcggcgcacctggtgtccgcggcgatggtcacgtacgccttcaccgtcccccgggctccagctgcatcggcgctgctcctgcggccgtggttcgccacgctggtggcgtccacagccgtcgaccgcctctcctgcgtctccctcggcgtcatcgcagagcgcgacttcgtcgtccaggggaaggcaggccgatcgcgctggcgcgggcgaacgcggcgctcagcagggtcgatctcctctgcgagacggcgggagcgtccatcttcgccgtgctgctctccaggaaccacccgctgacctgcgtcaggctctcctgcgccgtctcgctctgctccctgccccttctgttttttctaggcggcgcgatgaatcgtctcgctgacggcatcttggaccgctctgctagtgccggtccggccccgctggagcgcccaggacgacatgggagcgcggcggttggcaaagcctgggagaccatcaggcacggctggacagagtacctccggcagcctgtgctaccggcgagcctcgcctacgtgctcgtctgcttcaacgtcgcgctcgcgcccggcgctctcatgaccaccttcctcatccacctcggcgtgagcgcgtcggtgctcggtgcgttcggcgggtcgtcggcggtggtggggattctggccacgttcgtgactccatatcttgtcaaggagctgggcattctcaaggccggagcggcagggctggtcgcgcagagcgcgctcctcggcgcggcagtcgtggtcttcgtcactggccccgtctcacggcgcggcgctctcttcgcctttcttggcttcatcgtggcttcgcggctggggcacatggcgtacagcgtcatcggactgcaggtggtgcagacgggaaaccccatggggaaggccaagctgatcggcgccacggagatcgcggtggccagcctcgccgagctcgccatgatggccgtcgccgtcgtcgctggggacgccgcgcacttcggctgcctggccgcgctctcggccgcatcggtcgccgccgccgcttgcctgttctgcgcgtggctggccaaccccaccgacgacctcaggaggctcttcccatgttgatacaggaataggactaggagacgcaaatttttggagaatagccaattcgtgtacctagctccaaatgttttgcaggtataagctccaattttttttccgtgttctgcatccactttgatttttgaaatcaatattagaggaaggacataaacttgcaataaactttatccaaaaataattaagtggcagacattaatatcgtg

SEQ ID NO: 77004 - DNA, 1434 bp, Zea Mays
aaaaaaaggaaagataaaaaatcgtaggatagaagagcattaaagcaaaacaaccggccaattacatgtaccaaccaaaatccaaaaacctcgtcagtttgggaacagcggaaaaccggccccccgcccgcctgctaggtgctagcaacagcagtcgccgccgatgggggtggactactacaaggtgctgggcgtcggccgcggcgccaccgacgacgagctcaagaaggcctaccgccgcctagccatgaagtaccatcccgataagaaccctacgccgcaggccgacaccctcttcaagcaggtgctcagcgacccgcagaagcgagccatctacgaccagtacggcgaggaaggcctcaaggccggcgcgcctccgcccgccgcctccacgcacggcgccggcgccggcgtccacaggttccgcttcaacacgaggagcgccgaggagatcttctccgagatattcggcggcgggtttgctggggcaggcccccgtacccccggcggcggcgtcccctccgggttcccgatgttcggcggcgctgctggggcaggggaggcgtcgagcgcggcgtcgcagaggaaggcgccgccgatcgagcggccgctggcttgcaccttggaggacctgtacaaaggggccactaagaagatgaagatctctagggatgtccttgacgccaccgggagaccaacaaaccgtgaggagatcctgacgatcgacatcaagccaggatggaagaagggcacaaagataacctttcccgagaaaggcaacgaggcacgcaacgttgtgccatcggatctggtgttcatagtagaagaacgggcgcaccccaggttcaggagagacgggaacgacctcatctacactcataagatctctctggtggaggcattgacaggctgcacagtccaagtgacgactctggacgggcggaccctgaccgttccggtgaagtcggtcgtcagccctacatacgaagaagtcgtgccgggcgaaggcatgccgatcacgagggagccgtctaggaaggggagcctgaggatcaagttccagatcaagttccccactagcctaacaggcgaccagaaggcggccatccaacagcttctgtcttgaagctctctctctctctctctctgtgtgtgtgtgtgtgtgtacaatgcgaggagtgttttcgtttgtggagtagttgtagtagtgacattagctgaatgcaccgtcacgtttttttttcatgctagtgttggcctattcttttctagctttggtggagctgcagctgtttgcgacatggtcatgacgctattcagtattcagatagattatcagttgctatgtctttgttggatcgggcctgtttgtttggtttctatagcttctacagtgttttttgtctctataaattgcagctggagcagtccaaa

SEQ ID NO: 77005 - DNA, 2845 bp, Zea Mays
cttccacaaaccccataaccctagcaccgccgccaccatgtcctcatctccatcttcagtgaaccgccgtcccccgggcccgctagcgttggggctggagtccttggggaagaagatcagcatcggctggtctccgtcccgggcggcatcctctccatctcgtgtcgcacctacgcgaccccactgggccatggcttctttccccgtgacacctctgtcgggatcgcgagggatgcgttcaacacgttcttcagtgaaacgggcgcagggaagcacgttccaagggccctgtttgtcgacttggagcccactgtgattgacgaggtgaagaccggggcgtaccgccggcttttccatcctgagcagctcatctcacacaaggaagatgctgcgaacaacttcgcccgtggacattacacaggctcaaaatgttcttggaaacaaggggactgaaattgcaaaggtagcacatcggcgaactgatgcggaggcgggcgtggaggcgctcgatgccgtccagcaatcagtagttgtcgctgcatcggcgacttctttcccccaccagcatggccgcgtgaatggttcagttctttccaaagcctacagcttctaggaaatcggatacgatcacccgaaaaaggcaagggggaaatcttcttatagatctgttccgtcattgtgacaatcatttgggagagaaacaaaaaactccatctggaagtgcacgacagccactacagttgactaccgatgtaaccaagatgatgcaaaagcatcagctggaaacgccatagttgctgctactgagtaccatccttatatccttatttcctaattgttgtggtgcatgtacaagtttttttaaaacgaattccgaattggttattgctgttagaactcatctgagtgctaccttctcatatgctccttttttctctctggctgttatgttaaaggaccagatacaagtcaatcttcccttcaaattacaatttaattattttatatctggattctgcaagacacttcaaaaaaaaatataacaacatgtggtccctatgttatctactagcatgagccattgttccatgcagtttggtacatagtggcgcatattttgttacatttactttctatattcttagtatatttatagcctatatccccaaactatatcatatacttagcacacacccattgttataatccacgtgcgcatggcgcgcgcactttactagtatacaacattgttggcaacaggagctgatctctttattacacgatgtattggcttggtttctaatgtccactttcccatccctgttttcccctccttcaggacttctttagtgatcttttggtacatcgctgctgatacaaacagcctacccagactgcttttgtgaaggtatgtgcgtacctatattgcttcttgaggctgactcatgtgattggcggtgtttggaagatacattaaagtttaattcgacaaatgtcttttgcttagggctcctagcttggtgtttctttttctgtgatacttgtgcatgcgaagtaggtgaactgctacttaaatggtacatatttagcttaattacttactggtggcattgcagattatatgtttctgtcttaaagatacattagtaggctgtagtactcacactgcttctgttctcatctgttcacacactgcatctattcacagcatgattcagaggcatgcatgaggttgtagtaggcgagaccacccaaaagcactcccaacgcctgaccacaagagctagcagatagcagccctactgttggcaatccaataatcacatacgaagttttccttgaaattttttgagtcttgaattgacttcttccttaatttatagtttcaactcaaaacgaatacactattttttgttgaaccacattttcctctgctcagtttggcatcattattgtatcataatattatcataattaatccattctggtaaactgactctagaaaattttcttgaatggattcctatcttttacagtctaagctacattatgtgcatggaattttgcaatataccttctgtttcttgctcacatgattgatgtgattttgaattcatttagcacactgctttctgagaagccatttgcagtgcaaggatgaaacttggtcagagtgtttaccatatggattggcagtgaaaccaaaaaagaaggcgcgctactgttcttccgttttcatgtcaatgcaacaacagataagtggaggtggcactaccaattccttgatgtaccaggaatgtttggattgttgtattctgacattgtttggctcaacatattcaagttggagtgtcaggtctccaacaattaaacaagatacggaatctgtgtaagcaagagcattcataccttgttagcttccttctctctctctcaagatcgatctagagaccaacaagatcatggacttcttcaagtttgacgtcgataacgtggtcatggtgaccggcgggaggaacaccgggcgtgtaggagtgatcaagaactaggagaagcacaaaggcagcttcgaggtcatcgacgtgctgcttggagctttttgcatgctatgtctagttttctcctatttgttgtacaggaaaacatagaatggaattcaaatttggtggtcgcaaaagtgtggagacttgaattcatataaagttaggcttaacattagtgcaaacagttgtattttagtttagatttagagtacacttatgtatgccttgtttgacaatgcttatttatgatatattgaatggtacttatttatattatattaattataatgttgttcaatata

SEQ ID NO: 77006 - DNA, 2598 bp, Zea Mays
cttccacaaaccccataaccctagcaccgccgccaccatgtcctcatctccatcttcagtgaaccgccgtcccccgggcccgctagcgttggggctggagtccttggggaagaagatcagcatcggctggtctccgtcccgggcggcatcctctccatctcgtgtcgcacctacgcgaccccactgggccatggcttctttccccgtggtgcaggtcttttcggtcctcaggcttcatccctgtgcaagtgcagggataattgcttctaatctcccgaggctgcataacctaattcagaggcagagcaagggggcgtgagggagatgagggagatcatcagcatccatatcgcgtaggcaggcatccagtgacacctctgtcgggatcgcgagggatgcgttcaacacgttcttcagtgaaacgggcgcagggaagcacgttccaagggccctgtttgtcgacttggagcccactgtgattgacgaggtgaagaccggggcgtaccgccggcttttccatcctgagcagctcatctcacacaaggaagatgctgcgaacaacttcgcccgtggacattacacaggctcaaaatgttcttggaaacaaggggactgaaattgcaaaggtagcacatcggcgaactgatgcggaggcgggcgtggaggcgctcgatgccgtccagcaatcagtagttgtcgctgcatcggcgacttctttcccccaccagcatggccgcgtgaatggttcaggtgagacgtcgttgctttgtttgattcgagagtgacgctgattcgaattcctactcgtgggaggtcagtttattcggattcaaccatgcatgtgatcgatctatcagagagctgaccaccttctttgcttgtcgcttggaaccatcgcaaagttctttccaaagcctacagcttctaggaaatcggatacgatcacccgaaaaaggcaagggggaaatcttcttatagatctgttccgtcattgtgacaatcatttgggagagaaacaagtaaacaacccttttttccataaaactccatctggaagtgcacgacagccactacagttgactaccgatgtaaccaagatgatgcaaaagcatcagctggaaacgccatagttgctgctactgagtaccatccttatatccttatttcctaattgttgtggtgcatgtacaagtttttttaaaacgaattccgaattggttattgctgttagaactcatctgagtgctaccttctcatatgctccttttttctctctggctgttatgttaaaggaccagatacaagtcaatcttcccttcaaattacaatttaattattttatatctggattctgcaagacacttcaaaaaaaaatataacaacatgtggtccctatgttatctactagcatgagccattgttccatgcagtttggtacatagtggcgcatattttgttacatttactttctatattcttagtatatttatagcctatatccccaaactatatcatatacttagcacacacccattgttataatccacgtgcgcatggcgcgcgcactttactagtatacaacattgttggcaacaggagctgatctctttattacacgatgtattggcttggtttctaatgtccactttcccatccctgttttcccctccttcaggacttctttagtgatcttttggtacatcgctgctgatacaaacagcctacccagactgcttttgtgaagggctcctagcttggtgtttctttttctgtgatacttgtgcatgcgaagtaggtgaactgctacttaaatgcacactgctttctgagaagccatttgcagtgcaaggatgaaacttggtcagagtgtttaccatatggattggcagccccaaataaagctctggattgtcctattcccatgacaaggttgtgctcttctcctgcagtgaaaccaaaaaagaaggcgcgctactgttcttccgttttcatgtcaatgcaacaacagataagtggaggtggcactaccaattccttgatgtaccaggaatgtttggattgttgtattctgacattgtttggctcaacatattcaagttggagtgtcaggtctccaacaattaaacaagatacggaatctgtgtaagcaagagcattcataccttgttagcttccttctctctctctcaagatcgatctagagaccaacaagatcatggacttcttcaagtttgacgtcgataacgtggtcatggtgaccggcgggaggaacaccgggcgtgtaggagtgatcaagaactaggagaagcacaaaggcagcttcgaggtcatcgacgtgctgcttggagctttttgcatgctatgtctagttttctcctatttgttgtacaggaaaacatagaatggaattcaaatttggtggtcgcaaaagtgtggagacttgaattcatataaagttaggcttaacattagtgcaaacagttgtattttagtttagatttagagtacacttatgtatgccttgtttgacaatgcttatttatgatatattgaatggtacttatttatattatattaattataatgttgttcaatata

SEQ ID NO: 77007 - DNA, 2962 bp, Zea Mays
cttccacaaaccccataaccctagcaccgccgccaccatgtcctcatctccatcttcagtgaaccgccgtcccccgggcccgctagcgttggggctggagtccttggggaagaagatcagcatcggctggtctccgtcccgggcggcatcctctccatctcgtgtcgcacctacgcgaccccactgggccatggcttctttccccgtggtgcaggtcttttcggtcctcaggcttcatccctgtgcaagtgcagggataattgcttctaatctcccgaggctgcataacctaattcagaggcagagcaagggggcgtgagggagatgagggagatcatcagcatccatatcgcgtaggcaggcatccagtgacacctctgtcgggatcgcgagggatgcgttcaacacgttcttcagtgaaacgggcgcagggaagcacgttccaagggccctgtttgtcgacttggagcccactgtgattgacgaggtgaagaccggggcgtaccgccggcttttccatcctgagcagctcatctcacacaaggaagatgctgcgaacaacttcgcccgtggacattacacaggctcaaaatgttcttggaaacaaggggactgaaattgcaaaggtagcacatcggcgaactgatgcggaggcgggcgtggaggcgctcgatgccgtccagcaatcagtagttgtcgctgcatcggcgacttctttcccccaccagcatggccgcgtgaatggttcagttctttccaaagcctacagcttctaggaaatcggatacgatcacccgaaaaaggcaagggggaaatcttcttatagatctgttccgtcattgtgacaatcatttgggagagaaacaagtaaacaacccttttttccataaaactccatctggaagtgcacgacagccactacagttgactaccgatgtaaccaagatgatgcaaaagcatcagctggaaacgccatagttgctgctactgagtaccatccttatatccttatttcctaattgttgtggtgcatgtacaagtttttttaaaacgaattccgaattggttattgctgttagaactcatctgagtgctaccttctcatatgctccttttttctctctggctgttatgttaaaggaccagatacaagtcaatcttcccttcaaattacaatttaattattttatatctggattctgcaagacacttcaaaaaaaaatataacaacatgtggtccctatgttatctactagcatgagccattgttccatgcagtttggtacatagtggcgcatattttgttacatttactttctatattcttagtatatttatagcctatatccccaaactatatcatatacttagcacacacccattgttataatccacgtgcgcatggcgcgcgcactttactagtatacaacattgttggcaacaggagctgatctctttattacacgatgtattggcttggtttctaatgtccactttcccatccctgttttcccctccttcaggacttctttagtgatcttttggtacatcgctgctgatacaaacagcctacccagactgcttttgtgaagggctcctagcttggtgtttctttttctgtgatacttgtgcatgcgaagtaggtgaactgctacttaaatggtacatatttagcttaattacttactggtggcattgcagattatatgtttctgtcttaaagatacattagtaggctgtagtactcacactgcttctgttctcatctgttcacacactgcatctattcacagcatgattcagaggcatgcatgaggttgtagtaggcgagaccacccaaaagcactcccaacgcctgaccacaagagctagcagatagcagccctactgttggcaatccaataatcacatacgaagttttccttgaaattttttgagtcttgaattgacttcttccttaatttatagtttcaactcaaaacgaatacactattttttgttgaaccacattttcctctgctcagtttggcatcattattgtatcataatattatcataattaatccattctggtaaactgactctagaaaattttcttgaatggattcctatcttttacagtctaagctacattatgtgcatggaattttgcaatataccttctgtttcttgctcacatgattgatgtgattttgaattcatttagcacactgctttctgagaagccatttgcagtgcaaggatgaaacttggtcagagtgtttaccatatggattggcagtgaaaccaaaaaagaaggcgcgctactgttcttccgttttcatgtcaatgcaacaacagattactgatatagctatgcctggtgagtggagataagtggaggtggcactaccaattccttgatgtaccaggaatgtttggattgttgtattctgacattgtttggctcaacatattcaagttggagtgtcaggtctccaacaattaaacaagatacggaatctgtgtaagcaagagcattcataccttgttagcttccttctctctctctcaagatcgatctagagaccaacaagatcatggacttcttcaagtttgacgtcgataacgtggtcatggtgaccggcgggaggaacaccgggcgtgtaggagtgatcaagaactaggagaagcacaaaggcagcttcgaggtcatcgacgtgctgcttggagctttttgcatgctatgtctagttttctcctatttgttgtacaggaaaacatagaatggaattcaaatttggtggtcgcaaaagtgtggagacttgaattcatataaagttaggcttaacattagtgcaaacagttgtattttagtttagatttagagtacacttatgtatgccttgtttgacaatgcttatttatgatatattgaatggtacttatttatattatattaattataatgttgttcaatata

SEQ ID NO: 77008 - DNA, 2938 bp, Zea Mays
cttccacaaaccccataaccctagcaccgccgccaccatgtcctcatctccatcttcagtgaaccgccgtcccccgggcccgctagcgttggggctggagtccttggggaagaagatcagcatcggctggtctccgtcccgggcggcatcctctccatctcgtgtcgcacctacgcgaccccactgggccatggcttctttccccgtggtgcaggtcttttcggtcctcaggcttcatccctgtgcaagtgcagggataattgcttctaatctcccgaggctgcataacctaattcagaggcagagcaagggggcgtgagggagatgagggagatcatcagcatccatatcgcgtaggcaggcatccagtgacacctctgtcgggatcgcgagggatgcgttcaacacgttcttcagtgaaacgggcgcagggaagcacgttccaagggccctgtttgtcgacttggagcccactgtgattgacgaggtgaagaccggggcgtaccgccggcttttccatcctgagcagctcatctcacacaaggaagatgctgcgaacaacttcgcccgtggacattacacaggctcaaaatgttcttggaaacaaggggactgaaattgcaaaggtagcacatcggcgaactgatgcggaggcgggcgtggaggcgctcgatgccgtccagcaatcagtagttgtcgctgcatcggcgacttctttcccccaccagcatggccgcgtgaatggttcagttctttccaaagcctacagcttctaggaaatcggatacgatcacccgaaaaaggtagccttctttatcacattttccatgacaatagtctaggttttatacttttttattgtgtacaacgttacatatacacacacacattaacacaacataatatatatggccctgtttattcaccctctagattatataattggacttaaataagctaagaggtaaacaaacagcacaacttattggagtggattatataatgtagatacctagtttattatagtccataaacatgtcattaggtgcttattttggaatatttgtttcgctttcccccgctaataatttatataaacaaacatctctaatagaactgcaaggaaacaaacaggccctctatcgtactattgatgatataaatattaatatatgtttgcatacatattcatagtagatgcacatatacatatattaaacaatatgtttacatatagaattcccaattatctctccattcctctgtttacttcctgaaacaatctactatagctctttttcttatacctgcacaagataattacttaagaacatttatttctgaattgctttggcgtccctaacaaactattttatgtttttataacattacagacgtgcacttagtaatctgaattgtttctgtacaaagtaataagcaacatgaatttgacaaacagtaggaaataaaaaaatggcaacatcagtactctgatcctcatcttatatttctatttgagttttttcctttgtacagtacattccccactgttttcgtgcacatgtgtgatatagatttctgatatttaaacattaggacttatgagtgtcatatatctatactagcgtgtttgagcaaatcataatgaactatacaaatgaaatcaacttatttggctgcagttttaccatgctgataataacttatacaatgtgcattaaccacctatcatcttatttgccaattactgcacaatgctgataaatttcaattactatacttctagaaaataaacaaggtccaacgttgtttgctttccatttcccttctactctgatattatgtgatttggtttattcatattactgtccatagcatatttgttgtgcacacagttataaattcgttttctcgacactgcacaggcaagggggaaatcttcttatagatctgttccgtcattgtgacaatcatttgggagagaaacaagtaaacaacccttttttccataaaactccatctggaagtgcacgacagccactacagttgactaccgatgtaaccaagatgatgcaaaagcatcagctggaaacgccatagttgctgctactgagacttctttagtgatcttttggtacatcgctgctgatacaaacagcctacccagactgcttttgtgaagcacactgctttctgagaagccatttgcagtgcaaggatgaaacttggtcagagtgtttaccatatggattggcagtgaaaccaaaaaagaaggcgcgctactgttcttccgttttcatgtcaatgcaacaacagattactgatatagctatgcctggtgagtggagataagtggaggtggcactaccaattccttgatgtaccaggaatgtttggattgttgtattctgacattgtttggctcaacatattcaagttggagtgtcaggtctccaacaattaaacaagatacggaatctgtgtaagcaagagcattcataccttgttagcttccttctctctctctcaagatcgatctagagaccaacaagatcatggacttcttcaagtttgacgtcgataacgtggtcatggtgaccggcgggaggaacaccgggcgtgtaggagtgatcaagaactaggagaagcacaaaggcagcttcgaggtcatcgacgtgctgcttggagctttttgcatgctatgtctagttttctcctatttgttgtacaggaaaacatagaatggaattcaaatttggtggtcgcaaaagtgtggagacttgaattcatataaagttaggcttaacattagtgcaaacagttgtattttagtttagatttagagtacacttatgtatgccttgtttgacaatgcttatttatgatatattgaatggtacttatttatattatattaattataatgttgttcaatata

SEQ ID NO: 77009 - DNA, 2311 bp, Zea Mays
cttccacaaaccccataaccctagcaccgccgccaccatgtcctcatctccatcttcagtgaaccgccgtcccccgggcccgctagcgttggggctggagtccttggggaagaagatcagcatcggctggtctccgtcccgggcggcatcctctccatctcgtgtcgcacctacgcgaccccactgggccatggcttctttccccgtggtgcaggtcttttcggtcctcaggcttcatccctgtgcaagtgcagggataattgcttctaatctcccgaggctgcataacctaattcagaggcagagcaagggggcgtgagggagatgagggagatcatcagcatccatatcgcgtaggcaggcatccagtgacacctctgtcgggatcgcgagggatgcgttcaacacgttcttcagtgaaacgggcgcagggaagcacgttccaagggccctgtttgtcgacttggagcccactgtgattgacgaggtgaagaccggggcgtaccgccggcttttccatcctgagcagctcatctcacacaaggaagatgctgcgaacaacttcgcccgtggacattacacaggctcaaaatgttcttggaaacaaggggactgaaattgcaaaggtagcacatcggcgaactgatgcggaggcgggcgtggaggcgctcgatgccgtccagcaatcagtagttgtcgctgcatcggcgacttctttcccccaccagcatggccgcgtgaatggttcagttctttccaaagcctacagcttctaggaaatcggatacgatcacccgaaaaaggcaagggggaaatcttcttatagatctgttccgtcattgtgacaatcatttgggagagaaacaagtaaacaacccttttttccataaaactccatctggaagtgcacgacagccactacagttgactaccgatgtaaccaagatgatgcaaaagcatcagctggaaacgccatagttgctgctactgagtaccatccttatatccttatttcctaattgttgtggtgcatgtacaagtttttttaaaacgaattccgaattggttattgctgttagaactcatctgagtgctaccttctcatatgctccttttttctctctggctgttatgttaaaggaccagatacaagtcaatcttcccttcaaattacaatttaattattttatatctggattctgcaagacacttcaaaaaaaaatataacaacatgtggtccctatgttatctactagcatgagccattgttccatgcagtttggtacatagtggcgcatattttgttacatttactttctatattcttagtatatttatagcctatatccccaaactatatcatatacttagcacacacccattgttataatccacgtgcgcatggcgcgcgcactttactagtatacaacattgttggcaacaggagctgatctctttattacacgatgtattggcttggtttctaatgtccactttcccatccctgttttcccctccttcaggacttctttagtgatcttttggtacatcgctgctgatacaaacagcctacccagactgcttttgtgaagcacactgctttctgagaagccatttgcagtgcaaggatgaaacttggtcagagtgtttaccatatggattggcagtgaaaccaaaaaagaaggcgcgctactgttcttccgttttcatgtcaatgcaacaacagtggaggtggcactaccaattccttgatgtaccaggaatgtttggattgttgtattctgacattgtttggctcaacatattcaagttggagtgtcaggtctccaacaattaaacaagatacggaatctgtgtaagcaagagcattcataccttgttagcttccttctctctctctcaagatcgatctagagaccaacaagatcatggacttcttcaagtttgacgtcgataacgtggtcatggtgaccggcgggaggaacaccgggcgtgtaggagtgatcaagaactaggagaagcacaaaggcagcttcgaggtcatcgacgtgctgcttggagctttttgcatgctatgtctagttttctcctatttgttgtacaggaaaacatagaatggaattcaaatttggtggtcgcaaaagtgtggagacttgaattcatataaagttaggcttaacattagtgcaaacagttgtattttagtttagatttagagtacacttatgtatgccttgtttgacaatgcttatttatgatatattgaatggtacttatttatattatattaattataatgttgttcaatata

SEQ ID NO: 77010 - DNA, 1889 bp, Zea Mays
cttccacaaaccccataaccctagcaccgccgccaccatgtcctcatctccatcttcagtgaaccgccgtcccccgggcccgctagcgttggggctggagtccttggggaagaagatcagcatcggctggtctccgtcccgggcggcatcctctccatctcgtgtcgcacctacgcgaccccactgggccatggcttctttccccgtggtgcaggtcttttcggtcctcaggcttcatccctgtgcaagtgcagggataattgcttctaatctcccgaggctgcataacctaattcagaggcagagcaagggggcgtgagggagatgagggagatcatcagcatccatatcgcgtaggcaggcatccagtgacacctctgtcgggatcgcgagggatgcgttcaacacgttcttcagtgaaacgggcgcagggaagcacgttccaagggccctgtttgtcgacttggagcccactgtgattgacgaggtgaagaccggggcgtaccgccggcttttccatcctgagcagctcatctcacacaaggaagatgctgcgaacaacttcgcccgtggacattacacaggctcaaaatgttcttggaaacaaggggactgaaattgcaaaggtagcacatcggcgaactgatgcggaggcgggcgtggaggcgctcgatgccgtccagcaatcagtagttgtcgctgcatcggcgacttctttcccccaccagcatggccgcgtgaatggttcagagagctgaccaccttctttgcttgtcgcttggaaccatcgcaaagttctttccaaagcctacagcttctaggaaatcggatacgatcacccgaaaaaggcaagggggaaatcttcttatagatctgttccgtcattgtgacaatcatttgggagagaaacaagtaaacaacccttttttccataaaactccatctggaagtgcacgacagccactacagttgactaccgatgtaaccaagatgatgcaaaagcatcagctggaaacgccatagttgctgctactgagacttctttagtgatcttttggtacatcgctgctgatacaaacagcctacccagactgcttttgtgaagcacactgctttctgagaagccatttgcagtgcaaggatgaaacttggtcagagtgtttaccatatggattggcagccccaaataaagctctggattgtcctattcccatgacaaggttgtgctcttctcctgcagtgaaaccaaaaaagaaggcgcgctactgttcttccgttttcatgtcaatgcaacaacagataagtggaggtggcactaccaattccttgatgtaccaggaatgtttggattgttgtattctgacattgtttggctcaacatattcaagttggagtgtcaggtctccaacaattaaacaagatacggaatctgtgtaagcaagagcattcataccttgttagcttccttctctctctctcaagatcgatctagagaccaacaagatcatggacttcttcaagtttgacgtcgataacgtggtcatggtgaccggcgggaggaacaccgggcgtgtaggagtgatcaagaactaggagaagcacaaaggcagcttcgaggtcatcgacgtgctgcttggagctttttgcatgctatgtctagttttctcctatttgttgtacaggaaaacatagaatggaattcaaatttggtggtcgcaaaagtgtggagacttgaattcatataaagttaggcttaacattagtgcaaacagttgtattttagtttagatttagagtacacttatgtatgccttgtttgacaatgcttatttatgatatattgaatggtacttatttatattatattaattataatgttgttcaatata

SEQ ID NO: 77011 - DNA, 2940 bp, Zea Mays
cttccacaaaccccataaccctagcaccgccgccaccatgtcctcatctccatcttcagtgaaccgccgtcccccgggcccgctagcgttggggctggagtccttggggaagaagatcagcatcggctggtctccgtcccgggcggcatcctctccatctcgtgtcgcacctacgcgaccccactgggccatggcttctttccccgtggtgcaggtcttttcggtcctcaggcttcatccctgtgcaagtgcagggataattgcttctaatctcccgaggctgcataacctaattcagaggcagagcaagggggcgtgagggagatgagggagatcatcagcatccatatcgcgtaggcaggcatccagtgacacctctgtcgggatcgcgagggatgcgttcaacacgttcttcagtgaaacgggcgcagggaagcacgttccaagggccctgtttgtcgacttggagcccactgtgattgacgaggtgaagaccggggcgtaccgccggcttttccatcctgagcagctcatctcacacaaggaagatgctgcgaacaacttcgcccgtggacattacacaggctcaaaatgttcttggaaacaaggggactgaaattgcaaaggtagcacatcggcgaactgatgcggaggcgggcgtggaggcgctcgatgccgtccagcaatcagtagttgtcgctgcatcggcgacttctttcccccaccagcatggccgcgtgaatggttcagttctttccaaagcctacagcttctaggaaatcggatacgatcacccgaaaaaggcaagggggaaatcttcttatagatctgttccgtcattgtgacaatcatttgggagagaaacaagtaaacaacccttttttccataaaactccatctggaagtgcacgacagccactacagttgactaccgatgtaaccaagatgatgcaaaagcatcagctggaaacgccatagttgctgctactgagtaccatccttatatccttatttcctaattgttgtggtgcatgtacaagtttttttaaaacgaattccgaattggttattgctgttagaactcatctgagtgctaccttctcatatgctccttttttctctctggctgttatgttaaaggaccagatacaagtcaatcttcccttcaaattacaatttaattattttatatctggattctgcaagacacttcaaaaaaaaatataacaacatgtggtccctatgttatctactagcatgagccattgttccatgcagtttggtacatagtggcgcatattttgttacatttactttctatattcttagtatatttatagcctatatccccaaactatatcatatacttagcacacacccattgttataatccacgtgcgcatggcgcgcgcactttactagtatacaacattgttggcaacaggagctgatctctttattacacgatgtattggcttggtttctaatgtccactttcccatccctgttttcccctccttcaggacttctttagtgatcttttggtacatcgctgctgatacaaacagcctacccagactgcttttgtgaaggtatgtgcgtacctatattgcttcttgaggctgactcatgtgattggcggtgtttggaagatacattaaagtttaattcgacaaatgtcttttgcttagggctcctagcttggtgtttctttttctgtgatacttgtgcatgcgaagtaggtgaactgctacttaaatggtacatatttagcttaattacttactggtggcattgcagattatatgtttctgtcttaaagatacattagtaggctgtagtactcacactgcttctgttctcatctgttcacacactgcatctattcacagcatgattcagaggcatgcatgaggttgtagtaggcgagaccacccaaaagcactcccaacgcctgaccacaagagctagcagatagcagccctactgttggcaatccaataatcacatacgaagttttccttgaaattttttgagtcttgaattgacttcttccttaatttatagtttcaactcaaaacgaatacactattttttgttgaaccacattttcctctgctcagtttggcatcattattgtatcataatattatcataattaatccattctggtaaactgactctagaaaattttcttgaatggattcctatcttttacagtctaagctacattatgtgcatggaattttgcaatataccttctgtttcttgctcacatgattgatgtgattttgaattcatttagcacactgctttctgagaagccatttgcagtgcaaggatgaaacttggtcagagtgtttaccatatggattggcagtgaaaccaaaaaagaaggcgcgctactgttcttccgttttcatgtcaatgcaacaacagttggagtgtcaggtctccaacaattaaacaagatacggaatctgtgtaagcaagagcattcataccttgttagcttccttctctctctctcaagatcgatctagagaccaacaagatcatggacttcttcaagtttgacgtcgataacgtggtcatggtgaccggcgggaggaacaccgggcgtgtaggagtgatcaagaactaggagaagcacaaaggcagcttcgaggtcatcgacgtgctgcttggagctttttgcatgctatgtctagttttctcctatttgttgtacaggaaaacatagaatggaattcaaatttggtggtcgcaaaagtgtggagacttgaattcatataaagttaggcttaacattagtgcaaacagttgtattttagtttagatttagagtacacttatgtatgccttgtttgacaatgcttatttatgatatattgaatggtacttatttatattatattaattataatgttgttcaatata

SEQ ID NO: 77012 - DNA, 2421 bp, Zea Mays
cttccacaaaccccataaccctagcaccgccgccaccatgtcctcatctccatcttcagtgaaccgccgtcccccgggcccgctagcgttggggctggagtccttggggaagaagatcagcatcggctggtctccgtcccgggcggcatcctctccatctcgtgtcgcacctacgcgaccccactgggccatggcttctttccccgtggtgcaggtcttttcggtcctcaggcttcatccctgtgcaagtgcagggataattgcttctaatctcccgaggctgcataacctaattcagaggcagagcaagggggcgtgagggagatgagggagatcatcagcatccatatcgcgtaggcaggcatccagtgacacctctgtcgggatcgcgagggatgcgttcaacacgttcttcagtgaaacgggcgcagggaagcacgttccaagggccctgtttgtcgacttggagcccactgtgattgacgaggtgaagaccggggcgtaccgccggcttttccatcctgagcagctcatctcacacaaggaagatgctgcgaacaacttcgcccgtggacattacacaggctcaaaatgttcttggaaacaaggggactgaaattgcaaaggtagcacatcggcgaactgatgcggaggcgggcgtggaggcgctcgatgccgtccagcaatcagtagttgtcgctgcatcggcgacttctttcccccaccagcatggccgcgtgaatggttcagagagctgaccaccttctttgcttgtcgcttggaaccatcgcaaagttctttccaaagcctacagcttctaggaaatcggatacgatcacccgaaaaaggcaagggggaaatcttcttatagatctgttccgtcattgtgacaatcatttgggagagaaacaagtaaacaacccttttttccataaaactccatctggaagtgcacgacagccactacagttgactaccgatgtaaccaagatgatgcaaaagcatcagctggaaacgccatagttgctgctactgagtaccatccttatatccttatttcctaattgttgtggtgcatgtacaagtttttttaaaacgaattccgaattggttattgctgttagaactcatctgagtgctaccttctcatatgctccttttttctctctggctgttatgttaaaggaccagatacaagtcaatcttcccttcaaattacaatttaattattttatatctggattctgcaagacacttcaaaaaaaaatataacaacatgtggtccctatgttatctactagcatgagccattgttccatgcagtttggtacatagtggcgcatattttgttacatttactttctatattcttagtatatttatagcctatatccccaaactatatcatatacttagcacacacccattgttataatccacgtgcgcatggcgcgcgcactttactagtatacaacattgttggcaacaggagctgatctctttattacacgatgtattggcttggtttctaatgtccactttcccatccctgttttcccctccttcaggacttctttagtgatcttttggtacatcgctgctgatacaaacagcctacccagactgcttttgtgaagcacactgctttctgagaagccatttgcagtgcaaggatgaaacttggtcagagtgtttaccatatggattggcagccccaaataaagctctggattgtcctattcccatgacaaggttgtgctcttctcctgcagtgaaaccaaaaaagaaggcgcgctactgttcttccgttttcatgtcaatgcaacaacagataagtggaggtggcactaccaattccttgatgtaccaggaatgtttggattgttgtattctgacattgtttggctcaacatattcaagttggagtgtcaggtctccaacaattaaacaagatacggaatctgtgtaagcaagagcattcataccttgttagcttccttctctctctctcaagatcgatctagagaccaacaagatcatggacttcttcaagtttgacgtcgataacgtggtcatggtgaccggcgggaggaacaccgggcgtgtaggagtgatcaagaactaggagaagcacaaaggcagcttcgaggtcatcgacgtgctgcttggagctttttgcatgctatgtctagttttctcctatttgttgtacaggaaaacatagaatggaattcaaatttggtggtcgcaaaagtgtggagacttgaattcatataaagttaggcttaacattagtgcaaacagttgtattttagtttagatttagagtacacttatgtatgccttgtttgacaatgcttatttatgatatattgaatggtacttatttatattatattaattataatgttgttcaatata

SEQ ID NO: 77013 - DNA, 3200 bp, Zea Mays
cttccacaaaccccataaccctagcaccgccgccaccatgtcctcatctccatcttcagtgaaccgccgtcccccgggcccgctagcgttggggctggagtccttggggaagaagatcagcatcggctggtctccgtcccgggcggcatcctctccatctcgtgtcgcacctacgcgaccccactgggccatggcttctttccccgtggtgcaggtcttttcggtcctcaggcttcatccctgtgcaagtgcagggataattgcttctaatctcccgaggctgcataacctaattcagaggcagagcaagggggcgtgagggagatgagggagatcatcagcatccatatcgcgtaggcaggcatccagtgacacctctgtcgggatcgcgagggatgcgttcaacacgttcttcagtgaaacgggcgcagggaagcacgttccaagggccctgtttgtcgacttggagcccactgtgattgacgaggtgaagaccggggcgtaccgccggcttttccatcctgagcagctcatctcacacaaggaagatgctgcgaacaacttcgcccgtggacattacacaggctcaaaatgttcttggaaacaaggggactgaaattgcaaaggtagcacatcggcgaactgatgcggaggcgggcgtggaggcgctcgatgccgtccagcaatcagtagttgtcgctgcatcggcgacttctttcccccaccagcatggccgcgtgaatggttcaggtgagacgtcgttgctttgtttgattcgagagtgacgctgattcgaattcctactcgtgggaggtcagtttattcggattcaaccatgcatgtgatcgatctatcagagagctgaccaccttctttgcttgtcgcttggaaccatcgcaaagttctttccaaagcctacagcttctaggaaatcggatacgatcacccgaaaaaggcaagggggaaatcttcttatagatctgttccgtcattgtgacaatcatttgggagagaaacaagtaaacaacccttttttccataaaactccatctggaagtgcacgacagccactacagttgactaccgatgtaaccaagatgatgcaaaagcatcagctggaaacgccatagttgctgctactgagtaccatccttatatccttatttcctaattgttgtggtgcatgtacaagtttttttaaaacgaattccgaattggttattgctgttagaactcatctgagtgctaccttctcatatgctccttttttctctctggctgttatgttaaaggaccagatacaagtcaatcttcccttcaaattacaatttaattattttatatctggattctgcaagacacttcaaaaaaaaatataacaacatgtggtccctatgttatctactagcatgagccattgttccatgcagtttggtacatagtggcgcatattttgttacatttactttctatattcttagtatatttatagcctatatccccaaactatatcatatacttagcacacacccattgttataatccacgtgcgcatggcgcgcgcactttactagtatacaacattgttggcaacaggagctgatctctttattacacgatgtattggcttggtttctaatgtccactttcccatccctgttttcccctccttcaggacttctttagtgatcttttggtacatcgctgctgatacaaacagcctacccagactgcttttgtgaaggtatgtgcgtacctatattgcttcttgaggctgactcatgtgattggcggtgtttggaagatacattaaagtttaattcgacaaatgtcttttgcttagggctcctagcttggtgtttctttttctgtgatacttgtgcatgcgaagtaggtgaactgctacttaaatggtacatatttagcttaattacttactggtggcattgcagattatatgtttctgtcttaaagatacattagtaggctgtagtactcacactgcttctgttctcatctgttcacacactgcatctattcacagcatgattcagaggcatgcatgaggttgtagtaggcgagaccacccaaaagcactcccaacgcctgaccacaagagctagcagatagcagccctactgttggcaatccaataatcacatacgaagttttccttgaaattttttgagtcttgaattgacttcttccttaatttatagtttcaactcaaaacgaatacactattttttgttgaaccacattttcctctgctcagtttggcatcattattgtatcataatattatcataattaatccattctggtaaactgactctagaaaattttcttgaatggattcctatcttttacagtctaagctacattatgtgcatggaattttgcaatataccttctgtttcttgctcacatgattgatgtgattttgaattcatttagcacactgctttctgagaagccatttgcagtgcaaggatgaaacttggtcagagtgtttaccatatggattggcagtgaaaccaaaaaagaaggcgcgctactgttcttccgttttcatgtcaatgcaacaacagctatgcctggtgagtggagataagtggaggtggcactaccaattccttgatgtaccaggaatgtttggattgttgtattctgacattgtttggctcaacatattcaagttggagtgtcaggtctccaacaattaaacaagatacggaatctgtgtaagcaagagcattcataccttgttagcttccttctctctctctcaagatcgatctagagaccaacaagatcatggacttcttcaagtttgacgtcgataacgtggtcatggtgaccggcgggaggaacaccgggcgtgtaggagtgatcaagaactaggagaagcacaaaggcagcttcgaggtcatcgacgtgctgcttggagctttttgcatgctatgtctagttttctcctatttgttgtacaggaaaacatagaatggaattcaaatttggtggtcgcaaaagtgtggagacttgaattcatataaagttaggcttaacattagtgcaaacagttgtattttagtttagatttagagtacacttatgtatgccttgtttgacaatgcttatttatgatatattgaatggtacttatttatattatattaattataatgttgttcaatata

SEQ ID NO: 77014 - DNA, 2408 bp, Zea Mays
cttccacaaaccccataaccctagcaccgccgccaccatgtcctcatctccatcttcagtgaaccgccgtcccccgggcccgctagcgttggggctggagtccttggggaagaagatcagcatcggctggtctccgtcccgggcggcatcctctccatctcgtgtcgcacctacgcgaccccactgggccatggcttctttccccgtggtgcaggtcttttcggtcctcaggcttcatccctgtgcaagtgcagggataattgcttctaatctcccgaggctgcataacctaattcagaggcagagcaagggggcgtgagggagatgagggagatcatcagcatccatatcgcgtaggcaggcatccagtgacacctctgtcgggatcgcgagggatgcgttcaacacgttcttcagtgaaacgggcgcagggaagcacgttccaagggccctgtttgtcgacttggagcccactgtgattgacgaggtgaagaccggggcgtaccgccggcttttccatcctgagcagctcatctcacacaaggaagatgctgcgaacaacttcgcccgtggacattacacaggctcaaaatgttcttggaaacaaggggactgaaattgcaaaggtagcacatcggcgaactgatgcggaggcgggcgtggaggcgctcgatgccgtccagcaatcagtagttgtcgctgcatcggcgacttctttcccccaccagcatggccgcgtgaatggttcagttctttccaaagcctacagcttctaggaaatcggatacgatcacccgaaaaaggcaagggggaaatcttcttatagatctgttccgtcattgtgacaatcatttgggagagaaacaagtaaacaacccttttttccataaaactccatctggaagtgcacgacagccactacagttgactaccgatgtaaccaagatgatgcaaaagcatcagctggaaacgccatagttgctgctactgagtaccatccttatatccttatttcctaattgttgtggtgcatgtacaagtttttttaaaacgaattccgaattggttattgctgttagaactcatctgagtgctaccttctcatatgctccttttttctctctggctgttatgttaaaggaccagatacaagtcaatcttcccttcaaattacaatttaattattttatatctggattctgcaagacacttcaaaaaaaaatataacaacatgtggtccctatgttatctactagcatgagccattgttccatgcagtttggtacatagtggcgcatattttgttacatttactttctatattcttagtatatttatagcctatatccccaaactatatcatatacttagcacacacccattgttataatccacgtgcgcatggcgcgcgcactttactagtatacaacattgttggcaacaggagctgatctctttattacacgatgtattggcttggtttctaatgtccactttcccatccctgttttcccctccttcaggacttctttagtgatcttttggtacatcgctgctgatacaaacagcctacccagactgcttttgtgaagcacactgctttctgagaagccatttgcagtgcaaggatgaaacttggtcagagtgtttaccatatggattggcagccccaaataaagctctggattgtcctattcccatgacaaggttgtgctcttctcctgcagtgaaaccaaaaaagaaggcgcgctactgttcttccgttttcatgtcaatgcaacaacagattactgatatagctatgcctggtgagtggagataagtggaggtggcactaccaattccttgatgtaccaggaatgtttggattgttgtattctgacattgtttggctcaacatattcaagttggagtgtcaggtctccaacaattaaacaagatacggaatctgtgtaagcaagagcattcataccttgttagcttccttctctctctctcaagatcgatctagagaccaacaagatcatggacttcttcaagtttgacgtcgataacgtggtcatggtgaccggcgggaggaacaccgggcgtgtaggagtgatcaagaactaggagaagcacaaaggcagcttcgaggtcatcgacgtgctgcttggagctttttgcatgctatgtctagttttctcctatttgttgtacaggaaaacatagaatggaattcaaatttggtggtcgcaaaagtgtggagacttgaattcatataaagttaggcttaacattagtgcaaacagttgtattttagtttagatttagagtacacttatgtatgccttgtttgacaatgcttatttatgatatattgaatggtacttatttatattatattaattataatgttgttcaatata

SEQ ID NO: 77015 - DNA, 1816 bp, Zea Mays
cttccacaaaccccataaccctagcaccgccgccaccatgtcctcatctccatcttcagtgaaccgccgtcccccgggcccgctagcgttggggctggagtccttggggaagaagatcagcatcggctggtctccgtcccgggcggcatcctctccatctcgtgtcgcacctacgcgaccccactgggccatggcttctttccccgtggtgcaggtcttttcggtcctcaggcttcatccctgtgcaagtgcagggataattgcttctaatctcccgaggctgcataacctaattcagaggcagagcaagggggcgtgagggagatgagggagatcatcagcatccatatcgcgtaggcaggcatccagtgacacctctgtcgggatcgcgagggatgcgttcaacacgttcttcagtgaaacgggcgcagggaagcacgttccaagggccctgtttgtcgacttggagcccactgtgattgacgaggtgaagaccggggcgtaccgccggcttttccatcctgagcagctcatctcacacaaggaagatgctgcgaacaacttcgcccgtggacattacacaggctcaaaatgttcttggaaacaaggggactgaaattgcaaaggtagcacatcggcgaactgatgcggaggcgggcgtggaggcgctcgatgccgtccagcaatcagtagttgtcgctgcatcggcgacttctttcccccaccagcatggccgcgtgaatggttcagttctttccaaagcctacagcttctaggaaatcggatacgatcacccgaaaaaggcaagggggaaatcttcttatagatctgttccgtcattgtgacaatcatttgggagagaaacaagtaaacaacccttttttccataaaactccatctggaagtgcacgacagccactacagttgactaccgatgtaaccaagatgatgcaaaagcatcagctggaaacgccatagttgctgctactgagacttctttagtgatcttttggtacatcgctgctgatacaaacagcctacccagactgcttttgtgaagcacactgctttctgagaagccatttgcagtgcaaggatgaaacttggtcagagtgtttaccatatggattggcagtgaaaccaaaaaagaaggcgcgctactgttcttccgttttcatgtcaatgcaacaacagattactgatatagctatgcctggtgagtggagataagtggaggtggcactaccaattccttgatgtaccaggaatgtttggattgttgtattctgacattgtttggctcaacatattcaagttggagtgtcaggtctccaacaattaaacaagatacggaatctgtgtaagcaagagcattcataccttgttagcttccttctctctctctcaagatcgatctagagaccaacaagatcatggacttcttcaagtttgacgtcgataacgtggtcatggtgaccggcgggaggaacaccgggcgtgtaggagtgatcaagaactaggagaagcacaaaggcagcttcgaggtcatcgacgtgctgcttggagctttttgcatgctatgtctagttttctcctatttgttgtacaggaaaacatagaatggaattcaaatttggtggtcgcaaaagtgtggagacttgaattcatataaagttaggcttaacattagtgcaaacagttgtattttagtttagatttagagtacacttatgtatgccttgtttgacaatgcttatttatgatatattgaatggtacttatttatattatattaattataatgttgttcaatata

SEQ ID NO: 77016 - DNA, 2316 bp, Zea Mays
cttccacaaaccccataaccctagcaccgccgccaccatgtcctcatctccatcttcagtgaaccgccgtcccccgggcccgctagcgttggggctggagtccttggggaagaagatcagcatcggctggtctccgtcccgggcggcatcctctccatctcgtgtcgcacctacgcgaccccactgggccatggcttctttccccgtggtgcaggtcttttcggtcctcaggcttcatccctgtgcaagtgcagggataattgcttctaatctcccgaggctgcataacctaattcagaggcagagcaagggggcgtgagggagatgagggagatcatcagcatccatatcgcgtaggcaggcatccagtgacacctctgtcgggatcgcgagggatgcgttcaacacgttcttcagtgaaacgggcgcagggaagcacgttccaagggccctgtttgtcgacttggagcccactgtgattgacgaggtgaagaccggggcgtaccgccggcttttccatcctgagcagctcatctcacacaaggaagatgctgcgaacaacttcgcccgtggacattacacaggctcaaaatgttcttggaaacaaggggactgaaattgcaaaggtagcacatcggcgaactgatgcggaggcgggcgtggaggcgctcgatgccgtccagcaatcagtagttgtcgctgcatcggcgacttctttcccccaccagcatggccgcgtgaatggttcagttctttccaaagcctacagcttctaggaaatcggatacgatcacccgaaaaaggcaagggggaaatcttcttatagatctgttccgtcattgtgacaatcatttgggagagaaacaagtaaacaacccttttttccataaaactccatctggaagtgcacgacagccactacagttgactaccgatgtaaccaagatgatgcaaaagcatcagctggaaacgccatagttgctgctactgagtaccatccttatatccttatttcctaattgttgtggtgcatgtacaagtttttttaaaacgaattccgaattggttattgctgttagaactcatctgagtgctaccttctcatatgctccttttttctctctggctgttatgttaaaggaccagatacaagtcaatcttcccttcaaattacaatttaattattttatatctggattctgcaagacacttcaaaaaaaaatataacaacatgtggtccctatgttatctactagcatgagccattgttccatgcagtttggtacatagtggcgcatattttgttacatttactttctatattcttagtatatttatagcctatatccccaaactatatcatatacttagcacacacccattgttataatccacgtgcgcatggcgcgcgcactttactagtatacaacattgttggcaacaggagctgatctctttattacacgatgtattggcttggtttctaatgtccactttcccatccctgttttcccctccttcaggacttctttagtgatcttttggtacatcgctgctgatacaaacagcctacccagactgcttttgtgaagcacactgctttctgagaagccatttgcagtgcaaggatgaaacttggtcagagtgtttaccatatggattggcagtgaaaccaaaaaagaaggcgcgctactgttcttccgttttcatgtcaatgcaacaacagataagtggaggtggcactaccaattccttgatgtaccaggaatgtttggattgttgtattctgacattgtttggctcaacatattcaagttggagtgtcaggtctccaacaattaaacaagatacggaatctgtgtaagcaagagcattcataccttgttagcttccttctctctctctcaagatcgatctagagaccaacaagatcatggacttcttcaagtttgacgtcgataacgtggtcatggtgaccggcgggaggaacaccgggcgtgtaggagtgatcaagaactaggagaagcacaaaggcagcttcgaggtcatcgacgtgctgcttggagctttttgcatgctatgtctagttttctcctatttgttgtacaggaaaacatagaatggaattcaaatttggtggtcgcaaaagtgtggagacttgaattcatataaagttaggcttaacattagtgcaaacagttgtattttagtttagatttagagtacacttatgtatgccttgtttgacaatgcttatttatgatatattgaatggtacttatttatattatattaattataatgttgttcaatata

SEQ ID NO: 77017 - DNA, 3050 bp, Zea Mays
cttccacaaaccccataaccctagcaccgccgccaccatgtcctcatctccatcttcagtgaaccgccgtcccccgggcccgctagcgttggggctggagtccttggggaagaagatcagcatcggctggtctccgtcccgggcggcatcctctccatctcgtgtcgcacctacgcgaccccactgggccatggcttctttccccgtgacacctctgtcgggatcgcgagggatgcgttcaacacgttcttcagtgaaacgggcgcagggaagcacgttccaagggccctgtttgtcgacttggagcccactgtgattgacgaggtgaagaccggggcgtaccgccggcttttccatcctgagcagctcatctcacacaaggaagatgctgcgaacaacttcgcccgtggacattacacaggctcaaaatgttcttggaaacaaggggactgaaattgcaaaggtagcacatcggcgaactgatgcggaggcgggcgtggaggcgctcgatgccgtccagcaatcagtagttgtcgctgcatcggcgacttctttcccccaccagcatggccgcgtgaatggttcaggtgagacgtcgttgctttgtttgattcgagagtgacgctgattcgaattcctactcgtgggaggtcagtttattcggattcaaccatgcatgtgatcgatctatcagagagctgaccaccttctttgcttgtcgcttggaaccatcgcaaagttctttccaaagcctacagcttctaggaaatcggatacgatcacccgaaaaaggcaagggggaaatcttcttatagatctgttccgtcattgtgacaatcatttgggagagaaacaagtaaacaacccttttttccataaaactccatctggaagtgcacgacagccactacagttgactaccgatgtaaccaagatgatgcaaaagcatcagctggaaacgccatagttgctgctactgagtaccatccttatatccttatttcctaattgttgtggtgcatgtacaagtttttttaaaacgaattccgaattggttattgctgttagaactcatctgagtgctaccttctcatatgctccttttttctctctggctgttatgttaaaggaccagatacaagtcaatcttcccttcaaattacaatttaattattttatatctggattctgcaagacacttcaaaaaaaaatataacaacatgtggtccctatgttatctactagcatgagccattgttccatgcagtttggtacatagtggcgcatattttgttacatttactttctatattcttagtatatttatagcctatatccccaaactatatcatatacttagcacacacccattgttataatccacgtgcgcatggcgcgcgcactttactagtatacaacattgttggcaacaggagctgatctctttattacacgatgtattggcttggtttctaatgtccactttcccatccctgttttcccctccttcaggacttctttagtgatcttttggtacatcgctgctgatacaaacagcctacccagactgcttttgtgaaggtatgtgcgtacctatattgcttcttgaggctgactcatgtgattggcggtgtttggaagatacattaaagtttaattcgacaaatgtcttttgcttagggctcctagcttggtgtttctttttctgtgatacttgtgcatgcgaagtaggtgaactgctacttaaatggtacatatttagcttaattacttactggtggcattgcagattatatgtttctgtcttaaagatacattagtaggctgtagtactcacactgcttctgttctcatctgttcacacactgcatctattcacagcatgattcagaggcatgcatgaggttgtagtaggcgagaccacccaaaagcactcccaacgcctgaccacaagagctagcagatagcagccctactgttggcaatccaataatcacatacgaagttttccttgaaattttttgagtcttgaattgacttcttccttaatttatagtttcaactcaaaacgaatacactattttttgttgaaccacattttcctctgctcagtttggcatcattattgtatcataatattatcataattaatccattctggtaaactgactctagaaaattttcttgaatggattcctatcttttacagtctaagctacattatgtgcatggaattttgcaatataccttctgtttcttgctcacatgattgatgtgattttgaattcatttagcacactgctttctgagaagccatttgcagtgcaaggatgaaacttggtcagagtgtttaccatatggattggcagtgaaaccaaaaaagaaggcgcgctactgttcttccgttttcatgtcaatgcaacaacagattactgatatagctatgcctggtgagtggagataagtggaggtggcactaccaattccttgatgtaccaggaatgtttggattgttgtattctgacattgtttggctcaacatattcaagttggagtgtcaggtctccaacaattaaacaagatacggaatctgtgtaagcaagagcattcataccttgttagcttccttctctctctctcaagatcgatctagagaccaacaagatcatggacttcttcaagtttgacgtcgataacgtggtcatggtgaccggcgggaggaacaccgggcgtgtaggagtgatcaagaactaggagaagcacaaaggcagcttcgaggtcatcgacgtgctgcttggagctttttgcatgctatgtctagttttctcctatttgttgtacaggaaaacatagaatggaattcaaatttggtggtcgcaaaagtgtggagacttgaattcatataaagttaggcttaacattagtgcaaacagttgtattttagtttagatttagagtacacttatgtatgccttgtttgacaatgcttatttatgatatattgaatggtacttatttatattatattaattataatgttgttcaatata

SEQ ID NO: 77018 - DNA, 2393 bp, Zea Mays
cttccacaaaccccataaccctagcaccgccgccaccatgtcctcatctccatcttcagtgaaccgccgtcccccgggcccgctagcgttggggctggagtccttggggaagaagatcagcatcggctggtctccgtcccgggcggcatcctctccatctcgtgtcgcacctacgcgaccccactgggccatggcttctttccccgtggtgcaggtcttttcggtcctcaggcttcatccctgtgcaagtgcagggataattgcttctaatctcccgaggctgcataacctaattcagaggcagagcaagggggcgtgagggagatgagggagatcatcagcatccatatcgcgtaggcaggcatccagtgacacctctgtcgggatcgcgagggatgcgttcaacacgttcttcagtgaaacgggcgcagggaagcacgttccaagggccctgtttgtcgacttggagcccactgtgattgacgaggtgaagaccggggcgtaccgccggcttttccatcctgagcagctcatctcacacaaggaagatgctgcgaacaacttcgcccgtggacattacacaggctcaaaatgttcttggaaacaaggggactgaaattgcaaaggtagcacatcggcgaactgatgcggaggcgggcgtggaggcgctcgatgccgtccagcaatcagtagttgtcgctgcatcggcgacttctttcccccaccagcatggccgcgtgaatggttcagttctttccaaagcctacagcttctaggaaatcggatacgatcacccgaaaaaggcaagggggaaatcttcttatagatctgttccgtcattgtgacaatcatttgggagagaaacaagtaaacaacccttttttccataaaactccatctggaagtgcacgacagccactacagttgactaccgatgtaaccaagatgatgcaaaagcatcagctggaaacgccatagttgctgctactgagacttctttagtgatcttttggtacatcgctgctgatacaaacagcctacccagactgcttttgtgaagggctcctagcttggtgtttctttttctgtgatacttgtgcatgcgaagtaggtgaactgctacttaaatggtacatatttagcttaattacttactggtggcattgcagattatatgtttctgtcttaaagatacattagtaggctgtagtactcacactgcttctgttctcatctgttcacacactgcatctattcacagcatgattcagaggcatgcatgaggttgtagtaggcgagaccacccaaaagcactcccaacgcctgaccacaagagctagcagatagcagccctactgttggcaatccaataatcacatacgaagttttccttgaaattttttgagtcttgaattgacttcttccttaatttatagtttcaactcaaaacgaatacactattttttgttgaaccacattttcctctgctcagtttggcatcattattgtatcataatattatcataattaatccattctggtaaactgactctagaaaattttcttgaatggattcctatcttttacagtctaagctacattatgtgcatggaattttgcaatataccttctgtttcttgctcacatgattgatgtgattttgaattcatttagcacactgctttctgagaagccatttgcagtgcaaggatgaaacttggtcagagtgtttaccatatggattggcagtgaaaccaaaaaagaaggcgcgctactgttcttccgttttcatgtcaatgcaacaacagtggaggtggcactaccaattccttgatgtaccaggaatgtttggattgttgtattctgacattgtttggctcaacatattcaagttggagtgtcaggtctccaacaattaaacaagatacggaatctgtgtaagcaagagcattcataccttgttagcttccttctctctctctcaagatcgatctagagaccaacaagatcatggacttcttcaagtttgacgtcgataacgtggtcatggtgaccggcgggaggaacaccgggcgtgtaggagtgatcaagaactaggagaagcacaaaggcagcttcgaggtcatcgacgtgctgcttggagctttttgcatgctatgtctagttttctcctatttgttgtacaggaaaacatagaatggaattcaaatttggtggtcgcaaaagtgtggagacttgaattcatataaagttaggcttaacattagtgcaaacagttgtattttagtttagatttagagtacacttatgtatgccttgtttgacaatgcttatttatgatatattgaatggtacttatttatattatattaattataatgttgttcaatata

SEQ ID NO: 77019 - DNA, 2338 bp, Zea Mays
cttccacaaaccccataaccctagcaccgccgccaccatgtcctcatctccatcttcagtgaaccgccgtcccccgggcccgctagcgttggggctggagtccttggggaagaagatcagcatcggctggtctccgtcccgggcggcatcctctccatctcgtgtcgcacctacgcgaccccactgggccatggcttctttccccgtgacacctctgtcgggatcgcgagggatgcgttcaacacgttcttcagtgaaacgggcgcagggaagcacgttccaagggccctgtttgtcgacttggagcccactgtgattgacgaggtgaagaccggggcgtaccgccggcttttccatcctgagcagctcatctcacacaaggaagatgctgcgaacaacttcgcccgtggacattacacaggctcaaaatgttcttggaaacaaggggactgaaattgcaaaggtagcacatcggcgaactgatgcggaggcgggcgtggaggcgctcgatgccgtccagcaatcagtagttgtcgctgcatcggcgacttctttcccccaccagcatggccgcgtgaatggttcagtttattcggattcaaccatgcatgtgatcgatctatcagagagctgaccaccttctttgcttgtcgcttggaaccatcgcaaagttctttccaaagcctacagcttctaggaaatcggatacgatcacccgaaaaaggcaagggggaaatcttcttatagatctgttccgtcattgtgacaatcatttgggagagaaacaagtaaacaacccttttttccataaaactccatctggaagtgcacgacagccactacagttgactaccgatgtaaccaagatgatgcaaaagcatcagctggaaacgccatagttgctgctactgagacttctttagtgatcttttggtacatcgctgctgatacaaacagcctacccagactgcttttgtgaagggctcctagcttggtgtttctttttctgtgatacttgtgcatgcgaagtaggtgaactgctacttaaatggtacatatttagcttaattacttactggtggcattgcagattatatgtttctgtcttaaagatacattagtaggctgtagtactcacactgcttctgttctcatctgttcacacactgcatctattcacagcatgattcagaggcatgcatgaggttgtagtaggcgagaccacccaaaagcactcccaacgcctgaccacaagagctagcagatagcagccctactgttggcaatccaataatcacatacgaagttttccttgaaattttttgagtcttgaattgacttcttccttaatttatagtttcaactcaaaacgaatacactattttttgttgaaccacattttcctctgctcagtttggcatcattattgtatcataatattatcataattaatccattctggtaaactgactctagaaaattttcttgaatggattcctatcttttacagtctaagctacattatgtgcatggaattttgcaatataccttctgtttcttgctcacatgattgatgtgattttgaattcatttagcacactgctttctgagaagccatttgcagtgcaaggatgaaacttggtcagagtgtttaccatatggattggcagtgaaaccaaaaaagaaggcgcgctactgttcttccgttttcatgtcaatgcaacaacagctatgcctggtgagtggagataagtggaggtggcactaccaattccttgatgtaccaggaatgtttggattgttgtattctgacattgtttggctcaacatattcaagttggagtgtcaggtctccaacaattaaacaagatacggaatctgtgtaagcaagagcattcataccttgttagcttccttctctctctctcaagatcgatctagagaccaacaagatcatggacttcttcaagtttgacgtcgataacgtggtcatggtgaccggcgggaggaacaccgggcgtgtaggagtgatcaagaactaggagaagcacaaaggcagcttcgaggtcatcgacgtgctgcttggagctttttgcatgctatgtctagttttctcctatttgttgtacaggaaaacatagaatggaattcaaatttggtggtcgcaaaagtgtggagacttgaattcatataaagttaggcttaacattagtgcaaacagttgtattttagtttagatttagagtacacttatgtatgccttgtttgacaatgcttatttatgatatattgaatggtacttatttatattatattaattataatgttgttcaatata

SEQ ID NO: 77020 - DNA, 2573 bp, Zea Mays
cttccacaaaccccataaccctagcaccgccgccaccatgtcctcatctccatcttcagtgaaccgccgtcccccgggcccgctagcgttggggctggagtccttggggaagaagatcagcatcggctggtctccgtcccgggcggcatcctctccatctcgtgtcgcacctacgcgaccccactgggccatggcttctttccccgtggtgcaggtcttttcggtcctcaggcttcatccctgtgcaagtgcagggataattgcttctaatctcccgaggctgcataacctaattcagaggcagagcaagggggcgtgagggagatgagggagatcatcagcatccatatcgcgtaggcaggcatccagtgacacctctgtcgggatcgcgagggatgcgttcaacacgttcttcagtgaaacgggcgcagggaagcacgttccaagggccctgtttgtcgacttggagcccactgtgattgacgaggtgaagaccggggcgtaccgccggcttttccatcctgagcagctcatctcacacaaggaagatgctgcgaacaacttcgcccgtggacattacacaggctcaaaatgttcttggaaacaaggggactgaaattgcaaaggtagcacatcggcgaactgatgcggaggcgggcgtggaggcgctcgatgccgtccagcaatcagtagttgtcgctgcatcggcgacttctttcccccaccagcatggccgcgtgaatggttcaggtgagacgtcgttgctttgtttgattcgagagtgacgctgattcgaattcctactcgtgggaggtcagtttattcggattcaaccatgcatgtgatcgatctatcagagagctgaccaccttctttgcttgtcgcttggaaccatcgcaaagttctttccaaagcctacagcttctaggaaatcggatacgatcacccgaaaaaggcaagggggaaatcttcttatagatctgttccgtcattgtgacaatcatttgggagagaaacaagtaaacaacccttttttccataaaactccatctggaagtgcacgacagccactacagttgactaccgatgtaaccaagatgatgcaaaagcatcagctggaaacgccatagttgctgctactgagacttctttagtgatcttttggtacatcgctgctgatacaaacagcctacccagactgcttttgtgaagcttggtgtttctttttctgtgatacttgtgcatgcgaagtaggtgaactgctacttaaatggtacatatttagcttaattacttactggtggcattgcagattatatgtttctgtcttaaagatacattagtaggctgtagtactcacactgcttctgttctcatctgttcacacactgcatctattcacagcatgattcagaggcatgcatgaggttgtagtaggcgagaccacccaaaagcactcccaacgcctgaccacaagagctagcagatagcagccctactgttggcaatccaataatcacatacgaagttttccttgaaattttttgagtcttgaattgacttcttccttaatttatagtttcaactcaaaacgaatacactattttttgttgaaccacattttcctctgctcagtttggcatcattattgtatcataatattatcataattaatccattctggtaaactgactctagaaaattttcttgaatggattcctatcttttacagtctaagctacattatgtgcatggaattttgcaatataccttctgtttcttgctcacatgattgatgtgattttgaattcatttagcacactgctttctgagaagccatttgcagtgcaaggatgaaacttggtcagagtgtttaccatatggattggcagtgaaaccaaaaaagaaggcgcgctactgttcttccgttttcatgtcaatgcaacaacagattactgatatagctatgcctggtgagtggagataagtggaggtggcactaccaattccttgatgtaccaggaatgtttggattgttgtattctgacattgtttggctcaacatattcaagttggagtgtcaggtctccaacaattaaacaagatacggaatctgtgtaagcaagagcattcataccttgttagcttccttctctctctctcaagatcgatctagagaccaacaagatcatggacttcttcaagtttgacgtcgataacgtggtcatggtgaccggcgggaggaacaccgggcgtgtaggagtgatcaagaactaggagaagcacaaaggcagcttcgaggtcatcgacgtgctgcttggagctttttgcatgctatgtctagttttctcctatttgttgtacaggaaaacatagaatggaattcaaatttggtggtcgcaaaagtgtggagacttgaattcatataaagttaggcttaacattagtgcaaacagttgtattttagtttagatttagagtacacttatgtatgccttgtttgacaatgcttatttatgatatattgaatggtacttatttatattatattaattataatgttgttcaatata

SEQ ID NO: 77021 - DNA, 1755 bp, Zea Mays
cttccacaaaccccataaccctagcaccgccgccaccatgtcctcatctccatcttcagtgaaccgccgtcccccgggcccgctagcgttggggctggagtccttggggaagaagatcagcatcggctggtctccgtcccgggcggcatcctctccatctcgtgtcgcacctacgcgaccccactgggccatggcttctttccccgtggtgcaggtcttttcggtcctcaggcttcatccctgtgcaagtgcagggataattgcttctaatctcccgaggctgcataacctaattcagaggcagagcaagggggcgtgagggagatgagggagatcatcagcatccatatcgcgtaggcaggcatccagtgacacctctgtcgggatcgcgagggatgcgttcaacacgttcttcagtgaaacgggcgcagggaagcacgttccaagggccctgtttgtcgacttggagcccactgtgattgacgaggtgaagaccggggcgtaccgccggcttttccatcctgagcagctcatctcacacaaggaagatgctgcgaacaacttcgcccgtggacattacacaggctcaaaatgttcttggaaacaaggggactgaaattgcaaaggtagcacatcggcgaactgatgcggaggcgggcgtggaggcgctcgatgccgtccagcaatcagtagttgtcgctgcatcggcgacttctttcccccaccagcatggccgcgtgaatggttcagttctttccaaagcctacagcttctaggaaatcggatacgatcacccgaaaaaggcaagggggaaatcttcttatagatctgttccgtcattgtgacaatcatttgggagagaaacaagtaaacaacccttttttccataaaactccatctggaagtgcacgacagccactacagttgactaccgatgtaaccaagatgatgcaaaagcatcagctggaaacgccatagttgctgctactgagacttctttagtgatcttttggtacatcgctgctgatacaaacagcctacccagactgcttttgtgaagtgcaaggatgaaacttggtcagagtgtttaccatatggattggcagtgaaaccaaaaaagaaggcgcgctactgttcttccgttttcatgtcaatgcaacaacagataagtggaggtggcactaccaattccttgatgtaccaggaatgtttggattgttgtattctgacattgtttggctcaacatattcaagttggagtgtcaggtctccaacaattaaacaagatacggaatctgtgtaagcaagagcattcataccttgttagcttccttctctctctctcaagatcgatctagagaccaacaagatcatggacttcttcaagtttgacgtcgataacgtggtcatggtgaccggcgggaggaacaccgggcgtgtaggagtgatcaagaactaggagaagcacaaaggcagcttcgaggtcatcgacgtgctgcttggagctttttgcatgctatgtctagttttctcctatttgttgtacaggaaaacatagaatggaattcaaatttggtggtcgcaaaagtgtggagacttgaattcatataaagttaggcttaacattagtgcaaacagttgtattttagtttagatttagagtacacttatgtatgccttgtttgacaatgcttatttatgatatattgaatggtacttatttatattatattaattataatgttgttcaatata

SEQ ID NO: 77022 - DNA, 2400 bp, Zea Mays
cttccacaaaccccataaccctagcaccgccgccaccatgtcctcatctccatcttcagtgaaccgccgtcccccgggcccgctagcgttggggctggagtccttggggaagaagatcagcatcggctggtctccgtcccgggcggcatcctctccatctcgtgtcgcacctacgcgaccccactgggccatggcttctttccccgtggtgcaggtcttttcggtcctcaggcttcatccctgtgcaagtgcagggataattgcttctaatctcccgaggctgcataacctaattcagaggcagagcaagggggcgtgagggagatgagggagatcatcagcatccatatcgcgtaggcaggcatccagtgacacctctgtcgggatcgcgagggatgcgttcaacacgttcttcagtgaaacgggcgcagggaagcacgttccaagggccctgtttgtcgacttggagcccactgtgattgacgaggtgaagaccggggcgtaccgccggcttttccatcctgagcagctcatctcacacaaggaagatgctgcgaacaacttcgcccgtggacattacacaggctcaaaatgttcttggaaacaaggggactgaaattgcaaaggtagcacatcggcgaactgatgcggaggcgggcgtggaggcgctcgatgccgtccagcaatcagtagttgtcgctgcatcggcgacttctttcccccaccagcatggccgcgtgaatggttcagtttattcggattcaaccatgcatgtgatcgatctatcagagagctgaccaccttctttgcttgtcgcttggaaccatcgcaaagttctttccaaagcctacagcttctaggaaatcggatacgatcacccgaaaaaggcaagggggaaatcttcttatagatctgttccgtcattgtgacaatcatttgggagagaaacaagtaaacaacccttttttccataaaactccatctggaagtgcacgacagccactacagttgactaccgatgtaaccaagatgatgcaaaagcatcagctggaaacgccatagttgctgctactgagtaccatccttatatccttatttcctaattgttgtggtgcatgtacaagtttttttaaaacgaattccgaattggttattgctgttagaactcatctgagtgctaccttctcatatgctccttttttctctctggctgttatgttaaaggaccagatacaagtcaatcttcccttcaaattacaatttaattattttatatctggattctgcaagacacttcaaaaaaaaatataacaacatgtggtccctatgttatctactagcatgagccattgttccatgcagtttggtacatagtggcgcatattttgttacatttactttctatattcttagtatatttatagcctatatccccaaactatatcatatacttagcacacacccattgttataatccacgtgcgcatggcgcgcgcactttactagtatacaacattgttggcaacaggagctgatctctttattacacgatgtattggcttggtttctaatgtccactttcccatccctgttttcccctccttcaggacttctttagtgatcttttggtacatcgctgctgatacaaacagcctacccagactgcttttgtgaagcacactgctttctgagaagccatttgcagtgcaaggatgaaacttggtcagagtgtttaccatatggattggcagtgaaaccaaaaaagaaggcgcgctactgttcttccgttttcatgtcaatgcaacaacagataagtggaggtggcactaccaattccttgatgtaccaggaatgtttggattgttgtattctgacattgtttggctcaacatattcaagttggagtgtcaggtctccaacaattaaacaagatacggaatctgtgtaagcaagagcattcataccttgttagcttccttctctctctctcaagatcgatctagagaccaacaagatcatggacttcttcaagtttgacgtcgataacgtggtcatggtgaccggcgggaggaacaccgggcgtgtaggagtgatcaagaactaggagaagcacaaaggcagcttcgaggtcatcgacgtgctgcttggagctttttgcatgctatgtctagttttctcctatttgttgtacaggaaaacatagaatggaattcaaatttggtggtcgcaaaagtgtggagacttgaattcatataaagttaggcttaacattagtgcaaacagttgtattttagtttagatttagagtacacttatgtatgccttgtttgacaatgcttatttatgatatattgaatggtacttatttatattatattaattataatgttgttcaatata

SEQ ID NO: 77023 - DNA, 1784 bp, Zea Mays
cttccacaaaccccataaccctagcaccgccgccaccatgtcctcatctccatcttcagtgaaccgccgtcccccgggcccgctagcgttggggctggagtccttggggaagaagatcagcatcggctggtctccgtcccgggcggcatcctctccatctcgtgtcgcacctacgcgaccccactgggccatggcttctttccccgtggtgcaggtcttttcggtcctcaggcttcatccctgtgcaagtgcagggataattgcttctaatctcccgaggctgcataacctaattcagaggcagagcaagggggcgtgagggagatgagggagatcatcagcatccatatcgcgtaggcaggcatccagtgacacctctgtcgggatcgcgagggatgcgttcaacacgttcttcagtgaaacgggcgcagggaagcacgttccaagggccctgtttgtcgacttggagcccactgtgattgacgaggtgaagaccggggcgtaccgccggcttttccatcctgagcagctcatctcacacaaggaagatgctgcgaacaacttcgcccgtggacattacacaggctcaaaatgttcttggaaacaaggggactgaaattgcaaaggtagcacatcggcgaactgatgcggaggcgggcgtggaggcgctcgatgccgtccagcaatcagtagttgtcgctgcatcggcgacttctttcccccaccagcatggccgcgtgaatggttcagttctttccaaagcctacagcttctaggaaatcggatacgatcacccgaaaaaggcaagggggaaatcttcttatagatctgttccgtcattgtgacaatcatttgggagagaaacaagtaaacaacccttttttccataaaactccatctggaagtgcacgacagccactacagttgactaccgatgtaaccaagatgatgcaaaagcatcagctggaaacgccatagttgctgctactgagacttctttagtgatcttttggtacatcgctgctgatacaaacagcctacccagactgcttttgtgaagcacactgctttctgagaagccatttgcagtgcaaggatgaaacttggtcagagtgtttaccatatggattggcagtgaaaccaaaaaagaaggcgcgctactgttcttccgttttcatgtcaatgcaacaacagataagtggaggtggcactaccaattccttgatgtaccaggaatgtttggattgttgtattctgacattgtttggctcaacatattcaagttggagtgtcaggtctccaacaattaaacaagatacggaatctgtgtaagcaagagcattcataccttgttagcttccttctctctctctcaagatcgatctagagaccaacaagatcatggacttcttcaagtttgacgtcgataacgtggtcatggtgaccggcgggaggaacaccgggcgtgtaggagtgatcaagaactaggagaagcacaaaggcagcttcgaggtcatcgacgtgctgcttggagctttttgcatgctatgtctagttttctcctatttgttgtacaggaaaacatagaatggaattcaaatttggtggtcgcaaaagtgtggagacttgaattcatataaagttaggcttaacattagtgcaaacagttgtattttagtttagatttagagtacacttatgtatgccttgtttgacaatgcttatttatgatatattgaatggtacttatttatattatattaattataatgttgttcaatata

SEQ ID NO: 77024 - DNA, 1920 bp, Zea Mays
cttccacaaaccccataaccctagcaccgccgccaccatgtcctcatctccatcttcagtgaaccgccgtcccccgggcccgctagcgttggggctggagtccttggggaagaagatcagcatcggctggtctccgtcccgggcggcatcctctccatctcgtgtcgcacctacgcgaccccactgggccatggcttctttccccgggataattgcttctaatctcccgaggctgcataacctaattcagaggcagagcaagggggcgtgagggagatgagggagatcatcagcatccatatcgcgtaggcaggcatccagtgacacctctgtcgggatcgcgagggatgcgttcaacacgttcttcagtgaaacgggcgcagggaagcacgttccaagggccctgtttgtcgacttggagcccactgtgattgacgaggtgaagaccggggcgtaccgccggcttttccatcctgagcagctcatctcacacaaggaagatgctgcgaacaacttcgcccgtggacattacacaggctcaaaatgttcttggaaacaaggggactgaaattgcaaaggtagcacatcggcgaactgatgcggaggcgggcgtggaggcgctcgatgccgtccagcaatcagtagttgtcgctgcatcggcgacttctttcccccaccagcatggccgcgtgaatggttcaggtgagacgtcgttgctttgtttgattcgagagtgacgctgattcgaattcctactcgtgggaggtcagtttattcggattcaaccatgcatgtgatcgatctatcagagagctgaccaccttctttgcttgtcgcttggaaccatcgcaaagttctttccaaagcctacagcttctaggaaatcggatacgatcacccgaaaaaggcaagggggaaatcttcttatagatctgttccgtcattgtgacaatcatttgggagagaaacaagtaaacaacccttttttccataaaactccatctggaagtgcacgacagccactacagttgactaccgatgtaaccaagatgatgcaaaagcatcagctggaaacgccatagttgctgctactgagacttctttagtgatcttttggtacatcgctgctgatacaaacagcctacccagactgcttttgtgaagcacactgctttctgagaagccatttgcagtgcaaggatgaaacttggtcagagtgtttaccatatggattggcagtgaaaccaaaaaagaaggcgcgctactgttcttccgttttcatgtcaatgcaacaacagattactgatatagctatgcctggtgagtggagataagtggaggtggcactaccaattccttgatgtaccaggaatgtttggattgttgtattctgacattgtttggctcaacatattcaagttggagtgtcaggtctccaacaattaaacaagatacggaatctgtgtaagcaagagcattcataccttgttagcttccttctctctctctcaagatcgatctagagaccaacaagatcatggacttcttcaagtttgacgtcgataacgtggtcatggtgaccggcgggaggaacaccgggcgtgtaggagtgatcaagaactaggagaagcacaaaggcagcttcgaggtcatcgacgtgctgcttggagctttttgcatgctatgtctagttttctcctatttgttgtacaggaaaacatagaatggaattcaaatttggtggtcgcaaaagtgtggagacttgaattcatataaagttaggcttaacattagtgcaaacagttgtattttagtttagatttagagtacacttatgtatgccttgtttgacaatgcttatttatgatatattgaatggtacttatttatattatattaattataatgttgttcaatata

SEQ ID NO: 77025 - DNA, 2926 bp, Zea Mays
cttccacaaaccccataaccctagcaccgccgccaccatgtcctcatctccatcttcagtgaaccgccgtcccccgggcccgctagcgttggggctggagtccttggggaagaagatcagcatcggctggtctccgtcccgggcggcatcctctccatctcgtgtcgcacctacgcgaccccactgggccatggcttctttccccgtgacacctctgtcgggatcgcgagggatgcgttcaacacgttcttcagtgaaacgggcgcagggaagcacgttccaagggccctgtttgtcgacttggagcccactgtgattgacgaggtgaagaccggggcgtaccgccggcttttccatcctgagcagctcatctcacacaaggaagatgctgcgaacaacttcgcccgtggacattacacaggctcaaaatgttcttggaaacaaggggactgaaattgcaaaggtagcacatcggcgaactgatgcggaggcgggcgtggaggcgctcgatgccgtccagcaatcagtagttgtcgctgcatcggcgacttctttcccccaccagcatggccgcgtgaatggttcagttctttccaaagcctacagcttctaggaaatcggatacgatcacccgaaaaaggcaagggggaaatcttcttatagatctgttccgtcattgtgacaatcatttgggagagaaacaagtaaacaacccttttttccataaaactccatctggaagtgcacgacagccactacagttgactaccgatgtaaccaagatgatgcaaaagcatcagctggaaacgccatagttgctgctactgagtaccatccttatatccttatttcctaattgttgtggtgcatgtacaagtttttttaaaacgaattccgaattggttattgctgttagaactcatctgagtgctaccttctcatatgctccttttttctctctggctgttatgttaaaggaccagatacaagtcaatcttcccttcaaattacaatttaattattttatatctggattctgcaagacacttcaaaaaaaaatataacaacatgtggtccctatgttatctactagcatgagccattgttccatgcagtttggtacatagtggcgcatattttgttacatttactttctatattcttagtatatttatagcctatatccccaaactatatcatatacttagcacacacccattgttataatccacgtgcgcatggcgcgcgcactttactagtatacaacattgttggcaacaggagctgatctctttattacacgatgtattggcttggtttctaatgtccactttcccatccctgttttcccctccttcaggacttctttagtgatcttttggtacatcgctgctgatacaaacagcctacccagactgcttttgtgaaggtatgtgcgtacctatattgcttcttgaggctgactcatgtgattggcggtgtttggaagatacattaaagtttaattcgacaaatgtcttttgcttagggctcctagcttggtgtttctttttctgtgatacttgtgcatgcgaagtaggtgaactgctacttaaatggtacatatttagcttaattacttactggtggcattgcagattatatgtttctgtcttaaagatacattagtaggctgtagtactcacactgcttctgttctcatctgttcacacactgcatctattcacagcatgattcagaggcatgcatgaggttgtagtaggcgagaccacccaaaagcactcccaacgcctgaccacaagagctagcagatagcagccctactgttggcaatccaataatcacatacgaagttttccttgaaattttttgagtcttgaattgacttcttccttaatttatagtttcaactcaaaacgaatacactattttttgttgaaccacattttcctctgctcagtttggcatcattattgtatcataatattatcataattaatccattctggtaaactgactctagaaaattttcttgaatggattcctatcttttacagtctaagctacattatgtgcatggaattttgcaatataccttctgtttcttgctcacatgattgatgtgattttgaattcatttagcacactgctttctgagaagccatttgcagtgcaaggatgaaacttggtcagagtgtttaccatatggattggcagccccaaataaagctctggattgtcctattcccatgacaaggttgtgctcttctcctgcagtgaaaccaaaaaagaaggcgcgctactgttcttccgttttcatgtcaatgcaacaacagataagtggaggtggcactaccaattccttgatgtaccaggaatgtttggattgttgtattctgacattgtttggctcaacatattcaagttggagtgtcaggtctccaacaattaaacaagatacggaatctgtgtaagcaagagcattcataccttgttagcttccttctctctctctcaagatcgatctagagaccaacaagatcatggacttcttcaagtttgacgtcgataacgtggtcatggtgaccggcgggaggaacaccgggcgtgtaggagtgatcaagaactaggagaagcacaaaggcagcttcgaggtcatcgacgtgctgcttggagctttttgcatgctatgtctagttttctcctatttgttgtacaggaaaacatagaatggaattcaaatttggtggtcgcaaaagtgtggagacttgaattcatataaagttaggcttaacattagtgcaaacagttgtattttagtttagatttagagtacacttatgtatgccttgtttgacaatgcttatttatgatatattgaatggtacttatttatattatattaattataatgttgttcaatata

SEQ ID NO: 77026 - DNA, 2458 bp, Zea Mays
cttccacaaaccccataaccctagcaccgccgccaccatgtcctcatctccatcttcagtgaaccgccgtcccccgggcccgctagcgttggggctggagtccttggggaagaagatcagcatcggctggtctccgtcccgggcggcatcctctccatctcgtgtcgcacctacgcgaccccactgggccatggcttctttccccgtggtgcaggtcttttcggtcctcaggcttcatccctgtgcaagtgcagggataattgcttctaatctcccgaggctgcataacctaattcagaggcagagcaagggggcgtgagggagatgagggagatcatcagcatccatatcgcgtaggcaggcatccagtgacacctctgtcgggatcgcgagggatgcgttcaacacgttcttcagtgaaacgggcgcagggaagcacgttccaagggccctgtttgtcgacttggagcccactgtgattgacgaggtgaagaccggggcgtaccgccggcttttccatcctgagcagctcatctcacacaaggaagatgctgcgaacaacttcgcccgtggacattacacaggctcaaaatgttcttggaaacaaggggactgaaattgcaaaggtagcacatcggcgaactgatgcggaggcgggcgtggaggcgctcgatgccgtccagcaatcagtagttgtcgctgcatcggcgacttctttcccccaccagcatggccgcgtgaatggttcagttctttccaaagcctacagcttctaggaaatcggatacgatcacccgaaaaaggcaagggggaaatcttcttatagatctgttccgtcattgtgacaatcatttgggagagaaacaagtaaacaacccttttttccataaaactccatctggaagtgcacgacagccactacagttgactaccgatgtaaccaagatgatgcaaaagcatcagctggaaacgccatagttgctgctactgagacttctttagtgatcttttggtacatcgctgctgatacaaacagcctacccagactgcttttgtgaagggctcctagcttggtgtttctttttctgtgatacttgtgcatgcgaagtaggtgaactgctacttaaatggtacatatttagcttaattacttactggtggcattgcagattatatgtttctgtcttaaagatacattagtaggctgtagtactcacactgcttctgttctcatctgttcacacactgcatctattcacagcatgattcagaggcatgcatgaggttgtagtaggcgagaccacccaaaagcactcccaacgcctgaccacaagagctagcagatagcagccctactgttggcaatccaataatcacatacgaagttttccttgaaattttttgagtcttgaattgacttcttccttaatttatagtttcaactcaaaacgaatacactattttttgttgaaccacattttcctctgctcagtttggcatcattattgtatcataatattatcataattaatccattctggtaaactgactctagaaaattttcttgaatggattcctatcttttacagtctaagctacattatgtgcatggaattttgcaatataccttctgtttcttgctcacatgattgatgtgattttgaattcatttagcacactgctttctgagaagccatttgcagtgcaaggatgaaacttggtcagagtgtttaccatatggattggcagccccaaataaagctctggattgtcctattcccatgacaaggttgtgctcttctcctgcagtgaaaccaaaaaagaaggcgcgctactgttcttccgttttcatgtcaatgcaacaacagataagtggaggtggcactaccaattccttgatgtaccaggaatgtttggattgttgtattctgacattgtttggctcaacatattcaagttggagtgtcaggtctccaacaattaaacaagatacggaatctgtgtaagcaagagcattcataccttgttagcttccttctctctctctcaagatcgatctagagaccaacaagatcatggacttcttcaagtttgacgtcgataacgtggtcatggtgaccggcgggaggaacaccgggcgtgtaggagtgatcaagaactaggagaagcacaaaggcagcttcgaggtcatcgacgtgctgcttggagctttttgcatgctatgtctagttttctcctatttgttgtacaggaaaacatagaatggaattcaaatttggtggtcgcaaaagtgtggagacttgaattcatataaagttaggcttaacattagtgcaaacagttgtattttagtttagatttagagtacacttatgtatgccttgtttgacaatgcttatttatgatatattgaatggtacttatttatattatattaattataatgttgttcaatata

SEQ ID NO: 77027 - DNA, 1896 bp, Zea Mays
cctacacttccatgttcgatgcgagcggcgagccaacttcactctcattcgtcttccacaaaccccataaccctagcaccgccgccaccatgtcctcatctccatcttcagtgaaccgccgtcccccgggcccgctagcgttggggctggagtccttggggaagaagatcagcatcggctggtctccgtcccgggcggcatcctctccatctcgtgtcgcacctacgcgaccccactgggccatggcttctttccccgtggtgcaggtcttttcggtcctcaggcttcatccctgtgcaagtgcagggataattgcttctaatctcccgaggctgcataacctaattcagaggcagagcaagggggcgtgagggagatgagggagatcatcagcatccatatcgcgtaggcaggcatccagtgacacctctgtcgggatcgcgagggatgcgttcaacacgttcttcagtgaaacgggcgcagggaagcacgttccaagggccctgtttgtcgacttggagcccactgtgattgacgaggtgaagaccggggcgtaccgccggcttttccatcctgagcagctcatctcacacaaggaagatgctgcgaacaacttcgcccgtggacattacacaggctcaaaatgttcttggaaacaaggggactgaaattgcaaaggtagcacatcggcgaactgatgcggaggcgggcgtggaggcgctcgatgccgtccagcaatcagtagttgtcgctgcatcggcgacttctttcccccaccagcatggccgcgtgaatggttcagttctttccaaagcctacagcttctaggaaatcggatacgatcacccgaaaaaggcaagggggaaatcttcttatagatctgttccgtcattgtgacaatcatttgggagagaaacaagtaaacaacccttttttccataaaactccatctggaagtgcacgacagccactacagttgactaccgatgtaaccaagatgatgcaaaagcatcagctggaaacgccatagttgctgctactgagacttctttagtgatcttttggtacatcgctgctgatacaaacagcctacccagactgcttttgtgaagcacactgctttctgagaagccatttgcagtgcaaggatgaaacttggtcagagtgtttaccatatggattggcagccccaaataaagctctggattgtcctattcccatgacaaggttgtgctcttctcctgcagtgaaaccaaaaaagaaggcgcgctactgttcttccgttttcatgtcaatgcaacaacagataagtggaggtggcactaccaattccttgatgtaccaggaatgtttggattgttgtattctgacattgtttggctcaacatattcaagttggagtgtcaggtctccaacaattaaacaagatacggaatctgtgtaagcaagagcattcataccttgttagcttccttctctctctctcaagatcgatctagagaccaacaagatcatggacttcttcaagtttgacgtcgataacgtggtcatggtgaccggcgggaggaacaccgggcgtgtaggagtgatcaagaactaggagaagcacaaaggcagcttcgaggtcatcgacgtgctgcttggagctttttgcatgctatgtctagttttctcctatttgttgtacaggaaaacatagaatggaattcaaatttggtggtcgcaaaagtgtggagacttgaattcatataaagttaggcttaacattagtgcaaacagttgtattttagtttagatttagagtacacttatgtatgccttgtttgacaatgcttatttatgatatattgaatggtacttatttatattatattaattataatgttgttcaatata

SEQ ID NO: 77028 - DNA, 2400 bp, Zea Mays
cctacacttccatgttcgatgcgagcggcgagccaacttcactctcattcgtcttccacaaaccccataaccctagcaccgccgccaccatgtcctcatctccatcttcagtgaaccgccgtcccccgggcccgctagcgttggggctggagtccttggggaagaagatcagcatcggctggtctccgtcccgggcggcatcctctccatctcgtgtcgcacctacgcgaccccactgggccatggcttctttccccgtggtgcaggtcttttcggtcctcaggcttcatccctgtgcaagtgcagggataattgcttctaatctcccgaggctgcataacctaattcagaggcagagcaagggggcgtgagggagatgagggagatcatcagcatccatatcgcgtaggcaggcatccagtgacacctctgtcgggatcgcgagggatgcgttcaacacgttcttcagtgaaacgggcgcagggaagcacgttccaagggccctgtttgtcgacttggagcccactgtgattgacgaggtgaagaccggggcgtaccgccggcttttccatcctgagcagctcatctcacacaaggaagatgctgcgaacaacttcgcccgtggacattacacaggctcaaaatgttcttggaaacaaggggactgaaattgcaaaggtagcacatcggcgaactgatgcggaggcgggcgtggaggcgctcgatgccgtccagcaatcagtagttgtcgctgcatcggcgacttctttcccccaccagcatggccgcgtgaatggttcagttctttccaaagcctacagcttctaggaaatcggatacgatcacccgaaaaaggcaagggggaaatcttcttatagatctgttccgtcattgtgacaatcatttgggagagaaacaagtaaacaacccttttttccataaaactccatctggaagtgcacgacagccactacagttgactaccgatgtaaccaagatgatgcaaaagcatcagctggaaacgccatagttgctgctactgagtaccatccttatatccttatttcctaattgttgtggtgcatgtacaagtttttttaaaacgaattccgaattggttattgctgttagaactcatctgagtgctaccttctcatatgctccttttttctctctggctgttatgttaaaggaccagatacaagtcaatcttcccttcaaattacaatttaattattttatatctggattctgcaagacacttcaaaaaaaaatataacaacatgtggtccctatgttatctactagcatgagccattgttccatgcagtttggtacatagtggcgcatattttgttacatttactttctatattcttagtatatttatagcctatatccccaaactatatcatatacttagcacacacccattgttataatccacgtgcgcatggcgcgcgcactttactagtatacaacattgttggcaacaggagctgatctctttattacacgatgtattggcttggtttctaatgtccactttcccatccctgttttcccctccttcaggacttctttagtgatcttttggtacatcgctgctgatacaaacagcctacccagactgcttttgtgaagcacactgctttctgagaagccatttgcagtgcaaggatgaaacttggtcagagtgtttaccatatggattggcagtgaaaccaaaaaagaaggcgcgctactgttcttccgttttcatgtcaatgcaacaacagattactgatatagctatgcctggtgagtggagataagtggaggtggcactaccaattccttgatgtaccaggaatgtttggattgttgtattctgacattgtttggctcaacatattcaagttggagtgtcaggtctccaacaattaaacaagatacggaatctgtgtaagcaagagcattcataccttgttagcttccttctctctctctcaagatcgatctagagaccaacaagatcatggacttcttcaagtttgacgtcgataacgtggtcatggtgaccggcgggaggaacaccgggcgtgtaggagtgatcaagaactaggagaagcacaaaggcagcttcgaggtcatcgacgtgctgcttggagctttttgcatgctatgtctagttttctcctatttgttgtacaggaaaacatagaatggaattcaaatttggtggtcgcaaaagtgtggagacttgaattcatataaagttaggcttaacattagtgcaaacagttgtattttagtttagatttagagtacacttatgtatgccttgtttgacaatgcttatttatgatatattgaatggtacttatttatattatattaattataatgttgttcaatata

SEQ ID NO: 77029 - DNA, 2271 bp, Zea Mays
gtttctcctacacttccatgttcgatgcgagcggcgagccaacttcactctcattcgtcttccacaaaccccataaccctagcaccgccgccaccatgtcctcatctccatcttcagtgaaccgccgtcccccgggcccgctagcgttggggctggagtccttggggaagaagatcagcatcggctggtctccgtcccgggcggcatcctctccatctcgtgtcgcacctacgcgaccccactgggccatggcttctttccccgtgacacctctgtcgggatcgcgagggatgcgttcaacacgttcttcagtgaaacgggcgcagggaagcacgttccaagggccctgtttgtcgacttggagcccactgtgattgacgaggtgaagaccggggcgtaccgccggcttttccatcctgagcagctcatctcacacaaggaagatgctgcgaacaacttcgcccgtggacattacacaggctcaaaatgttcttggaaacaaggggactgaaattgcaaaggtagcacatcggcgaactgatgcggaggcgggcgtggaggcgctcgatgccgtccagcaatcagtagttgtcgctgcatcggcgacttctttcccccaccagcatggccgcgtgaatggttcagttctttccaaagcctacagcttctaggaaatcggatacgatcacccgaaaaaggcaagggggaaatcttcttatagatctgttccgtcattgtgacaatcatttgggagagaaacaagtaaacaacccttttttccataaaactccatctggaagtgcacgacagccactacagttgactaccgatgtaaccaagatgatgcaaaagcatcagctggaaacgccatagttgctgctactgagtaccatccttatatccttatttcctaattgttgtggtgcatgtacaagtttttttaaaacgaattccgaattggttattgctgttagaactcatctgagtgctaccttctcatatgctccttttttctctctggctgttatgttaaaggaccagatacaagtcaatcttcccttcaaattacaatttaattattttatatctggattctgcaagacacttcaaaaaaaaatataacaacatgtggtccctatgttatctactagcatgagccattgttccatgcagtttggtacatagtggcgcatattttgttacatttactttctatattcttagtatatttatagcctatatccccaaactatatcatatacttagcacacacccattgttataatccacgtgcgcatggcgcgcgcactttactagtatacaacattgttggcaacaggagctgatctctttattacacgatgtattggcttggtttctaatgtccactttcccatccctgttttcccctccttcaggacttctttagtgatcttttggtacatcgctgctgatacaaacagcctacccagactgcttttgtgaagcacactgctttctgagaagccatttgcagtgcaaggatgaaacttggtcagagtgtttaccatatggattggcagccccaaataaagctctggattgtcctattcccatgacaaggttgtgctcttctcctgcagtgaaaccaaaaaagaaggcgcgctactgttcttccgttttcatgtcaatgcaacaacagataagtggaggtggcactaccaattccttgatgtaccaggaatgtttggattgttgtattctgacattgtttggctcaacatattcaagttggagtgtcaggtctccaacaattaaacaagatacggaatctgtgtaagcaagagcattcataccttgttagcttccttctctctctctcaagatcgatctagagaccaacaagatcatggacttcttcaagtttgacgtcgataacgtggtcatggtgaccggcgggaggaacaccgggcgtgtaggagtgatcaagaactaggagaagcacaaaggcagcttcgaggtcatcgacgtgctgcttggagctttttgcatgctatgtctagttttctcctatttgttgtacaggaaaacatagaatggaattcaaatttggtggtcgcaaaagtgtggagacttgaattcatataaagttaggcttaacattagtgcaaacagttgtattttagtttagatttagagtacacttatgtatgccttgtttgacaatgcttatttatgatatattgaatggtacttatttatattatattaattataatgttgttcaatata

SEQ ID NO: 77030 - DNA, 3024 bp, Zea Mays
ctaatgagtcgctgacagtagcccaaaattgggttggtttctcctacacttccatgttcgatgcgagcggcgagccaacttcactctcattcgtcttccacaaaccccataaccctagcaccgccgccaccatgtcctcatctccatcttcagtgaaccgccgtcccccgggcccgctagcgttggggctggagtccttggggaagaagatcagcatcggctggtctccgtcccgggcggcatcctctccatctcgtgtcgcacctacgcgaccccactgggccatggcttctttccccgtggtgcaggtcttttcggtcctcaggcttcatccctgtgcaagtgcagggataattgcttctaatctcccgaggctgcataacctaattcagaggcagagcaagggggcgtgagggagatgagggagatcatcagcatccatatcgcgtaggcaggcatccagtgacacctctgtcgggatcgcgagggatgcgttcaacacgttcttcagtgaaacgggcgcagggaagcacgttccaagggccctgtttgtcgacttggagcccactgtgattgacgaggtgaagaccggggcgtaccgccggcttttccatcctgagcagctcatctcacacaaggaagatgctgcgaacaacttcgcccgtggacattacacaggctcaaaatgttcttggaaacaaggggactgaaattgcaaaggtagcacatcggcgaactgatgcggaggcgggcgtggaggcgctcgatgccgtccagcaatcagtagttgtcgctgcatcggcgacttctttcccccaccagcatggccgcgtgaatggttcagttctttccaaagcctacagcttctaggaaatcggatacgatcacccgaaaaaggcaagggggaaatcttcttatagatctgttccgtcattgtgacaatcatttgggagagaaacaagtaaacaacccttttttccataaaactccatctggaagtgcacgacagccactacagttgactaccgatgtaaccaagatgatgcaaaagcatcagctggaaacgccatagttgctgctactgagtaccatccttatatccttatttcctaattgttgtggtgcatgtacaagtttttttaaaacgaattccgaattggttattgctgttagaactcatctgagtgctaccttctcatatgctccttttttctctctggctgttatgttaaaggaccagatacaagtcaatcttcccttcaaattacaatttaattattttatatctggattctgcaagacacttcaaaaaaaaatataacaacatgtggtccctatgttatctactagcatgagccattgttccatgcagtttggtacatagtggcgcatattttgttacatttactttctatattcttagtatatttatagcctatatccccaaactatatcatatacttagcacacacccattgttataatccacgtgcgcatggcgcgcgcactttactagtatacaacattgttggcaacaggagctgatctctttattacacgatgtattggcttggtttctaatgtccactttcccatccctgttttcccctccttcaggacttctttagtgatcttttggtacatcgctgctgatacaaacagcctacccagactgcttttgtgaagggctcctagcttggtgtttctttttctgtgatacttgtgcatgcgaagtaggtgaactgctacttaaatggtacatatttagcttaattacttactggtggcattgcagattatatgtttctgtcttaaagatacattagtaggctgtagtactcacactgcttctgttctcatctgttcacacactgcatctattcacagcatgattcagaggcatgcatgaggttgtagtaggcgagaccacccaaaagcactcccaacgcctgaccacaagagctagcagatagcagccctactgttggcaatccaataatcacatacgaagttttccttgaaattttttgagtcttgaattgacttcttccttaatttatagtttcaactcaaaacgaatacactattttttgttgaaccacattttcctctgctcagtttggcatcattattgtatcataatattatcataattaatccattctggtaaactgactctagaaaattttcttgaatggattcctatcttttacagtctaagctacattatgtgcatggaattttgcaatataccttctgtttcttgctcacatgattgatgtgattttgaattcatttagcacactgctttctgagaagccatttgcagtgcaaggatgaaacttggtcagagtgtttaccatatggattggcagtgaaaccaaaaaagaaggcgcgctactgttcttccgttttcatgtcaatgcaacaacagataagtggaggtggcactaccaattccttgatgtaccaggaatgtttggattgttgtattctgacattgtttggctcaacatattcaagttggagtgtcaggtctccaacaattaaacaagatacggaatctgtgtaagcaagagcattcataccttgttagcttccttctctctctctcaagatcgatctagagaccaacaagatcatggacttcttcaagtttgacgtcgataacgtggtcatggtgaccggcgggaggaacaccgggcgtgtaggagtgatcaagaactaggagaagcacaaaggcagcttcgaggtcatcgacgtgctgcttggagctttttgcatgctatgtctagttttctcctatttgttgtacaggaaaacatagaatggaattcaaatttggtggtcgcaaaagtgtggagacttgaattcatataaagttaggcttaacattagtgcaaacagttgtattttagtttagatttagagtacacttatgtatgccttgtttgacaatgcttatttatgatatattgaatggtacttatttatattatattaattataatgttgttcaatata

SEQ ID NO: 77031 - DNA, 3400 bp, Zea Mays
gtacaactacatgccgacgaacgggaggaggaaaagccattgacggacacataggagctgttactgttaggaacagagcagagcagagcacggcacggcaccaaacgaaaaagcccacgcggaagcggagacggcgtccaggtcgtgcccaccccccgacaattcaacagcagcacccgccggccgccgcgtgttctctccacctttttttcttccgcgcgcttttagtccatttcgtccgcgcgctcctcagttccgtctccacgcgccgcgcctcgcctcgcagatgtcggcggccgccgcaggggcgcgctcctcctccacctccacccaatgaccccgcggccgcgcctcctcctgctcctcctcgccattgccttgcccgccgcctccgccgcgtccacgctcgccgtctcggcctcctccacctcccccaccgtctgcggcgtcgccgagcccaacggcaccgtctactgcgcgccgctccaggggccctccagctccaactccgccagccccgtcgcgccgtccgccatcgccttcgcggagctctccgcggggcgaggcttcgtgtgcggcctgcaagcggggggcgccgcgctcttctgctggccgtccacgccggcgccgcagtgggggcagctccggcggctctacaacgggcccgccccgctcgcggacctcgccgtcggcggcggccacgtcgcggcctacgacgcctccgggaaggtggtcctatggtggcgcggcgggggccggttccccgcgcgggccgacggcgcgttccgctccctcgtctccggggacggcttctcctgcgccgtccaggccaacgcgtccgccgccgtccgctgctggggcccgcagggtagcgccgtgcaggcgggcctcgccaacgcgtccgccgccccgtacctcgccgcggggggcgcccgcgcctgcgccgtgctcgcctccggcgccgcgctctgctcgggctcggacgcctccgccggcgccctgccgcgggacctcttcggctacggcctcgccgtcggcgactcccacgcgtgcgcgctccgccggcccgaccacaccgcggtttgctggaccctcgggggacccaccaccaccctgtacgagccggccctggggatctccttcgccttcctcgtcgccggcggcaacttcacctgcggcgtcgcgtccagcgacttcagcgtgtactgctggtccgcgggcgccgtggccgcgccggtgccgctcccgaggatccgcccgggcgtctgcgtcagcgacgacagctcatgccgcgggtgcggcttcatgtcgcagtcgcagaagttctgcggaggctccggcgggatctgcgacgccctctgcgacgattcgccgccgccgcctgctcccgcacccccttctccgccgccgtcgtcgagtagacgcgtgtccaaggcctggatcgcgttctgcgtggtcggcgcggtgggtggtttcgcggggctctgctccatcgtctactgcctcgtcttcggcttctgcagcaacaagcgggtgcacaactcggtgcagcccaacatcagtgccgccgccgccggcacgggtgccgacaacaacggcggcggcggaggtgccgcagcctccgggagcccctacgggtcgccgaacgggtcgcgggcgcgcggcctgttccggcggcagctgtcgcgcgcgatgacgcggcagcgcagcgggccgtcgtcgttcaaggaccccgccgaggagttcaccttcgcgcagctggaggcggccaccaaagggttcgcgctggaggcgaagatcggggagggcagcttcggcaccgtgtaccggggcaagctccccgacgggcgcgaggtggccatcaagcgcggcgagtcaggcccccgcgcgcgccggttccaggagaaggagagcgcgttccggtcggagctggtgttcctgtcccggctccaccacaagcacctcgtgggcctggtgggctactgcgaggaggcggaggagcggctgctggtgtacgagtacatgaagaacggcgcgctctacgaccacctgcaccccaaggcctcggcggcgccgtcgcccgtggcgtcgtcgtggaagctgcgcatcaagatcctgctggacgcgtcccgcggcatcgagtacctgcactcctacgccgtgccgcccatcatccaccgcgacatcaagtcgtccaacatcctgctggacggcgggtggacggcgcgcgtgtcggacttcgggctgtcgctgacggggtccccggagccatcgtcggaggagtcgcggtcgcagcagctggcggtgacgacgaaggccgccggcacggtggggtacatggacccggagtactacgggctgcaccacctgacggtgaagagcgacgtgtacgggttcggtgtggtgatgctggagtcgctgacggggcggcgcgccatcttcaaggaggcggagggcgggagccccgtgagcgtggtggactacgcggtgcccagcatcatgggcggggagctcgggaaggtgctggacccgcgcgcgccggagcagctcctccagcgccagcctctccgtcacgtccatggaccggtcgggagccctggcctgagctgagcctgacggacggacggatggatgagtccattcttttccggttttcgttcatgcatcaaccgccgcccatggcgaagggagggtggtcgaattcattgccgttcattcttcattcctcgttgcgaggtgtgtgattctgtcacacgttttgttcatggtgaatgtacattcatgattcttgctctgatgattccacgcgtcgtcgagacgaaacacaagagaggattcgaattcattcgtgtagactgtgaccccccaattaatgggataaaaaaaaggggaaagaaacttctccccggtgatggtggatgcacagcaccaagcaggatgtggcaccagttttaacttctcccctggagcgttgaatgggaaaagaaacagagatggaaggagaagaaacacgcaggttgttgttgacgagatcagtcggtcagaggcggcatttccgtccagtctaccacaagcgtccagtctaccacaaggtgagagccgccgggtcaacagggacagggaaggaagccgccgggtcaacaggagaggagaagaggggagcagtggttgttgtttggtggttggcgtactacagtgacggtagcagcggagcgaatggcgaatgcgatctcatgaaatgccgccgaggttcacggtcatcatcccgatccggcgatccatgctcaacagggcagggggcaggcaggtggccgagattgccctgtaggcccagccgacgaaggagacgagagcgaggtcgccgtcgatcgtctcccacggtcccacctccgcttcacat

SEQ ID NO: 77032 - DNA, 128 bp, Zea Mays
atgtgttgcttccacttaacacactgcaagcccatctcttcatcgccacattcacctcacatgccaacatcacgttttgtgaaagtgaccctttcctatttcggtaaggaggagccttatcttctcaa

SEQ ID NO: 77033 - DNA, 1759 bp, Zea Mays
gtcaattgctccaatgcaattctgtataaaaggagaggaaatttagggcatgttaaagggaaaaagttaaggaaatcatgtttactattgataggtcacctaaaaaaagggcatgaacctagaatcagttataatttttggatgtgtctggatagaattgggaagcttcacgaatcgctgagttagagtgggaactatatcgaaaacttctgatatttttcgatggatagtctctccactatgttggaaagccttttgaagcatttggttactggcattgtgggagatcatatacataaacatcccaagctgctcttcgacgttaactcctcgtgtatcacgtaacaaaccctctcttctaaggaattctgatgtggctctaaatatttctggctccattcgaaactcggacttgcaccaactctcatgcccttcaagaatctccttaaccttttgggcaccagagagagaggaggtatggatagaccttttctcttcagagaggaatggaagtatagcagggagaagaataaagaaaaactcctcatcgtcttcttcttcctccaacaaaaactgcctagctagctcttcccaagaacccatatctagagaaattgagaaactatataagcaacacataatcatagcaaaaggcatgataagcaatggaaaatatcgtaaagataataacaatcgcaaagataataacaaacgccttcccggctgaagcgtattaacgacccttgtactggttgaatttatatgtcatatgtccaaggctactcaagattataaattcagcaaaggttacagtttagttcagcaaaggttacagtttagtaaaggttacagttttagatttagcaatgcaatttgtggataaagttgtcgggatctatattaaacaattgttcactttctatttgaacaaatcttcccttctcaggattatagagcacagtctgccgacccttgttcactttctatttgtgcacagtctgccggctgaagtttagtaaaggttagctgttatatttgaacaatctgaaaactaaaacatatgatagtttagtaaagtttagtaaaggttttagatttaacagctaacctttttctgtgtatacagtctgaaaactaaaacagtctgaaaactaaaatagtttggatcttggagagtccaaggctcggatcttggaagagagtcagtcttgtactgagtttagtttataaattatgttattggccacttcattttagaacagaaaatgttgtaggtgtatgcggcgtcctgacttatcgaacagaacttctggctgatcaaatggaaaattgtcaaatggaaaatacaaataactgtcggctgaagtttagtaaaggttagctgttatatttgaacaatatgaaaactaaaacatatgatagtttagtaaagtttagtaaaggttttagatttaacagctaacctttttccgtgtatacagtctgaaaactaaaacagtctgaaaactaaaatagtttggatcttggagagtccaaggctcggatcttggaagagagtcagtcttgtactgagtttagttgagcaagctaatctaaaaatgataagtagttgccagcttatcattgaaaactaaaacagcgcagaacaatgcgataaaaccatggataagtagttttcaacggataaaacaagctaatctcggctcagggaatctctgactctgaccactcgcccaacgataaggacacagatgcagac

SEQ ID NO: 77034 - DNA, 1779 bp, Zea Mays
aaaagcttgaggaaagtggcaagaggcgcctgcctaagatttccaagaaccgacacgggcattattaaagacagaccgcgcatgcacagtcaccagggatcaaaagggtgacagtccaagggaagaagaagaagaaaaggagaaccactgctcgcgctttgcaccagaccactagctccgagaagcggcaggcaggcaggcactcgaacaaatcagcagagccgggacacatgatatatatatataatatataaaccgagagagcacagagccaacccaagagagcagctgagcagccagccgtggaggaagagatgtacccataccgcatgagcaacgtgatgatcgggtacctgaacctggccacgctcctggcctcgctccccatcatcggggcggggctgtggctggcaaggggtagctcctcctcctcctccaccacgtgctcgtcgatcctgcagacgccgctcctcgccgtgggcttcgcggcgctgctggtctcgctcgccggcttcgtgggcgcctgcttccacgtggcctgggcgctgcggctgtacctcgccgccgtcgcactgctcgtcgccttcctcctcggcctcaccgcgttcggcttcgcggtcaccgcgggcggcggcggcgcgcaggtgtacggccggccgtaccgggagtaccgcgtcacggactactcggcgtggctccagaagcgcatgcaggacgacaggtactggcgccccgccctcgcctgcgtcgtcgggtccaaggcctgccccaagatccagaactggacgcccatggactacctccagcacgatctcacgccaatacagtccggctgctgcaagccgccgacggcgtgccagtacagcggaggcatgccagtcggggcgcaggacgaggactgctaccggtggaacaacgccccggacatcctctgctaccggtgcgactcgtgcagggccggcgtgatggagcaggtgcgccaggactggcacaagatctttgtgctcgacgtcgccgtgctcgccgctctcgtctgcatctgctcatgcgggtgctgcgccttcaggaacgctcgccgctcccggtcccagtacccatacggggtggcgatgatggggtggtagaagagaacagatctactaggctagctgtagcttctcaatgcctgtatgatattttgatccagtcttctgtggaaaaagataaaataacacttgggatctgtatgtgttattagcccctgtggtactctgtttgtttccaggtccgcagagtttagtttctgtagatatttgagttaagaggagactaagccatgaagtaaaagagatgcctagtttttttccccttcaatatggtagccagcattgtatcatgtagaattttaatccaggacagaagtggttccatgtatatgggggaaaccaaaccacaccagaagctatcagctatgcctgttctactgttggcgtggcttccttatgatgtgattacactggattcctttacactgaagtcaaatcgggggcaggctattcagcaatgtttcagaaacatgttcactggaattccgacaataacccttttttggcacataatacaaaatagagagagagagaatctcatgcaggcataatcactcacggtgatcatatattattggcattgattgtcgcagaactggtatcaggtatggtacagcaatttgttttcaatccgagtgacagtcccactcacaaagtgaaaaaaaggtgccaaaggcttattggacggttggac

SEQ ID NO: 77035 - DNA, 1711 bp, Zea Mays
aattacttcacggcaggcaaggcaaccataacatgcatgcgcccgcgtcaggccaggagctaaaagcttgaggaaagtggcaagaggcgcctgcctaagatttccaagaaccgacacgggcattattaaagacagaccgcgcatgcacagtcaccagggatcaaaagggtgacagtccaagggaagaagaagaagaaaaggagaaccactgctcgcgctttgcaccagaccactagctccgagaagcggcaggcaggcaggcactcgaacaaatcagcagagccgggacacatgatatatatatataatatataaaccgagagagcacagagccaacccaagagagcagctgagcagccagccgtggaggaagagatgtacccataccgcatgagcaacgtgatgatcgggtacctgaacctggccacgctcctggcctcgctccccatcatcggggcggggctgtggctggcaaggggtagctcctcctcctcctccaccacgtgctcgtcgatcctgcagacgccgctcctcgccgtgggcttcgcggcgctgctggtctcgctcgccggcttcgtgggcgcctgcttccacgtggcctgggcgctgcggctgtacctcgccgccgtcgcactgctcgtcgccttcctcctcggcctcaccgcgttcggcttcgcggtcaccgcgggcggcggcggcgcgcaggtgtacggccggccgtaccgggagtaccgcgtcacggactactcggcgtggctccagaagcgcatgcaggacgacaggtactggcgccccgccctcgcctgcgtcgtcgggtccaaggcctgccccaagatccagaactggacgcccatggactacctccagcacgatctcacgccaatacagtccggctgctgcaagccgccgacggcgtgccagtacagcggaggcatgccagtcggggcgcaggacgaggactgctaccggtggaacaacgccccggacatcctctgctaccggtgcgactcgtgcagggccggcgtgatggagcaggtggcgatgatggggtggtagaagagaacagatctactaggctagctgtagcttctcaatgcctgtatgatattttgatccagtcttctgtggaaaaagataaaataacacttgggatctgtatgtgttattagcccctgtggtactctgtttgtttccaggtccgcagagtttagtttctgtagatatttgagttaagaggagactaagccatgaagtaaaagagatgcctagtttttttccccttcaatatggtagccagcattgtatcatgtagaattttaatccaggacagaagtggttccatgtatatgggggaaaccaaaccacaccagaagctatcagctatgcctgttctactgttggcgtggcttccttatgatgtgattacactggattcctttacactgaagtcaaatcgggggcaggctattcagcaatgtttcagaaacatgttcactggaattccgacaataacccttttttggcacataatacaaaatagagagagagagaatctcatgcaggcataatcactcacggtgatcatatattattggcattgattgtcgcagaactggtatcaggtatggtacagcaatttgttttcaatccgagtgacagtcccactcacaaagtgaaaaaaaggtgccaaaggcttattggacggttggac

SEQ ID NO: 77036 - DNA, 3872 bp, Zea Mays
agcgagcatgccactcccgccttgcccggggtttcgtgtccgtccaaaccgcaagacaccaccacgcgacgcgaggaggaggaggaggagacatggctgccaccgcgagcccacccactccctcacacaactgtcatgctcgctcggcgctcgctactccatccacactcttcttcctccattgcgttgcgcacgtgtcccagcatccctccctcctccccgtccctaaagcggccggccactctctctctctctctctccaccctaccgtccgtcccgtccctcacctcaccaatctcgcgcacgctccccaatgacccaatctccccgaccctgccactgccagcgccagctcctccctgccatcccagtcccagccacgtatcgcttcacgggcggggcagcagcagaaccagtgctccgcggctgatgcgcgcaaccaatgccggcgctcgcgtccgccaacatggcccgagccgccgccgccgccgccgcgctccccctcctcctcctcctcctcctcctcctcctcgctgaccacgccgccgcggtgcgcttcgactacgcctcgctgaccctcggaagcctgaggctgctgggcgacgcgcacctcaagaacggcaccatccgcctctcccgggacctcccggtcccgacctcgggcgccggccgcgcgctctacgccaccgcggtgccgctccgcgggggcttctccacgcagttcgccttcaccgtggccacgctcaacccgtcctccgtcggcggggggctggccttcgtgctcgccaccgacggggccacgctcggcgacgcgggcgcctacatcggcgtgtccgtcgccaccgacgccgccgccgtcgagttcgacacgctcatggacgcccagttcgccgaccccaacggcaaccacgtcgccctggatctcggctccatggtctccgccgccgcagccgacctcggcgccgccggcgtcgtcctcgccagcgggaggaccgtcaacgcctggatcgactaccacccctctgcttcccccggttctggcggtaccttggaggtcttcgtgtcctacgcacccaagcgcccgcccaggcccgtcctgtccgcgccgctcgacctcagcgaggacgtcaaggacgccgcgttcgtcggcttctccgcctccacgcaggggagcacggaggcgcacgccatcgagtggtggagcttctccaccgcgtcgccggccccgtccccacgttcggcgccgcccgagtcccctgcgctcccgcctcccgtttccaaccaggtgctcccgggagtgacgacgacgacggcgccgccgccgccgccgccgacaggcagtgtcgctgcgccggccggctcgatcgcaccgtcgggcgccgcagcggggaggaatgccggcccgcgcccgcccgtgcacgcggccgtggccggcgccgccacggcgggcgccttcgtggcggcctcgttcgcgggcgtggcggtctgggtgctggcgcgccgcgccaaggccaggaggcgccagaccgcgctggcggtgggcaccaagcgcgacagcaacgtggcgtcggcggcggcgctggcgcggtccccgcgggagttcagctacaaggagctgagcgccgccacgcggggcttcgacgcgtcccgcgtcatcggcaacggcgcgttcggcaccgtgtacaagggcatcgtgccggacacgggcgccatggtggccgtgaagcgctgcagcagcaccggcgcgcgcggcggaggcaacgcgagcggcgagcaggcgcggtcggagttcctgtcggagctgtccatcatcgcggggctccggcaccgcaacctgctccggctgcaggggtggtgctacgagaagggggagatcctgctggtgtacgactacatgcgcaacggcagcctggaccgggcgctgttcgacgcgtcggcgcccgtgctgccgtggcgccaccggcgcgaggccctggccggcgtggcgtcggcgctggcgtacctccaccacgagtgcgagcggcgcgtggtccaccgcgacgtcaagtccagcaacgtgatgctggacgaggcctaccgcgcgcggctgggggacttcgggctggcgcggcaggcggagcacggcgagtcccccgacgcgacggcggcggcgggcaccatggggtacctggcgcccgagtacctcctgacgggccgcgccaccgagtgcaccgacgtgttcagcttcggcgtgctggcgctggaggtggcgtgcgggcggcggccgatcggcgccgccggcacggccgagggcggcaacctggtggagtgggtgtggagcctgcacggggaggcccggctgctggacgcggtggacccgcggctgggcggggagttcgaggagggcgaggcgaggcgcgtgctgctgctggggctggcgtgctccagcccggagccggcgctgcggcccgggatgcgcgccgtggtgcaggtgctgggcggcgaggcggacccgccgttcgtgccggcggcccggccgtccatgagcctcagcagcgctaacaaccagcagctgctgctcagcctgcaggacagcgtgtcggactacaacgccatgctggggctcgccctgtcggactcgtcctcggactcgctcagctcgtcgtcgctcaccagcacgctgcggaggggcggccacgacatcgggttcagcagcaccgccggcgacgccaggtgacctggctgaaccttgccggcgtccggcggagggtagcttagatagagttttactttctgaaatcatgcatcgaagcaactaagcaatgcaccatcgacggtgcctccaaagaacagcatgtatgtatgcattgagtagtacatagaattagtagcagcagtcaatggactcctcagtcctcatcaaatcgagcctcccatttgttacattttacgtacatttctctagataataattcggatctcacatgattcattcgaccatctcagatcagccaatcctcctcctcgagctgccaatcaactgaagctggatcagaacggcgccttccccctcccccacccactatcttttgttgatcggagctctgagcatggaaataattccaggccacggtctttctcacggattgggattgaagattttactctctctctctctctctctctctgactttgagagaacaaaaaaggatgtcttttctcttttctgttccaactgtggtgacgtcacaaggatcaacctatgcccctttggcatatatactaggagtactccattgtatatcatctgtacctatctgtccacctgtgcagaggggaaaggatagcttaacaagatgagcttggtggctgtggcgcacgccaaggaaagcatcctcttcccgtctcttgctagtgggcagcgcctgcactgctttgacatccatggcggccgtcgatgatgcgtgcatgtcaccaaccgggtccgggagtcacgggcagaggccggcgccgccgttactcttactccacgtccacgagcacgagcacacgcctcttgtgctgccagaagaaaaattaaaggcggcggccactaggaatagtgtagtagtagtagtgggtagtgacgacgctcacctactgatgccactgtgatcgagcacgcaacgcatggcaacattggcgtgcgagttgtccacgtccgaaggcacaaatcattaggtgagctcgaccgatcccagcacgtcgctgtcccgtgggcctgccggcggctggatggatctgtgatgtcgtcccatgttttcatgtaatataacagtattgatctcttgttttatttgtcctgaacatatgtgccatgtgtcgtgtactcaacttaaagccaaacatttttt

SEQ ID NO: 77037 - DNA, 4793 bp, Zea Mays
cgatattattatttaaaatatgataatattactttgatatatacgtacttatgtagaatattgccgggttgcaatgcaagagctatccttgccagaatgccaagttacccagcaacacatgctggcatgcatgcaaaaagttccatttgtaatgtaaacgtactgagaagagcaagaagccacacgctaagccagcagctgccggcgagccgggcggcggagagagtgccgggcggcgatggctgagctcgcgtcgggcgccgtgagctcgctgctgggcgtgatcgggaacgaggcgcggctgctgcgcggcgtccgtggcgacgtgcagttcatcaaggaggagatggagagcatgaacagcttcttggtgcacctggcccgcacgtcgcacaccggcggcgagcacggcgtgcaggtgcgcacgtggatgaaccaggtccgtatcctcgccaacgactgcaacaactgcatcgacaagtacgtgtaccgcggcaaccccgacgtgcacctccgcaggagcggcctcttgcgctacctcctgtggcctccatggtttgtgaggaagatgttcgcgcagcacgacgccgccggccagctgcgggtgctcaaggaccgggcgcgggaggtcggcgagcggaggatgcggtatgacgtgaaggagggggcgctgacgacggaggctgcctatgccgccggcgacgaagacgacgaccaacctgatgccgatgggtcggcgttggcaagtcatcgaagagcagtcctattcaagcatagggctctggacgactacttccaggggaagctagtcgagtggacggagcaagtgatggagagaggcgacgtcatgcactccgccgccgtcgtggcgccggaggcagaccaggaggtcatcgctctcgcacgcagggccttggcccaggggcatcgcagcgtcttggtggacattccgcaggtgcacatggatttcgagccgctgcggccccaggagatcctctactacatcctgtgccagctccagcaggatcgagcgtcatcgccgccgcaactcgggtcgttagaaggaagcccagacacattggtgaagcagtatctcctctacagaagcaaacgggagatcagccatggaaaagagagtctactcggcgaaactgagatccagcaggacattcagaatgtgatgggcaagcttgacgaggtgaagaggggcattcaagatgagcaacttctgttgcagctgctggaagggatcagggacgtcaaggagctggaagagaagcccatatccgtgctcttcgagctgctggtgctgcaacagcaagctgcccggcgagaccaagcgaggggcaaagccatgcgcaaactggcagcatggcacgcccacatcctccggataacagcagagagtctcaagaagtacatagaggcagagcatctgccgcaacaggaggcggagaagaagacggccaagaagtttgatttctatgatgcaagatatggatatgtcatacacaaggtgtttgcaacgaaggccagcaacagcaaaaggcgccatgggcatgtcaagatccaaggcatgatcagcaaagtcccacaagatgttgccaccgaaaccgaggagaagatcgatgagatcaagaagacggtccaagagcagatggaaacggggtggatcgtacgcaagatcatcgagaatcacttcgaggacgacaagaggcctctggttgttatcctcagaatcggcgacaagatctatgaatccaactgggacgagaatagatacgctttcacccgcctggagaaacatgttgccggtgtactgaccgtcaccaccacaaggagcacccagcaggccaaagaaagcctccggcagcaggagcttatagacagcttccgacaaggggagcctctggactattcccttgctggcctctaccatgacattgtgctccagtttacaagccatctcatgagtgaagacaagaacgaagaatacagcgatccccagatcatccgtgacatcctgggggagtgcgagcagttcgagttctgcatgaagatcttggcgcattctttctacgccagacccaaacggagcaaccaagaactgaccaagctgcgcgacagccttcaggcagtttcccccaagtcgttcgaaggcgttgctgccaagatgctcaagttctcctacaatgacctgcccaaagagtacaagtcctgcttgctgtacctggccatcttccctccaggacgcagcatcaggaggtcgacgctggtagcacggtgggttgtcgaaggtctgatcaaccgggatgattggaacgccgcggttcgtcagtccgatcgatgtttcgaagccctcatcgaccgggggcttgtcgatcctgctgagatcagtggtaccgggaaggccaagagctgcatcgtgggcaatcgggttcatggattcattaccatgatcgccaagaaacagcacatagtggagactcgcctgtcacagcacttggcccagcacttctccattttcagtgacgtccgactccgcgcctccgagaagatccgagatttcctgcaagttctccccaaacagtaccacttttcccggctcaaggtgctagatctagaaggctgcaagtgtgttggtacgaagaacacgagttacctcaaggacgtctgctgcaacctgctactgctcaagtacctgaacctaaggagcacaaatgttacgcagctgccaggagaaatcaaccgcctccacgagctggaagtactggatatccgccacaacaatgtgcacaagactgcaacgagatacctccggctcctaaagctgaagcggctgctggctggttgcattgacgacccaactctaccaagtgtcgagcttcctccagcccttgcttaaggcaatcgatgacttgcatgagaacctccggtctctgtcaatcactcttcctattgtcagaggtgaggccacgccacccaaaagaaactcacaaccatcagctcatagccttgaacgtacgctggaccaacttgagagcctaagcataagtggaatcacacagatggggtggcagcttcttccattgctgactgaaaaaagtaatcagctgacaaaggtgactctaagaagcaccatgctgaagcaggacggtctggaggtcctcgcccatctgccaaaactacactatctcaagctccggcacgaggcatacaaggacactgagctcaccttcaaggaggacgaattcaaatatctcaagtgctttcttgttgagggttccaatatgacccacatcatctttgctcatggagcgacccctatgcttgagaagatgcttttgcccgtcaccgccagcctaaagctttctggagttgagaaccttgagaaactggaggagcttgagctcagaaacagcaccaccaccaccaccaccacttccattgacaacaagaacacgctgggttcattgcttgagcagggtaggcgaataaccaaggtgactctccgtggtaaaatgctagagcaagatgatctacaaatccttggcaagaagccatccatacgctgtttggttctcttggacacgttcactgaccaaacggagcttgccttcaaagaaaatgagttcctaaacctcgaccttcttatcgtggagtgctccaagaaagccaagatcagcttcgccgccggatcttgtcctaagctcgagaagctcgtcaccaacatagagtccctctccggcatcggcaaccttgtacgattgaaggagctcgagctcaaggtcgagggtgactctgtccctgcagaggtaaaagtagccgtcaacaggcttaaagatagactccattttacacactacaagtcagaaaatcaagacaaggaagaagggaaccaagacgacgatgtcgggaaatccccttcatccttttggaagaacaagggttggtgcccatgtggtttgcgttgcgcgtgcgtctgattacttgttgttgtacatgtgtgctcgagcttgacggcaatggttggttgtgccgatgatctgtgtactgtgtggctttcctctgaacccttgcgtgcatgggttgatgtaataagtgcgtatgcttggcttgtgtgcacatttgacttacttattaatgtcccttgtgctatattatatggttggacttcaaactgcaagaacacatgacaggttcagaaagggaaaaaaaaagattgtaacttgtctactgtggaacaggggagtaagaaacaggaacgaaagacggatgaactaactactcgcccccaatcaatgaaagaagcaagaacacaggacggatagaaaccgaatgatctgcacggacagcggcaccgagcagtcttattaggcgtgcgcggaggtcgagacagtgcggcgccaccacctcctcttcctccagctcgtccaccgcggcggcgtagctcagtagcgtccgccgtcgccatcgtcggagcctcgctacggcagattcgagattggggtagctgggcctgggcaactgggacatcgactccatgggctgcacgcagccgtaaatgggccaccggacacgagggccagaatactcaagcaagcaagataggccgacagttggccggagatgcatcctcgtcgtcagccatcacgggctgagcattttatttctcagtgacagtgagcgattcatgcgtggtgttggctgctgcgattgccgccgccgaccacgacgacggctcggaggaagccctgggagctgtgtgactctctctcgctgtcactctcgtc

SEQ ID NO: 77038 - DNA, 3641 bp, Zea Mays
tcaccctttctcgacgaacccgtcccacaagcacgcgcgacgcgagccaaggaagacgagagcgaggtggagagagagagagagaggaaaaccctgccccgtccaggcagccgtcgtcgacgcaaacggcggaggccacagagacgccacgcgagggagccccgccgcagcagcacccgcgccgtcccaattcggcgccccgatcgccggatctcctcgccggcgccggggccctcgatcgccctctccccatgcccgtgcccctccgggggtttcattgcgcgggcgccggccatgtcggacctcgcttccagctgcaaggataaacttgcgtattttagaataaaggagctcaaagatatcttaaatcagctggggttaccgaagcaaggaaagaagcaggaccttgttgacagggtattggctattttatcagatgagcaaggtcaacatcatcatggatggggaaggaaaaatgctcttacaagggaggcggtggcaaaagttgttgatgacacatacaggaaaatgcaagtatgtgctcctgaccttccctctagaagccacagtggatcagatttcagtcatttcaggcccaaagaggaagcgcctgacttctaccatgtggatactaaggtccgctgcctttgcaatagcacattgctaaatgacaatatgattaagtgcgaagatggcaaatgccaggtgtggcagcatattacctgcgtactcattccagataagcccacggagggtgctggccctgatattccacctcatttttattgtgaactgtgccgactgaaacgggcagacccgttttgggtgactaccggaaatccattactacctgtgaaatttatgtcatctggtgttggaaatgatggagcaagtgtacctcaaattgtggagaagactttccaactttcccgagcagatagagaaacagttcagagacaagaatatgatctccaggtttggtgcatccttataaatgacaaagtccagttcaggatgcaatggcctcaatatgcagaattgtattcctgtacgagtaatgaccaggcccggttctcagttactagggataaatgggcgggatgatgggccactggtaaccacatgcagtagagaagggatcaacaaaattagcttatctagagtggatgctcgaaccttttgctttggagttcgaattgttaggaggaggactgttcctcaggtattaaatttgatcccaaaggaaggtgaaggggagtcttttgaggatgctcttgctcgtgttcgtcgctgtcttggaggtggaggtgctacggacaatgctgatagtgatagcgacctggaagtggttactgaatctgttacagtcaaccttcgttgccctaatagcggatccagaatgaggattgctggaaggttcaagccttgtgttcacatgggctgttttgatcttgaaacttttgtggaattgaatcaacgctcacgcaagtggcaatgcccaatatgtttaaagaattactctctcgagaacttgatgatcgatccttatttcaaccggattacatctttgttgcacaattgcagtgaagatgttaatgagcttgatgttaaacctgatgggtcatggcgtgtgaagggtgatgccgctaccagagatctatctcagtggcatatgcctgatggtactctttgtgactcaaaggaagatacaaaccctggtgtcgttagtgttaatgagttcaagagagagggtacttctgatggacatagaactttgaaacttggaattaaaaaaacccctaatggattatggcaggttagcagtaaaccagatgataagaaacccgtggttagaaatcacatccaaaacaacacggggtactcaataccaaacatagtacctatgatcagtagccccactgggagttgcagagatggtgaagatgtaagtgtgaaccaagaagggggtggtattcagtttgatatatcattgaaccaagagtttgacagttttgcgcataactttggtcaaacatacaatacagaggataggcaacaagagccacaacataatgctgcagatgtcattgttcttagtgattctgatgaagaaaatgacccgattgttcgcctgccagctgtctatgcaaatactcctacaaatggtgacagtttccctttcgtcactgatgctgctgtatctggatatcctgaagggtaccaggaggatgctggggttggtacaagtggccttggtttattgagcaacaatactggtgattttgaaataaataactggcaaatgcattcttatccacaaccagagcaagggttccagttttttgggactgatactgatgttggcaatccttttgttggtccgcataattcctttagtattacaccagaagactactcccttgactgtaatgttggcatagaggatccatctgcagctcacgatgtctcaatttgccgaaacagtaatgatgtgcatggaagcttggttgataacccattggctttagcaggtgacgatccatctttgcaaattttccttccaagtcaaccttctactgttccccttcaggaagaactgagtgagcgcgctaatactccaaatggagtccaccctgatgattggaggatatctcttacgcttgcggctggtggagggggtaatgaagaacctacaagtgttgatggcctaaaatcacagccaaaagttccatcaaaagaggcaggagttgaacctttacttgatgctgcttctgctctcccaagcatgaacaatgacagatgtaatggatctaatctaaacccgagaaggattgaaaatatattttctcatcctcgccaaccacggtctgttaggcctcgtttgtgtttgtcattagattctgattcagagtagttcggacatcacactgggatagctgaatttgctattaatctggcaaagttggcttccagaatcttgatttttattgtggagggctatcaagttattctggttgatacaaagagaaacaccagtgtggatgctttattgcattaacctggtaagattcaagtgttctatatgatccaagtgggatctccatagagttcatctaatggttggtacaggatattttctaactgggagtggtttaacgtggctagtggagcaggctgtacattttccctgacatttactgggtataaggaatagggggccatcacttggcacaagacaaatacatgtgaatgttttgtgtgtaccatcattgtatttagggttcgggtgttaatttagatgtttatgaccctgatgtttgatggaaaataaattattccttgatgaagcggcggtcaatgaacagagcccttcggttttcagtcggagctactgacccttcatctgttcctgtggtgaagtggttgctgccgcttccgtggtgggaccaaccatgccgaagtcgtgtctagcagagggcaatcaatctccttggtgtctagcaggtttctttgtgcatcatgctgtattattctggtgtcctttgcaggtggtggtggattgtatcggtgttgtgaacccttctgattgaaaggtgctgggatggagtactggtatgaagaacttatcttctttcagaaca

SEQ ID NO: 77039 - DNA, 3624 bp, Zea Mays
tcaccctttctcgacgaacccgtcccacaagcacgcgcgacgcgagccaaggaagacgagagcgaggtggagagagagagagagaggaaaaccctgccccgtccaggcagccgtcgtcgacgcaaacggcggaggccacagagacgccacgcgagggagccccgccgcagcagcacccgcgccgtcccaattcggcgccccgatcgccggatctcctcgccggcgccggggccctcgatcgccctctccccatgcccgtgcccctccgggggtttcattgcgcgggcgccggccatgtcggacctcgcttccagctgcaaggataaacttgcgtattttagaataaaggagctcaaagatatcttaaatcagctggggttaccgaagcaaggaaagaagcaggaccttgttgacagggtattggctattttatcagatgagcaaggtcaacatcatcatggatggggaaggaaaaatgctcttacaagggaggcggtggcaaaagttgttgatgacacatacaggaaaatgcaagtatgtgctcctgaccttccctctagaagccacagtggatcagatttcagtcatttcaggcccaaagaggaagcgcctgacttctaccatgtggatactaaggtccgctgcctttgcaatagcacattgctaaatgacaatatgattaagtgcgaagatggcaaatgccaggtgtggcagcatattacctgcgtactcattccagataagcccacggagggtgctggccctgatattccacctcatttttattgtgaactgtgccgactgaaacgggcagacccgttttgggtgactaccggaaatccattactacctgtgaaatttatgtcatctggtgttggaaatgatggagcaagtgtacctcaaattgtggagaagactttccaactttcccgagcagatagagaaacagttcagagacaagaatatgatctccaggtttggtgcatccttataaatgacaaagtccagttcaggatgcaatggcctcaatatgcagaattgcaagtgaacggtattcctgtacgagtaatgaccaggcccggttctcagttactagggataaatgggcgggatgatgggccactggtaaccacatgcagtagagaagggatcaacaaaattagcttatctagagtggatgctcgaaccttttgctttggagttcgaattgttaggaggaggactgttcctcaggtattaaatttgatcccaaaggaaggtgaaggggagtcttttgaggatgctcttgctcgtgttcgtcgctgtcttggaggtggaggtgctacggacaatgctgatagtgatagcgacctggaagtggttactgaatctgttacagtcaaccttcgttgccctaatagcggatccagaatgaggattgctggaaggttcaagccttgtgttcacatgggctgttttgatcttgaaacttttgtggaattgaatcaacgctcacgcaagtggcaatgcccaatatgtttaaagaattactctctcgagaacttgatgatcgatccttatttcaaccggattacatctttgttgcacaattgcagtgaagatgttaatgagcttgatgttaaacctgatgggtcatggcgtgtgaagggtgatgccgctaccagagatctatctcagtggcatatgcctgatggtactctttgtgactcaaaggaagatacaaaccctggtgtcgttagtgttaatgagttcaagagagagggtacttctgatggacatagaactttgaaacttggaattaaaaaaacccctaatggattatggcaggttagcagtaaaccagatgataagaaacccgtggttagaaatcacatccaaaacaacacggggtactcaataccaaacatagtacctatgatcagtagccccactgggagttgcagagatggtgaagatgtaagtgtgaaccaagaagggggtggtattcagtttgatatatcattgaaccaagagtttgacagttttgcgcataactttggtcaaacatacaatacagaggataggcaacaagagccacaacataatgctgcagatgtcattgttcttagtgattctgatgaagaaaatgacccgattgttcgcctgccagctgtctatgcaaatactcctacaaatggtgacagtttccctttcgtcactgatgctgctgtatctggatatcctgaagggtaccaggaggatgctggggttggtacaagtggccttggtttattgagcaacaatactggtgattttgaaataaataactggcaaatgcattcttatccacaaccagagcaagggttccagttttttgggactgatactgatgttggcaatccttttgttggtccgcataattcctttagtattacaccagaagactactcccttgactgtaatgttggcatagaggatccatctgcagctcacgatgtctcaatttgccgaaacagtaatgatgtgcatggaagcttggttgataacccattggctttagcaggtgacgatccatctttgcaaattttccttccaagtcaaccttctactgttccccttcaggaagaactgagtgagcgcgctaatactccaaatggagtccaccctgatgattggaggatatctcttacgcttgcggctggtggagggggtaatgaagaacctacaagtgttgatggcctaaaatcacagccaaaagttccatcaaaagagcttctgctctcccaagcatgaacaatgacagatgtaatggatctaatctaaacccgagaaggattgaaaatatattttctcatcctcgccaaccacggtctgttaggcctcgtttgtgtttgtcattagattctgattcagagtagttcggacatcacactgggatagctgaatttgctattaatctggcaaagttggcttccagaatcttgatttttattgtggagggctatcaagttattctggttgatacaaagagaaacaccagtgtggatgctttattgcattaacctggtaagattcaagtgttctatatgatccaagtgggatctccatagagttcatctaatggttggtacaggatattttctaactgggagtggtttaacgtggctagtggagcaggctgtacattttccctgacatttactgggtataaggaatagggggccatcacttggcacaagacaaatacatgtgaatgttttgtgtgtaccatcattgtatttagggttcgggtgttaatttagatgtttatgaccctgatgtttgatggaaaataaattattccttgatgaagcggcggtcaatgaacagagcccttcggttttcagtcggagctactgacccttcatctgttcctgtggtgaagtggttgctgccgcttccgtggtgggaccaaccatgccgaagtcgtgtctagcagagggcaatcaatctccttggtgtctagcaggtttctttgtgcatcatgctgtattattctggtgtcctttgcaggtggtggtggattgtatcggtgttgtgaacccttctgattgaaaggtgctgggatggagtactggtatgaagaacttatcttctttcagaaca

SEQ ID NO: 77040 - DNA, 3718 bp, Zea Mays
ctctctcctcaccctttctcgacgaacccgtcccacaagcacgcgcgacgcgagccaaggaagacgagagcgaggtggagagagagagagagaggaaaaccctgccccgtccaggcagccgtcgtcgacgcaaacggcggaggccacagagacgccacgcgagggagccccgccgcagcagcacccgcgccgtcccaattcggcgccccgatcgccggatctcctcgccggcgccggggccctcgatcgccctctccccatgcccgtgcccctccgggggtttcattgcgcgggcgccggccatgtcggacctcgcttccagctgcaaggataaacttgcgtattttagaataaaggagctcaaagatatcttaaatcagctggggttaccgaagcaaggaaagaagcaggaccttgttgacagggtattggctattttatcagatgagcaaggtcaacatcatcatggatggggaaggaaaaatgctcttacaagggaggcggtggcaaaagttgttgatgacacatacagcaggaaaatgcaagtatgtgctcctgaccttccctctagaagccacagtggatcagatttcagtcatttcaggcccaaagaggaagcgcctgacttctaccatgtggatactaaggtccgctgcctttgcaatagcacattgctaaatgacaatatgattaagtgcgaagatggcaaatgccaggtgtggcagcatattacctgcgtactcattccagataagcccacggagggtgctggccctgatattccacctcatttttattgtgaactgtgccgactgaaacgggcagacccgttttgggtgactaccggaaatccattactacctgtgaaatttatgtcatctggtgttggaaatgatggagcaagtgtacctcaaattgtggagaagactttccaactttcccgagcagatagagaaacagttcagagacaagaatatgatctccaggtttggtgcatccttataaatgacaaagtccagttcaggatgcaatggcctcaatatgcagaattgcaagtgaacggtattcctgtacgagtaatgaccaggcccggttctcagttactagggataaatgggcgggatgatgggccactggtaaccacatgcagtagagaagggatcaacaaaattagcttatctagagtggatgctcgaaccttttgctttggagttcgaattgttaggaggaggactgttcctcaggtattaaatttgatcccaaaggaaggtgaaggggagtcttttgaggatgctcttgctcgtgttcgtcgctgtcttggaggtggaggtgctacggacaatgctgatagtgatagcgacctggaagtggttactgaatctgttacagtcaaccttcgttgccctaatagcggatccagaatgaggattgctggaaggttcaagccttgtgttcacatgggctgttttgatcttgaaacttttgtggaattgaatcaacgctcacgcaagtggcaatgcccaatatgtttaaagaattactctctcgagaacttgatgatcgatccttatttcaaccggattacatctttgttgcacaattgcagtgaagatgttaatgagcttgatgttaaacctgatgggtcatggcgtgtgaagggtgatgccgctaccagagatctatctcagtggcatatgcctgatggtactctttgtgactcaaaggaagatacaaaccctggtgtcgttagtgttaatgagttcaagagagagggtacttctgatggacatagaactttgaaacttggaattaaaaaaacccctaatggattatggcaggttagcagtaaaccagatgataagaaacccgtggttagaaatcacatccaaaacaacacggggtactcaataccaaacatagtacctatgatcagtagccccactgggagttgcagagatggtgaagatgtaagtgtgaaccaagaagggggtggtattcagtttgatatatcattgaaccaagagtttgacagttttgcgcataactttggtcaaacatacaatacagaggataggcaacaagagccacaacataatgctgcagatgtcattgttcttagtgattctgatgaagaaaatgacccgattgttcgcctgccagctgtctatgcaaatactcctacaaatggtgacagtttccctttcgtcactgatgctgctgtatctggatatcctgaagggtaccaggaggatgctggggttggtacaagtggccttggtttattgagcaacaatactggtgattttgaaataaataactggcaaatgcattcttatccacaaccagagcaagggttccagttttttgggactgatactgatgttggcaatccttttgttggtccgcataattcctttagtattacaccagaagactactcccttgactgtaatgttggcatagaggatccatctgcagctcacgatgtctcaatttgccgaaacagtaatgatgtgcatggaagcttggttgataacccattggctttagcaggtgacgatccatctttgcaaattttccttccaagtcaaccttctactgttccccttcaggaagaactgagtgagcgcgctaatactccaaatggagtccaccctgatgattggaggatatctcttacgcttgcggctggtggagggggtaatgaagaacctacaagtgttgatggcctaaaatcacagccaaaagttccatcaaaagaggcaggagttgaacctttacttgatgctgcctgtcaaccatttccaggatcatcgaggttaacttttgaaggcaggcatcttagcttctgctctcccaagcatgaacaatgacagatgtaatggatctaatctaaacccgagaaggattgaaaatatattttctcatcctcgccaaccacggtctgttaggcctcgtttgtgtttgtcattagattctgattcagagtagttcggacatcacactgggatagctgaatttgctattaatctggcaaagttggcttccagaatcttgatttttattgtggagggctatcaagttattctggttgatacaaagagaaacaccagtgtggatgctttattgcattaacctggtaagattcaagtgttctatatgatccaagtgggatctccatagagttcatctaatggttggtacaggatattttctaactgggagtggtttaacgtggctagtggagcaggctgtacattttccctgacatttactgggtataaggaatagggggccatcacttggcacaagacaaatacatgtgaatgttttgtgtgtaccatcattgtatttagggttcgggtgttaatttagatgtttatgaccctgatgtttgatggaaaataaattattccttgatgaagcggcggtcaatgaacagagcccttcggttttcagtcggagctactgacccttcatctgttcctgtggtgaagtggttgctgccgcttccgtggtgggaccaaccatgccgaagtcgtgtctagcagagggcaatcaatctccttggtgtctagcaggtttctttgtgcatcatgctgtattattctggtgtcctttgcaggtggtggtggattgtatcggtgttgtgaacccttctgattgaaaggtgctgggatggagtactggtatgaagaacttatcttctttcagaaca

SEQ ID NO: 77041 - DNA, 3526 bp, Zea Mays
aaaaaaccggatttgatagcggccgatacgtccgccgcggcggctgaataggagagagaaaccgccccccctctctcctcaccctttctcgacgaacccgtcccacaagcacgcgcgacgcgagccaaggaagacgagagcgaggtggagagagagagagagaggaaaaccctgccccgtccaggcagccgtcgtcgacgcaaacggcggaggccacagagacgccacgcgagggagccccgccgcagcagcacccgcgccgtcccaattcggcgccccgatcgccggatctcctcgccggcgccggggccctcgatcgccctctccccatgcccgtgcccctccgggggtttcattgcgcgggcgccggccatgtcggacctcgcttccagctgcaaggataaacttgcgtattttagaataaaggagctcaaagatatcttaaatcagctggggttaccgaagcaaggaaagaagcaggaccttgttgacagggtattggctattttatcagatgagcaaggtcaacatcatcatggatggggaaggaaaaatgctcttacaagggaggcggtggcaaaagttgttgatgacacatacaggaaaatgcaagtatgtgctcctgaccttccctctagaagccacagtggatcagatttcagtcatttcaggcccaaagaggaagcgcctgacttctaccatgtggatactaaggtccgctgcctttgcaatagcacattgctaaatgacaatatgattaagtgcgaagatggcaaatgccaggtgtggcagcatattacctgcgtactcattccagataagcccacggagggtgctggccctgatattccacctcatttttattgtgaactgtgccgactgaaacgggcagacccgttttgggtgactaccggaaatccattactacctgtgaaatttatgtcatctggtgttggaaatgatggagcaagtgtacctcaaattgtggagaagactttccaactttcccgagcagatagagaaacagttcagagacaagaatatgatctccaggtttggtgcatccttataaatgacaaagtccagttcaggatgcaatggcctcaatatgcagaattgcaagtgaacggtattcctgtacgagtaatgaccaggcccggttctcagttactagggataaatgggcgggatgatgggccactggtaaccacatgcagtagagaagggatcaacaaaattagcttatctagagtggatgctcgaaccttttgctttggagttcgaattgttaggaggaggactgttcctcaggtattaaatttgatcccaaaggaaggtgaaggggagtcttttgaggatgctcttgctcgtgttcgtcgctgtcttggaggtggaggtgctacggacaatgctgatagtgatagcgacctggaagtggttactgaatctgttacagtcaaccttcgttgccctaatagcggatccagaatgaggattgctggaaggttcaagccttgtgttcacatgggctgttttgatcttgaaacttttgtggaattgaatcaacgctcacgcaagtggcaatgcccaatatgtttaaagaattactctctcgagaacttgatgatcgatccttatttcaaccggattacatctttgttgcacaattgcagtgaagatgttaatgagcttgatgttaaacctgatgggtcatggcgtgtgaagggtgatgccgctaccagagatctatctcagtggcatatgcctgatggtactctttgtgactcaaaggaagatacaaaccctggtgtcgttagtgttaatgagttcaagagagagggtacttctgatggacatagaactttgaaacttggaattaaaaaaacccctaatggattatggcaggttagcagtaaaccagatgataagaaacccgtggttagaaatcacatccaaaacaacacggggtactcaataccaaacatagtacctatgatcagtagccccactgggagttgcagagatggtgaagatgtaagtgtgaaccaagaagggggtggtattcagtttgatatatcattgaaccaagagtttgacagttttgcgcataactttggtcaaacatacaatacagaggataggcaacaagagccacaacataatgctgcagatgtcattgttcttagtgattctgatgaagaaaatgacccgattgttcgcctgccagctgtctatgcaaatactcctacaaatggtgacagtttccctttcgtcactgatgctgctgtatctggatatcctgaagggtaccaggaggatgctggggttggtacaagtggccttggtttattgagcaacaatactggtgattttgaaataaataactggcaaatgcattcttatccacaaccagagcaagggttccagttttttgggactgatactgatgttggcaatccttttgttggtccgcataattcctttagtattacaccagaagactactcccttgactgtaatgttggcatagaggatccatctgcagctcacgatgtctcaatttgccgaaacagtaatgatgtgcatggaagcttggttgataacccattggctttagcagtccaccctgatgattggaggatatctcttacgcttgcggctggtggagggggtaatgaagaacctacaagtgttgatggcctaaaatcacagccaaaagttccatcaaaagaggcaggagttgaacctttacttgatgctgcttctgctctcccaagcatgaacaatgacagatgtaatggatctaatctaaacccgagaaggattgaaaatatattttctcatcctcgccaaccacgaatcttgatttttattgtggagggctatcaagttattctggttgatacaaagagaaacaccagtgtggatgctttattgcattaacctggtaagattcaagtgttctatatgatccaagtgggatctccatagagttcatctaatggttggtacaggatattttctaactgggagtggtttaacgtggctagtggagcaggctgtacattttccctgacatttactgggtataaggaatagggggccatcacttggcacaagacaaatacatgtgaatgttttgtgtgtaccatcattgtatttagggttcgggtgttaatttagatgtttatgaccctgatgtttgatggaaaataaattattccttgatgaagcggcggtcaatgaacagagcccttcggttttcagtcggagctactgacccttcatctgttcctgtggtgaagtggttgctgccgcttccgtggtgggaccaaccatgccgaagtcgtgtctagcagagggcaatcaatctccttggtgtctagcaggtttctttgtgcatcatgctgtattattctggtgtcctttgcaggtggtggtggattgtatcggtgttgtgaacccttctgattgaaaggtgctgggatggagtactggtatgaagaacttatcttctttcagaaca

SEQ ID NO: 77042 - DNA, 4377 bp, Zea Mays
aaaaaaccggatttgatagcggccgatacgtccgccgcggcggctgaataggagagagaaaccgccccccctctctcctcaccctttctcgacgaacccgtcccacaagcacgcgcgacgcgagccaaggaagacgagagcgaggtggagagagagagagagaggaaaaccctgccccgtccaggcagccgtcgtcgacgcaaacggcggaggccacagagacgccacgcgagggagccccgccgcagcagcacccgcgccgtcccaattcggcgccccgatcgccggatctcctcgccggcgccggggccctcgatcgccctctccccatgcccgtgcccctccgggggtttcattgcgcgggcgccggccatgtcggacctcgcttccagctgcaaggataaacttgcgtattttagaataaaggagctcaaagatatcttaaatcagctggggttaccgaagcaaggaaagaagcaggaccttgttgacagggtattggctattttatcagatgagcaaggtcaacatcatcatggatggggaaggaaaaatgctcttacaagggaggcggtggcaaaagttgttgatgacacatacaggaaaatgcaagtatgtgctcctgaccttccctctagaagccacagtggatcagatttcagtcatttcaggcccaaagaggaagcgcctgacttctaccatgtggatactaaggtccgctgcctttgcaatagcacattgctaaatgacaatatgattaagtgcgaagatggcaaatgccaggtgtggcagcatattacctgcgtactcattccagataagcccacggagggtgctggccctgatattccacctcatttttattgtgaactgtgccgactgaaacgggcagacccgttttgggtgactaccggaaatccattactacctgtgaaatttatgtcatctggtgttggaaatgatggagcaagtgtacctcaaattgtggagaagactttccaactttcccgagcagatagagaaacagttcagagacaagaatatgatctccaggtttggtgcatccttataaatgacaaagtccagttcaggatgcaatggcctcaatatgcagaattgcaagtgaacggtattcctgtacgagtaatgaccaggcccggttctcagttactagggataaatgggcgggatgatgggccactggtaaccacatgcagtagagaagggatcaacaaaattagcttatctagagtggatgctcgaaccttttgctttggagttcgaattgttaggaggaggactgttcctcaggtattaaatttgatcccaaaggaaggtgaaggggagtcttttgaggatgctcttgctcgtgttcgtcgctgtcttggaggtggaggtgctacggacaatgctgatagtgatagcgacctggaagtggttactgaatctgttacagtcaaccttcgttgccctaatagcggatccagaatgaggattgctggaaggttcaagccttgtgttcacatgggctgttttgatcttgaaacttttgtggaattgaatcaacgctcacgcaagtggcaatgcccaatatgtttaaagaattactctctcgagaacttgatgatcgatccttatttcaaccggattacatctttgttgcacaattgcagtgaagatgttaatgagcttgatgttaaacctgatgggtcatggcgtgtgaagggtgatgccgctaccagagatctatctcagtggcatatgcctgatggtactctttgtgactcaaaggaagatacaaaccctggtgtcgttagtgttaatgagttcaagagagagggtacttctgatggacatagaactttgaaacttggaattaaaaaaacccctaatggattatggcaggttagcagtaaaccagatgataagaaacccgtggttagaaatcacatccaaaacaacacggggtactcaataccaaacatagtacctatgatcagtagccccactgggagttgcagagatggtgaagatgtaagtgtgaaccaagaagggggtggtattcagtttgatatatcattgaaccaagagtttgacagttttgcgcataactttggtcaaacatacaatacagaggataggcaacaagagccacaacataatgctgcagatgtcattgttcttagtgattctgatgaagaaaatgacccgattgttcgcctgccagctgtctatgcaaatactcctacaaatggtgacagtttccctttcgtcactgatgctgctgtatctggatatcctgaagggtaccaggaggatgctggggttggtacaagtggccttggtttattgagcaacaatactggtgattttgaaataaataactggcaaatgcattcttatccacaaccagagcaagggttccagttttttgggactgatactgatgttggcaatccttttgttggtccgcataattcctttagtattacaccagaagactactcccttgactgtaatgttggcatagaggatccatctgcagctcacgatgtctcaatttgccgaaacagtaatgatgtgcatggaagcttggttgataacccattggctttagcaggtgacgatccatctttgcaaattttccttccaagtcaaccttctactgttccccttcaggaagaactgagtgagcgcgctaatactccaaatggagtccaccctgatgattggaggatatctcttacgcttgcggctggtggagggggtaatgaagaacctacaagtgttgatggcctaaaatcacagccaaaagttccatcaaaagaggcaggagttgaacctttacttgatgctgcttctgctctcccaagcatgaacaatgacagatgtaatggatctaatctaaacccgagaaggattgaaaatatattttctcatcctcgccaaccacgaatcttgatttttattgtggagggctatcaagttattctggttgatacaaagagaaacaccagtgtggatgctttattgcattaacctggtaagattcaagtgttctatatgatccaagtgggatctccatagagttcatctaatggtaaggacagatgattagcctcttcatgtgatggatttgctgctatgttttatgaactatttcattgcagtttttgtgattcaagtagctgagttgtaattaaacatgttgaacttcaatgccctatgaaataaaaatgaagttgaccaggataaaaagaagcaaacaaaaactggtaggatctgatcagcaatcaaccgaatgatcgtagcctacacttatccttctaatgctatctatatatgcttgattttgtgtagggttgtctccagaaagcttgcttgttacttatatcccacacacttgcgcgcacgcaacccggcctttgtccctctcttgcctctcactgctgctgcccctcgctattcttctctgatcgatttctgtcatggcttcattctggttcagctgccgctgtagcgggatgacccaggtttgccgcagatgacccaggtgggactatgcggtggccggcagccccagatttggtgggggatgagataggaggtggctgcatggcctttcttgttggttttctatcgatttcctatgttgtgctctctaatcctctcagctctctacttttggctaggcgtcaaggacgcccacgcgatgccttaaaaacactgcttatgtgaatattgtttcaaaatacgtctgcttgattgtttagcatgaattgagtcgatgtgagtgcctgtagtttctttgctagtccaaccgacgtggtaactgatatgttttatgtatttcaggttggtacaggatattttctaactgggagtggtttaacgtggctagtggagcaggctgtacattttccctgacatttactgggtataaggaatagggggccatcacttggcacaagacaaatacatgtgaatgttttgtgtgtaccatcattgtatttagggttcgggtgttaatttagatgtttatgaccctgatgtttgatggaaaataaattattccttgatgaagcggcggtcaatgaacagagcccttcggttttcagtcggagctactgacccttcatctgttcctgtggtgaagtggttgctgccgcttccgtggtgggaccaaccatgccgaagtcgtgtctagcagagggcaatcaatctccttggtgtctagcaggtttctttgtgcatcatgctgtattattctggtgtcctttgcaggtggtggtggattgtatcggtgttgtgaacccttctgattgaaaggtgctgggatggagtactggtatgaagaacttatcttctttcagaaca

SEQ ID NO: 77043 - DNA, 1763 bp, Zea Mays
cccccgccgtatcggtcttgttcaggcaggggagagtgcctgtttcgatggggaagaagggcaagtggttcggcgccgtcaagaaggtcttcagccctgaatccaaggagaagaaagaggagaggctaaggaggaagtcagcagctagcaacccgacgccggtagatctgaccccgtctacctccttggaagtcaatctttcggtgccaccgcctccagctcctcccccagttcttcaccaggccgaggaggttggggtccctgaagccgagcaggagcagagcaagcatgtcgccgtggaggaggcccctgctgccgccccagcgcaggcgtcggtgctgccacctgctgtgccaacccaggagctcgccgcagtcaagatccagaccgccttccgaggttacctggcaaggagggcactacgagcactgcgaggccttgttcgattgaagtcattggttgagggtaattcagtaaagcgtcaatctgcaagcactctgcgctgcatgcaaactctatcacgggtgcagtcacagatatcttccaggagagcaaagatgtccgaggagaaccaggctctccaacgccagctcctacttaaacaggaactggagaatttcagaatgggtgagaactgggatgacagcacccaatccaaggagcaaatcgaggcaagcctgataagcaggcaagaggcggcgataagaagagaaagagcgcttgcatatgcattttcacaccagtggaagagtacatcgagatctgtcaacccaatgtttgtagacccaaacaacctgcagtggggctggagctggctggagcgctggatggcagcaaaaccatgggaaggccgcaatggggctgacaaggagagcaacattgaccggggatccgttaagagcatgagcttgaaccttggagagggtgagatcacaaaagctttcaaccgccgggactcaaagctagaaaagccatcgccgccaactccaagaccggcccgtccaacttccaggcattcccctttgacgccctctgctagagtggcaccgatacctgcgaggagaaaatttgtcacgcccaagaacgggctttcacaggtggacgatgacgcgaggagcgtgctcagtgtgcagtctgagcggccaagaaggcacagtatagccacctcgactgtgcgggacgacgagagcctcacgagctccccgtcgctcccaagctacatggttcccacagaatctgcaagggccaaatctcgcctccagggttcagcaacggccaatggcgcagagacacctgagaaaggaggctcgactggaccagccaagaagaggttatccttccagggtggaactgtgtctgcctcgccaatgcgacgacattctggtcctcccaaggtggagatcgcgccaccacaaccagaggccttggtagtcaatggtggaagcaagtgacacatatgtgatgagtaccaggatgagaaacggattatgaagatattagtttcattttcatccatgaatagaagttaaaagtggtatcatatctatgaatggtttcaattgtttttctgttacaaccacattatttgctatatacgattcacagtacctgccagttgattccattggttgtttctgtaaaacaaatatcaatttgtcactagaatctgtgatgtttgtatgtaaacaggtcctctatttatgtgagacatatatttcttttctttcagaagatccccttgaagtgtgttacccttgcaagct

SEQ ID NO: 77044 - DNA, 1814 bp, Zea Mays
atctccaagctgtccaaagtcgtcagtttccctccccctacaggctacaaactcctcaccgcaccaccgcgactgcgagagaaaagggggagggggaggagcgaggaggagtaggactgtaggaggagcgacgcatcgcaacgccaacactcacagttgactatcccaccaagaggctaaggaggaagtcagcagctagcaacccgacgccggtagatctgaccccgtctacctccttggaagtcaatctttcggtgccaccgcctccagctcctcccccagttcttcaccaggccgaggaggttggggtccctgaagccgagcaggagcagagcaagcatgtcgccgtggaggaggcccctgctgccgccccagcgcaggcgtcggtgctgccacctgctgtgccaacccaggagctcgccgcagtcaagatccagaccgccttccgaggttacctggcaaggagggcactacgagcactgcgaggccttgttcgattgaagtcattggttgagggtaattcagtaaagcgtcaatctgcaagcactctgcgctgcatgcaaactctatcacgggtgcagtcacagatatcttccaggagagcaaagatgtccgaggagaaccaggctctccaacgccagctcctacttaaacaggaactggagaatttcagaatgggtgagaactgggatgacagcacccaatccaaggagcaaatcgaggcaagcctgataagcaggcaagaggcggcgataagaagagaaagagcgcttgcatatgcattttcacaccagtggaagagtacatcgagatctgtcaacccaatgtttgtagacccaaacaacctgcagtggggctggagctggctggagcgctggatggcagcaaaaccatgggaaggccgcaatggggctgacaaggagagcaacattgaccggggatccgttaagagcatgagcttgaaccttggagagggtgagatcacaaaagctttcaaccgccgggactcaaagctagaaaagccatcgccgccaactccaagaccggcccgtccaacttccaggcattcccctttgacgccctctgctagagtggcaccgatacctgcgaggagaaaatttgtcacgcccaagaacgggctttcacaggtggacgatgacgcgaggagcgtgctcagtgtgcagtctgagcggccaagaaggcacagtatagccacctcgactgtgcgggacgacgagagcctcacgagctccccgtcgctcccaagctacatggttcccacagaatctgcaagggccaaatctcgcctccagggttcagcaacggccaatggcgcagagacacctgagaaaggaggctcgactggaccagccaagaagaggttatccttccagggtggaactgtgtctgcctcgccaatgcgacgacattctggtcctcccaaggtggagatcgcgccaccacaaccagaggccttggtagtcaatggtggaagcaagtgacacatatgtgatgagtaccaggatgagaaacggattatgaagatattagtttcattttcatccatgaatagaagttaaaagtggtatcatatctatgaatggtttcaattgtttttctgttacaaccacattatttgctatatacgattcacagtacctgccagttgattccattggttgtttctgtaaaacaaatatcaatttgtcactagaatctgtgatgtttgtatgtaaacaggtcctctatttatgtgagacatatatttcttttctttcagaagatccccttgaagtgtgttacccttgcaagct

SEQ ID NO: 77045 - DNA, 2278 bp, Zea Mays
atctccaagctgtccaaagtcgtcagtttccctccccctacaggctacaaactcctcaccgcaccaccgcgactgcgagagaaaagggggagggggaggagcgaggaggagtaggactgtaggaggagcgacgcatcgcaacgccaacactcacagttgactatcccaccaaggttcaggcaggggagagtgcctgtttcgatggggaagaagggcaagtggttcggcgccgtcaagaaggtcttcagccctgaatccaaggagaagaaagaggaggtgatggttcccggcccccattcgaaaattctcttgcgtttttttccccactaggatttgatcgggttcgtgtttcccccacgcccgggattccgtagagttcagtacaaaaaaaaagaaaaaagacggcatcttgttcggccttttctacactattctcacagctggtgaatttttggttctgcattctgcatccatgtcaagcaaccaagacggcatttcatcctcccctctttacgactgtcttgcggatctgtgatcaaagcgccgcctttttttccccttgcatttgtgttttttgtaactaaagttcgagctggattctgatcacaacccagaactttgccattggaattaacagaggctaaggaggaagtcagcagctagcaacccgacgccggtagatctgaccccgtctacctccttggaagtcaatctttcggtgccaccgcctccagctcctcccccagttcttcaccaggccgaggaggttggggtccctgaagccgagcaggagcagagcaagcatgtcgccgtggaggaggcccctgctgccgccccagcgcaggcgtcggtgctgccacctgctgtgccaacccaggagctcgccgcagtcaagatccagaccgccttccgaggttacctggcaaggagggcactacgagcactgcgaggccttgttcgattgaagtcattggttgagggtaattcagtaaagcgtcaatctgcaagcactctgcgctgcatgcaaactctatcacgggtgcagtcacagatatcttccaggagagcaaagatgtccgaggagaaccaggctctccaacgccagctcctacttaaacaggaactggagaatttcagaatgggtgagaactgggatgacagcacccaatccaaggagcaaatcgaggcaagcctgataagcaggcaagaggcggcgataagaagagaaagagcgcttgcatatgcattttcacaccagtggaagagtacatcgagatctgtcaacccaatgtttgtagacccaaacaacctgcagtggggctggagctggctggagcgctggatggcagcaaaaccatgggaaggccgcaatggggctgacaaggagagcaacattgaccggggatccgttaagagcatgagcttgaaccttggagagggtgagatcacaaaagctttcaaccgccgggactcaaagctagaaaagccatcgccgccaactccaagaccggcccgtccaacttccaggcattcccctttgacgccctctgctagagtggcaccgatacctgcgaggagaaaatttgtcacgcccaagaacgggctttcacaggtggacgatgacgcgaggagcgtgctcagtgtgcagtctgagcggccaagaaggcacagtatagccacctcgactgtgcgggacgacgagagcctcacgagctccccgtcgctcccaagctacatggttcccacagaatctgcaagggccaaatctcgcctccagggttcagcaacggccaatggcgcagagacacctgagaaaggaggctcgactggaccagccaagaagaggttatccttccagggtggaactgtgtctgcctcgccaatgcgacgacattctggtcctcccaaggtggagatcgcgccaccacaaccagaggccttggtagtcaatggtggaagcaagtgacacatatgtgatgagtaccaggatgagaaacggattatgaagatattagtttcattttcatccatgaatagaagttaaaagtggtatcatatctatgaatggtttcaattgtttttctgttacaaccacattatttgctatatacgattcacagtacctgccagttgattccattggttgtttctgtaaaacaaatatcaatttgtcactagaatctgtgatgtttgtatgtaaacaggtcctctatttatgtgagacatatatttcttttctttcagaagatccccttgaagtgtgttacccttgcaagct

SEQ ID NO: 77046 - DNA, 2456 bp, Zea Mays
cacgctcggaggctcccctttcattttcacctcgctccggggccaagtcgccagttcaccaccttcacttcacttcgcaccggaccaccggccgtattcattcctcctccctccctcctcgccatacggctgcagcatcttcccctcaccctcctcattaccccgcgtctctccctcaaaactactcattgctctcaccgttccattgcccccgcggccccgccgtacgctcattcccggctagctcctcctccgcacggccatgatcttgagttcttggcattgatgacgttctagtaccgagcgagccagcccctctttaacccaccttaacaataaacacagcctgcccccaccggccacctcttcttcccccgtgcagctcgagctgattcggcgggctctgccccaacatccacccaccttcgtccaatcccgatccaagaccgtgccgtgatccggcagcagcttccgcgcggccatgggcacgggcgcggtggcggtggcggcgccggaccgggccaagcagcggcgggccggcggccacctgtggaagaaggcactgctccacttctccctctgcttcgtcatgggcttcttcacgggcttcgcgccttcctcctcctcctcctggaagtccgccgccgccaccccccagcaccacccgccgcaccgtcccggggaccgcctcgccgcctcccgcgtggccgtcgacgcgcgcgccaccctgtcgccgcccgcggaggccgccgatgcgctctccgccggcgccacggtggacttgggcgacgacgaggaggacgccgcccagcgccgcctcctgatcgtggtcaccaccacgcgctccggccccggggagcgccgccgccgccggggcgagctgctgcgcctcgcccacacgctgcgcctcgtgcgcccgcccgtcgtctgggtcgtcgtcgagcccgccgccgacgcgcccgccaccgctgaggtgctccgcggcaccggcgtcatgtacaggcacctcgccttcaagcccgaggacaacttcaccaccgccgacgccgaggctcacgtgcagcggaacgccgcgctcgcgcatgtcgagaagcaccgactcgccggcgtcctgcacttcgccgacgccgccggcgtctacgacgtcggcttcttcgaacagatccgccagatcgaggcgtttggtacatggcctgtggcaacaatgtcggcgggcgagaagaaagtggtagtggagggtccactgtgcagtgcctcaaaggtcgtcggttggttctcaagggacttcaacgacgggaccacccgttcagtgacgtataacacggaagctgacctgaatcctgctggtgccgctggtacacgagcccacacgatcgacgtctcaggttttgcgttcaatagctctattttgtgggatcctgagcggtggggacggccaacgtcattaccagacacttcacagaagttcgtgcaagaagtgctacttgaagaccgagctaagctgaaggggatcccctccgactgctcccagatcatggtgtggcagtacagcgtgcccagctcgcgatagagggcagccgagaggacgcacaagaggcgtcgcaacctcgcaggcaggggaagaactgcagggggttggatcggagtcgctgtaaatgtggtgggcgatggtaacggcaaggaaagcaagaaggctgattactaagggttctttttctctctctctcctttttgtgttccctttttctttcccctcagttttagttttcaggtttgggaggggggccatgaatgatgaactgtccgtgggagcaaaagaattgcgatagtatttattcagattcatttgtgattctttagcctggtcggttggtcctgttgtgtttgggttaaaaaaaatggcagtggcgtgaggaatggagaaagtttttattgtgttatggcatgaaatcccagcaaggcagcagcaattaacatctggagaacataaaaatcatgtgcaaagggaaagaaaaaaaagagagaagagactgaatctgcgctcaggtcttgctgtcatcgtccctggtgtttccttgcgggacagtgtttatttgcttttgaaaaaggtctgtgctttgcttgtaagtagagatggcaatgggtacccgaaacccgatgggtaaaaaccctattagggtacgggtatggcgaattttgatacccatgggtattttattgggtcatttgttatgcccatcgggtacggtgggcgtgagtatgttctctgttgccccatacccgctacccgatggggaacccgctaacatatgacacgtgggtcggatttatatgtcccaattagatttgaaggcatgattttgtccacggttttgtagaatcaatgctatgttttgtgtgatttgaagtcatggtgttgccatttaatgttgaatattgttgaacctgtgataaaa

SEQ ID NO: 77047 - DNA, 1138 bp, Zea Mays
caaaagtcggggattttgtgatgattcagcgtttgatttccaccattcagttttggctttgctgctgcgttagctacggagcagtaggtataatagtttagaggggaaacaaaacaaaaaaagctgcatttttgtgtaggcaactttcctcagaaatgagaggccatcaatcaagaggataaacaaccatctaaaatccagtctggatgctgcaagccaccgacgtcatgtgcgttcagctacatgaatgagacgtactggacacaaaaccccagcgtcccgacggtgaccaacgacccagactgcaaaaggtggagcaacgaccagcagacgctgtgcttccagtgcgactcgtgcaaggctggcgtcctcgcgggcatcaagaagagctggcgcaaggtggccgtcctgaacatcgtggtgctgattatccttgtgatcgtctacgtcgcgggctgcgccgcgttccgcaacgcgaagaggatcgagaacggcgaggcggtcggcatggcgcggatgaccaagtcccatccgagcaggttccagttctaggccgctgctccgctgccactgcgggttcgaaagctcttgccttgtacaaatggcctgtggggtgtggtcctaaggcttgggcttcgctatgtcttgctgaattgcggattctactgcatttggtggtggaaatggaaagtccagtgtagtttggggttgtgtttgtttgagtgtttagggtaggcctattatgtggggttggctggggtacaatatgagatctgcaagaaacaagagaagttgaatcatctaggagttgttttgtaaggggagatctttaaattctagggggatagttgtatgatggtgccagccatgatgcagtgttttctgaatttctcagattgtatggcaatactagaggtatgatgatatggctgtactgcagcttccaggactgtaggggtgcttcagctctgtgaagtgtgaactgtgtggtatggggagaattctgatgcctgttgcaatttgtcaatggccaagtcctaggtgattgttgtgggccctcattgcagcctacaaaacccttttctaaatggattttattttaaattctttttaaaaagaaattttagaagtgtggttt

SEQ ID NO: 77048 - DNA, 318 bp, Zea Mays
atgaggatgctgaactccagcacggccggcgttgagctagatccctcctccgccggcgcgggcgcgccgcccgccgacgccgcttccgacgcgttcagcaccgacgaccccgagtcgctcgcctccatctccaccggcggcggcgcctcggccacgttcagatccaactgcatctcctgctcctgctcccctcccctccaagcttacaactcgcaagcggcagcccgccaccgatccccagtcgcaactgggctgctaactacctggcgaactggtggtgtctacttcaagaagaagaaccagaggaggaagaggtag

SEQ ID NO: 77049 - DNA, 618 bp, Zea Mays
taatacctgaagatatatatatgcagaaagaaaatacgtaccttcagtcggcagctccccgtgatacgtgctcggctcgaagttcgtcacggcctctctgccattgcatttgatggcggccttgtcgtaggctctggatttcgaagaaagaaagaaaaaagacacgaagaggaatcgagtcggtactcaaccctttggaaattaaaagacatgattatgcatatatgaacggcagaatccaagatgaagaaccttgcagcctctacttcgctgtcgaatagcccaaggtatatgtacctgcacccaagcacggcgttcccaccggtgaggattggaggaattccctagccactacttccctttttttttatcttctgattgaaacaaccagctacatacataaacatgcagctaacctatgtatacttttactgaacaatacatatatacttatatagtcaaccagtactaaatcctacatatataggattaggaggaaaggcacaactaaggttgaatcatcactgcatgctataaaaaaaagaaaaagaaaagaagcgttggttggttcttacttcttgccgaggaactgccccatgcgcgcctcccagcggccgc

SEQ ID NO: 77050 - DNA, 288 bp, Zea Mays
ctcagtgatcctaattaataatactttctgatgatccaagcttgctcctgtcccaagtatcatattttcttttcgcctttcgttaaaaaaaactcttttcatgcattttgaaggaaggtttgaaaaatagtcacacttgtattataaattaacacataaatatataacagacaggacagttgaccgatgatttggtaatccggcctaaaggtccttggaacagacaggtttgaactgctgctgcatctcgatcagtagctgtcacctaacctcatggtttgtgaagac

SEQ ID NO: 77051 - DNA, 148 bp, Zea Mays
gatcaatccaagtgctgaagttagtcaatctcaagctagcagcagcaacagcagctagcaagtacgtccaatcgatcagctaacagtgtgtgtagtgtaaagagtagaggagcgtttttttttcacttaattgggagtgtaagcagca

SEQ ID NO: 77052 - DNA, 4195 bp, Zea Mays
acacccgctcgccctcccttcctcacaacttccccccttttccgtcccgtcccctccctcgtcgccgcgcgcgctagggttagggtttcgccgcatcccggccgctccgcccgcctggggtcgttccggtgggaagccatggcgatcgtgaggaccggaggcggcgtccgcctccccaggcttgacggcggcgcggaggcctcactggaggccacggaggacgaagacgaggaggaggaggggtcacgggcaacgccgtcgcatgagtccgatgccgacggcttctccgccgaggaggagaacggcggaggaggaggagacgatgagccagaggcggaggaggaggaagaggagttcgaggaagaggaggacgagggggactcggggatgggctccgacgagctggacgttgcggagctgggcgagcccagcacggagatgtgccaggtcggggaccagagcatggccgtgccgttggagctctacgacctcgatggtctcggtgacgtgctctcactccacgcctggaatgacctgctcagcgatgacgagcgtctgcgcctcgccgccttcctgcccgatatggaccaggagacctttgcgcgcacactcgtcgagctcctcgcggggcaaaacttccacttcgggagccccctcgccgatttcctcaagcgcctcaagggcgggctgtgtgacccgagggtcaatctgtaccgccgcggcattcgcttcgtggagcggcgcaagcattactactggctgcagagctaccacaactccatggtacggaggctccgggagattaaggattgctggaagggccgcgagggatacagccttgatgagaggctgaggatgttggacacgatgaaggcaaagcagcagcaccaacaacaacagcagagaaaagctctagatttcacaaggcgggctgggtcggagactgattcagagagcaggggatctggggaacaggtcttagctcgacccaagcacgataagagtaggcagaagaaggcagggaagttagcgaaggagaagtcgaaggggctgttgcgggtgggtacaccgaaaggagtggatgaggatgacatgggagggtctggccgtgatgctgtggtggcactctctgagctttctcgtcgagggtatgattctggcacacatagagggaagcttcacaggagcatagatggcctttactcggagtcggaggaccttggatatgaaagggattcgtcaagacctcggtttccgaggccgcttcccaagccagtgaagaaggaattgtctacgagctgtgatgtcaatctgtatgcaaataactacagtgataaccatactgcatctccttactactacagcaggaatctcagtgctaatcagggagtcaccttagcagcagcatatgatcctccatattttgataccagaaggaatgcaaggtacttggagagagactgggtgcaaggtggaaaaggtgtgcacattaacgctttaatgggtgatgagatgaacttgccagctggtaatcacactggtaactcagatgactggcagaaggggcaatctgcaggtgattacaggagcaggaaagatcaagctggctatggtctgaaggttaagtcctataaaagtattgagaaagaggttaatgatgcccgtgttggttctgaccctagaagcaagatatcacaagcgaaggtggcaggtaaatccagtagacaactagataggactggccagaagcactggagcaatgctgtctatggtcaaagtgacgagacagaatctgattcatcagaaaagtttgaagatggcagggaagcacattatctcgagcggaagccagagcgtcaccattctgggtatcatagaccagcacatggtgccaaaaaatcaaacaagcttgctaaagtggccaaaatgaactatcctactgctgatgcagatttagaaccttcccagagcaaaggattcaaagggaaggtttcagagactggttatttacgtgatgtggatgtgatgatgacaggacagattagtgatgtcatgaaacctctagcagcaagtggtgaaaggaaacgcaaaggggtggcaaatttggacatgcgtgtttatgataactctgatctgcatgaagtcaatgaagatgcaaatgactctttcaggttggcggaatatgaaaggcttgccagtagatcaggccatgcagtccaagattctaatggtggttatggtggtactgaaagaaccagctctagctccaaaaaagcaaaaggaagagtcgaagttcctagcctggatgagcatggtgagcatttgtcatctggcccaaaggttgttgagaacactggtggatccaagaagaaaagcaaaaagaagccagagagcagcaccacagatgcagttattttagcagaaccagctgttgctgtacctgaaaataatgtgatagctgcagagcctgagaaggttgagaagcccaagaagaagtatgtaccgataacaccaacgatccatactggtttttcattctctgttgtacatcttttaactgccgtaaagaaggctatggtcactcctgctgaagatactcctccagccacagcgacacaaccggatggagaggagggcaaaaagtggttcaacagtggagagcgcagcaaaacgccccatcaagaacaaagtgcaacagatcaaactgaacaggtccttgagggtgcaaatgccagtgctgtagaacagactgtaccaatcaatacaccagcgcttactgttcaagagattgtcaatcgaattagagcaaatcctggagatcctaggatacttgaaacacaggagcccctccaggatttagttcgaggagtattaaaagtactttcatctagaacagctcctctaggcgcaaagggctggaaagcactagttgcctatgagaagtcaaacaaaagttggttctgggttggtccagcaccttctgtttcatcatatgatgaccccgatgaagaaacctctgctgaagcatggagtataccacacaagatgctcgttaagttggtcgacgcattttctaattggctgaaaagtggtcaggaaacccttaagcagataggttccctcccaccacctccaccgccaaatcctgcaaacttggatctgaaggaaaggttcaaggagcttaaagcgcagaagagtctgaacacaataagcccgagctcagatgaagcgaggacatatttccagcgtgaggaatttctgaggtactcaatacctgatagagcattctgctacaccgctgctgacggggagaagtctatagttgcacccttgagaagaggaggtggaaagccaacagcgaaagcgaggggccaccccatgctcttaccggacaggccgccgcacgtcaccatcctgtgtctcgtaagggatgccgcgtctaggttgcctgcaaggactggaaccagagccgacgtctgcacactgctcagagattcacagtacctaaaccatgaagaagccaacaaagaggccgcaattaatcaagtcgtcagtggagctctcgaccgtctgcattacgagcgcgacccttgcgttctgtatgacaacgacaaaaagctgtggacctatctgcacaggggcagggaggaggaggatttcgaggacgacggcacgtcgtctacaaagaaatggaagaggccaaggagggatgtctccgatgctgcagagccaggtgcagcgaatgatgatatcgacgacgatggcgctggcacccctccatcaaacaatgtgaaaaaacagaagacaacattgtcaggagaagctgccaacgatgagggaaatcatccgactcagaatccggcttctggtggcctggaaggtgattctgatctcaatgctgttccgtcttcaaaattttttgaagaaccatgtggagatgcctacattgatgcaagaccagatgacggtggcccaaattcagtagatgcgaaaccgggcagcacagctgacgacaacacggcactccctgggaacaccggcatggacgctaccaccccaccatgaataaagaacgtatcatggttcaatcagctagagatttgctgaagggtcagcgtaggtaacttgtgcagaaaccgtatctcatctgcgttgttcttatcgctacagttggctagtattaggagagtttgat

SEQ ID NO: 77053 - DNA, 1290 bp, Zea Mays
gtatttgcagcttgatgagtaaaagagatatgcctcgcaatgatgatcgctatgggaatacacgcttgtatgttggaagattgtctccccgcacccgttctcgtgacctagaataccttttcagcaaatatgggagaattcgagaagtggagttgaagcgtgactatgcattcattgaattcagtgacccccgtgatgctgatgatgcacagtacaacctagatggcagggacgtcgatggaagccgcattattgttgaatttgctaaaggggttcctcgtggttctggtggttcacgtgattacaacggaagaggacctccaccaggaacaggccgttgttttaactgtggagttgatggtcactgggcaagagactgtcaggctggtgactggaagaacaaatgctaccgttgtggcgaaaggggccatatagaaagaaattgccagaacagtccaaggaacctcaggcgtgagagaagctattcacggtctccatccccacgccgaggacggggccgcagccggagctacagcagaagccggagctatagccgatccagatccccgtctggatctcctaggggtggacgccgagaccgtgatgagaggagatcaaggagtcttagctacagcaggagcgcaagccctaggcgttctgtgtcacctgtaaaggaaaaggagcgcagccgcacacctgatggcagtaggagccccagcccaagggacaaggtgagcccaccaccaaaggataatggtgcccacaatggctcggaccgtgaagacagccctgggggcagggagatgagcaagaggagtcggagcccgtctgatggctaccgtagccctgtgggcaatgggcgcagcccgagccgtagcccaagccccaaggtcaacaatggtgatgacccaagccccaagggcaacaatggtgacgacccaagccccaagggcaacaatggtgatgacgagcaccgcggttcaccaagaggaagtcagtccccctgaactgaaaaactccccgtgcaatttggggagcagtgtgcctgatttgagaaaacaaactgtattttgccatttctcagacttgtgatctttttgagcaagaaaactcggtgtaagaatttgttgccctcgggtgtaagacagatttgtggtatttgagcttttcatcctgccaaaagctgaatattcattcaattgccaagtatctcgagtttatctgcttggaatgcatgttggaatgaatagctgtagtttagagcatacaaacaggcgaagtcacagcatg

SEQ ID NO: 77054 - DNA, 1305 bp, Zea Mays
cgttggccatcttcccgttggttggtttctttactgctggagatatgcctcgcaatgatgatcgctatgggaatacacgcttgtatgttggaagattgtctccccgcacccgttctcgtgacctagaataccttttcagcaaatatgggagaattcgagaagtggagttgaagcgtgactatgcattcattgaattcagtgacccccgtgatgctgatgatgcacagtacaacctagatggcagggacgtcgatggaagccgcattattgttgaatttgctaaaggggttcctcgtggttctggtggttcacgtgattacaacggaagaggacctccaccaggaacaggccgttgttttaactgtggagttgatggtcactgggcaagagactgtcaggctggtgactggaagaacaaatgctaccgttgtggcgaaaggggccatatagaaagaaattgccagaacagtccaaggaacctcaggcgtgagagaagctattcacggtctccatccccacgccgaggacggggccgcagccggagctacagcagaagccggagctatagccgatccagatccccgtctggatctcctaggggtggacgccgagaccgtgatgagaggagatcaaggagtcttagctacagcaggagcgcaagccctaggcgttctgtgtcacctgtaaaggaaaaggagcgcagccgcacacctgatggcagtaggagccccagcccaagggacaaggtgagcccaccaccaaaggataatggtgcccacaatggctcggaccgtgaagacagccctgggggcagggagatgagcaagaggagtcggagcccgtctgatggctaccgtagccctgtgggcaatgggcgcagcccgagccgtagcccaagccccaaggtcaacaatggtgatgacccaagccccaagggcaacaatggtgacgacccaagccccaagggcaacaatggtgatgacgagcaccgcggttcaccaagaggaagtcagtccccctgaactgaaaaactccccgtgcaatttggggagcagtgtgcctgatttgagaaaacaaactgtattttgccatttctcagacttgtgatctttttgagcaagaaaactcggtgtaagaatttgttgccctcgggtgtaagacagatttgtggtatttgagcttttcatcctgccaaaagctgaatattcattcaattgccaagtatctcgagtttatctgcttggaatgcatgttggaatgaatagctgtagtttagagcatacaaacaggcgaagtcacagcatg

SEQ ID NO: 77055 - DNA, 1543 bp, Zea Mays
ctctttctcctcacgctgtactggttgcgttggccatcttcccgttggttggtttctttactgctggagatatgcctcgcaatgatgatcgctatgggaatacacgcttgtatgttggaagattgtctccccgcacccgttctcgtgacctagaataccttttcagcaaatatgggaggtttttcggttttttacacaaccatggaggtgtggtggaagggtgcccttgatggaattggtggccatagttccaatgtttgtggaggactttggtgaagggcgcccttggtgtaatcttattgactgttgtagatgatgaagttgcaagttaatgtatttgagtacttcgactcacgtcagcttattgtttgtggcaaccatttccgcagaattcgagaagtggagttgaagcgtgactatgcattcattgaattcagtgacccccgtgatgctgatgatgcacagtacaacctagatggcagggacgtcgatggaagccgcattattgttgaatttgctaaaggggttcctcgtggttctggtggttcacgtgattacaacggaagaggacctccaccaggaacaggccgttgttttaactgtggagttgatggtcactgggcaagagactgtcaggctggtgactggaagaacaaatgctaccgttgtggcgaaaggggccatatagaaagaaattgccagaacagtccaaggaacctcaggcgtgagagaagctattcacggtctccatccccacgccgaggacggggccgcagccggagctacagcagaagccggagctatagccgatccagatccccgtctggatctcctaggggtggacgccgagaccgtgatgagaggagatcaaggagtcttagctacagcaggagcgcaagccctaggcgttctgtgtcacctgtaaaggaaaaggagcgcagccgcacacctgatggcagtaggagccccagcccaagggacaaggtgagcccaccaccaaaggataatggtgcccacaatggctcggaccgtgaagacagccctgggggcagggagatgagcaagaggagtcggagcccgtctgatggctaccgtagccctgtgggcaatgggcgcagcccgagccgtagcccaagccccaaggtcaacaatggtgatgacccaagccccaagggcaacaatggtgacgacccaagccccaagggcaacaatggtgatgacgagcaccgcggttcaccaagaggaagtcagtccccctgaactgaaaaactccccgtgcaatttggggagcagtgtgcctgatttgagaaaacaaactgtattttgccatttctcagacttgtgatctttttgagcaagaaaactcggtgtaagaatttgttgccctcgggtgtaagacagatttgtggtatttgagcttttcatcctgccaaaagctgaatattcattcaattgccaagtatctcgagtttatctgcttggaatgcatgttggaatgaatagctgtagtttagagcatacaaacaggcgaagtcacagcatg

SEQ ID NO: 77056 - DNA, 1502 bp, Zea Mays
tagtaggccagaccaaccaaccatatcctttccccaccccgcatcgtcggacaccctccaaagtccaaaccctctccccgccgcatcgccgccgccggaagcgcctccctcgatccagatccaggagatatgcctcgcaatgatgatcgctatgggaatacacgcttgtatgttggaagattgtctccccgcacccgttctcgtgacctagaataccttttcagcaaatatgggaggtttttcggttttttacacaaccatggaggtgtggtggaagggtgcccttgatggaattggtggccatagttccaatgtttgtggaggactttggtgaagggcgcccttggtaattcgagaagtggagttgaagcgtgactatgcattcattgaattcagtgacccccgtgatgctgatgatgcacagtacaacctagatggcagggacgtcgatggaagccgcattattgttgaatttgctaaaggggttcctcgtggttctggtggttcacgtgattacaacggaagaggacctccaccaggaacaggccgttgttttaactgtggagttgatggtcactgggcaagagactgtcaggctggtgactggaagaacaaatgctaccgttgtggcgaaaggggccatatagaaagaaattgccagaacagtccaaggaacctcaggcgtgagagaagctattcacggtctccatccccacgccgaggacggggccgcagccggagctacagcagaagccggagctatagccgatccagatccccgtctggatctcctaggggtggacgccgagaccgtgatgagaggagatcaaggagtcttagctacagcaggagcgcaagccctaggcgttctgtgtcacctgtaaaggaaaaggagcgcagccgcacacctgatggcagtaggagccccagcccaagggacaaggtgagcccaccaccaaaggataatggtgcccacaatggctcggaccgtgaagacagccctgggggcagggagatgagcaagaggagtcggagcccgtctgatggctaccgtagccctgtgggcaatgggcgcagcccgagccgtagcccaagccccaaggtcaacaatggtgatgacccaagccccaagggcaacaatggtgacgacccaagccccaagggcaacaatggtgatgacgagcaccgcggttcaccaagaggaagtcagtccccctgaactgaaaaactccccgtgcaatttggggagcagtgtgcctgatttgagaaaacaaactgtattttgccatttctcagacttgtgatctttttgagcaagaaaactcggtgtaagaatttgttgccctcgggtgtaagacagatttgtggtatttgagcttttcatcctgccaaaagctgaatattcattcaattgccaagtatctcgagtttatctgcttggaatgcatgttggaatgaatagctgtagtttagagcatacaaacaggcgaagtcacagcatg

SEQ ID NO: 77057 - DNA, 2337 bp, Zea Mays
cgccttttggcccatgggctggaacggggaggcctgacctagtaagcagctggcggctccctagtaggccagaccaaccaaccatatcctttccccaccccgcatcgtcggacaccctccaaagtccaaaccctctccccgccgcatcgccgccgccggaagcgcctccctcgatccagatccaggagatatgcctcgcaatgatgatcgctatgggaatacacgcttgtatgttggaagattgtctccccgcacccgttctcgtgacctagaataccttttcagcaaatatgggaggtaagcatcacattatatgcacatagaactattctgaaactcagagtgtgctggcgtgctgctttttgttatgtggtcggacaccagttatgctctactacctccgtttttatatatttgacgccatacaattccacttttacatgccgacgtcaaataaaaatgaacggagggagtagtatatatcatgagcacgtgatgttaactctgcatggttaaattttgtggtacacaactacacatcaatccagatataaaatacaatagcaagctaggggctttcctatcgtgttcaaaaaaaactcgacctgtgggggtaagaccgtctgtacaatattatattaagaagaccttctcacacaggtcaagaagaccttccacgcaggtcgagaaaacctctaaactcctgccccaccacccccacccatacacaatggcaccgtagcccaagtgagaacgaccgggccaggcctgtgctttggcttgggacaggcgaggggatgttttaacttttaaccacagcctgaaaattcgctcccacggggagtcaaacctagaacctgacaagtgctactcagaccacctaaccaactcgcctgttcataataggtagtttatgaaggtgttgggttttgtgatgcttgacatcattttgaggtttttgtggatggggtcatacaagtcttctgattttattggtgtatgttctgttacatcactaagcacaaaataaatgtttgacctgggcctatttgacttgaatgatcttgttgaaggtttttcggttttttacacaaccatggaggtgtggtggaagggtgcccttgatggaattggtggccatagttccaatgtttgtggaggactttggtgaagggcgcccttgaattcgagaagtggagttgaagcgtgactatgcattcattgaattcagtgacccccgtgatgctgatgatgcacagtacaacctagatggcagggacgtcgatggaagccgcattattgttgaatttgctaaaggggttcctcgtggttctggtggttcacgtgattacaacggaagaggacctccaccaggaacaggccgttgttttaactgtggagttgatggtcactgggcaagagactgtcaggctggtgactggaagaacaaatgctaccgttgtggcgaaaggggccatatagaaagaaattgccagaacagtccaaggaacctcaggcgtgagagaagctattcacggtctccatccccacgccgaggacggggccgcagccggagctacagcagaagccggagctatagccgatccagatccccgtctggatctcctaggggtggacgccgagaccgtgatgagaggagatcaaggagtcttagctacagcaggagcgcaagccctaggcgttctgtgtcacctgtaaaggaaaaggagcgcagccgcacacctgatggcagtaggagccccagcccaagggacaaggtgagcccaccaccaaaggataatggtgcccacaatggctcggaccgtgaagacagccctgggggcagggagatgagcaagaggagtcggagcccgtctgatggctaccgtagccctgtgggcaatgggcgcagcccgagccgtagcccaagccccaaggtcaacaatggtgatgacccaagccccaagggcaacaatggtgacgacccaagccccaagggcaacaatggtgatgacgagcaccgcggttcaccaagaggaagtcagtccccctgaactgaaaaactccccgtgcaatttggggagcagtgtgcctgatttgagaaaacaaactgtattttgccatttctcagacttgtgatctttttgagcaagaaaactcggtgtaagaatttgttgccctcgggtgtaagacagatttgtggtatttgagcttttcatcctgccaaaagctgaatattcattcaattgccaagtatctcgagtttatctgcttggaatgcatgttggaatgaatagctgtagtttagagcatacaaacaggcgaagtcacagcatg

SEQ ID NO: 77058 - DNA, 2339 bp, Zea Mays
cgccttttggcccatgggctggaacggggaggcctgacctagtaagcagctggcggctccctagtaggccagaccaaccaaccatatcctttccccaccccgcatcgtcggacaccctccaaagtccaaaccctctccccgccgcatcgccgccgccggaagcgcctccctcgatccagatccaggagatatgcctcgcaatgatgatcgctatgggaatacacgcttgtatgttggaagattgtctccccgcacccgttctcgtgacctagaataccttttcagcaaatatgggaggtaagcatcacattatatgcacatagaactattctgaaactcagagtgtgctggcgtgctgctttttgttatgtggtcggacaccagttatgctctactacctccgtttttatatatttgacgccatacaattccacttttacatgccgacgtcaaataaaaatgaacggagggagtagtatatatcatgagcacgtgatgttaactctgcatggttaaattttgtggtacacaactacacatcaatccagatataaaatacaatagcaagctaggggctttcctatcgtgttcaaaaaaaactcgacctgtgggggtaagaccgtctgtacaatattatattaagaagaccttctcacacaggtcaagaagaccttccacgcaggtcgagaaaacctctaaactcctgccccaccacccccacccatacacaatggcaccgtagcccaagtgagaacgaccgggccaggcctgtgctttggcttgggacaggcgaggggatgttttaacttttaaccacagcctgaaaattcgctcccacggggagtcaaacctagaacctgacaagtgctactcagaccacctaaccaactcgcctgttcataataggtagtttatgaaggtgttgggttttgtgatgcttgacatcattttgaggtttttgtggatggggtcatacaagtcttctgattttattggtgtatgttctgttacatcactaagcacaaaataaatgtttgacctgggcctatttgacttgaatgatcttgttgaaggtttttcggttttttacacaaccatggaggtgtggtggaagggtgcccttgatggaattggtggccatagttccaatgtttgtggaggactttggtgaagggcgcccttggtaattcgagaagtggagttgaagcgtgactatgcattcattgaattcagtgacccccgtgatgctgatgatgcacagtacaacctagatggcagggacgtcgatggaagccgcattattgttgaatttgctaaaggggttcctcgtggttctggtggttcacgtgattacaacggaagaggacctccaccaggaacaggccgttgttttaactgtggagttgatggtcactgggcaagagactgtcaggctggtgactggaagaacaaatgctaccgttgtggcgaaaggggccatatagaaagaaattgccagaacagtccaaggaacctcaggcgtgagagaagctattcacggtctccatccccacgccgaggacggggccgcagccggagctacagcagaagccggagctatagccgatccagatccccgtctggatctcctaggggtggacgccgagaccgtgatgagaggagatcaaggagtcttagctacagcaggagcgcaagccctaggcgttctgtgtcacctgtaaaggaaaaggagcgcagccgcacacctgatggcagtaggagccccagcccaagggacaaggtgagcccaccaccaaaggataatggtgcccacaatggctcggaccgtgaagacagccctgggggcagggagatgagcaagaggagtcggagcccgtctgatggctaccgtagccctgtgggcaatgggcgcagcccgagccgtagcccaagccccaaggtcaacaatggtgatgacccaagccccaagggcaacaatggtgacgacccaagccccaagggcaacaatggtgatgacgagcaccgcggttcaccaagaggaagtcagtccccctgaactgaaaaactccccgtgcaatttggggagcagtgtgcctgatttgagaaaacaaactgtattttgccatttctcagacttgtgatctttttgagcaagaaaactcggtgtaagaatttgttgccctcgggtgtaagacagatttgtggtatttgagcttttcatcctgccaaaagctgaatattcattcaattgccaagtatctcgagtttatctgcttggaatgcatgttggaatgaatagctgtagtttagagcatacaaacaggcgaagtcacagcatg

SEQ ID NO: 77059 - DNA, 2423 bp, Zea Mays
ctcaattctactagagagaaactgatgatgccgccggcggcggaggtggaattcactcgttgtgcggggctgggccgagctggaacgccgatgggcctgcaccgccttttggcccatgggctggaacggggaggcctgacctagtaagcagctggcggctccctagtaggccagaccaaccaaccatatcctttccccaccccgcatcgtcggacaccctccaaagtccaaaccctctccccgccgcatcgccgccgccggaagcgcctccctcgatccagatccaggagatatgcctcgcaatgatgatcgctatgggaatacacgcttgtatgttggaagattgtctccccgcacccgttctcgtgacctagaataccttttcagcaaatatgggaggtaagcatcacattatatgcacatagaactattctgaaactcagagtgtgctggcgtgctgctttttgttatgtggtcggacaccagttatgctctactacctccgtttttatatatttgacgccatacaattccacttttacatgccgacgtcaaataaaaatgaacggagggagtagtatatatcatgagcacgtgatgttaactctgcatggttaaattttgtggtacacaactacacatcaatccagatataaaatacaatagcaagctaggggctttcctatcgtgttcaaaaaaaactcgacctgtgggggtaagaccgtctgtacaatattatattaagaagaccttctcacacaggtcaagaagaccttccacgcaggtcgagaaaacctctaaactcctgccccaccacccccacccatacacaatggcaccgtagcccaagtgagaacgaccgggccaggcctgtgctttggcttgggacaggcgaggggatgttttaacttttaaccacagcctgaaaattcgctcccacggggagtcaaacctagaacctgacaagtgctactcagaccacctaaccaactcgcctgttcataataggtagtttatgaaggtgttgggttttgtgatgcttgacatcattttgaggtttttgtggatggggtcatacaagtcttctgattttattggtgtatgttctgttacatcactaagcacaaaataaatgtttgacctgggcctatttgacttgaatgatcttgttgaaggtttttcggttttttacacaaccatggaggtgtggtggaagggtgcccttgatggaattggtggccatagttccaatgtttgtggaggactttgaattcgagaagtggagttgaagcgtgactatgcattcattgaattcagtgacccccgtgatgctgatgatgcacagtacaacctagatggcagggacgtcgatggaagccgcattattgttgaatttgctaaaggggttcctcgtggttctggtggttcacgtgattacaacggaagaggacctccaccaggaacaggccgttgttttaactgtggagttgatggtcactgggcaagagactgtcaggctggtgactggaagaacaaatgctaccgttgtggcgaaaggggccatatagaaagaaattgccagaacagtccaaggaacctcaggcgtgagagaagctattcacggtctccatccccacgccgaggacggggccgcagccggagctacagcagaagccggagctatagccgatccagatccccgtctggatctcctaggggtggacgccgagaccgtgatgagaggagatcaaggagtcttagctacagcaggagcgcaagccctaggcgttctgtgtcacctgtaaaggaaaaggagcgcagccgcacacctgatggcagtaggagccccagcccaagggacaaggtgagcccaccaccaaaggataatggtgcccacaatggctcggaccgtgaagacagccctgggggcagggagatgagcaagaggagtcggagcccgtctgatggctaccgtagccctgtgggcaatgggcgcagcccgagccgtagcccaagccccaaggtcaacaatggtgatgacccaagccccaagggcaacaatggtgacgacccaagccccaagggcaacaatggtgatgacgagcaccgcggttcaccaagaggaagtcagtccccctgaactgaaaaactccccgtgcaatttggggagcagtgtgcctgatttgagaaaacaaactgtattttgccatttctcagacttgtgatctttttgagcaagaaaactcggtgtaagaatttgttgccctcgggtgtaagacagatttgtggtatttgagcttttcatcctgccaaaagctgaatattcattcaattgccaagtatctcgagtttatctgcttggaatgcatgttggaatgaatagctgtagtttagagcatacaaacaggcgaagtcacagcatg

SEQ ID NO: 77060 - DNA, 881 bp, Zea Mays
cttcattctcttgtagccaattcgtcggcgttattgcatgttcaagggctccacgctcctcaccaacgggatggtgacggaaggggtccgacgagtgggcggtctacggcgggactggagcgtttgcgatggccaccggcgtcatcagaaggaagaaccttcttgccggcggcggtgacagtggcgggaactccgacgagcttagcgtggaagtgttctgcccggtgttcggatcaccgcagcagccgccaaaggacgacgacgatggctccgccgtcaccaagattggactatggggtgggccgggaggatcggcacaggacatcacgacgacagaggcaccaaggcgtctgaacagcgtcaccattcgcgccggtattgccgtcgactcgattgagttcacttacactggcaaggacaggcagaggcgcacagctgggcgatggggtggacttggcggcaatgttcgaacgatcgatcttggcgacaacgaacacatcagggaggtgtcaggaacgtacggcacatttgaaggtgctactaccctaacctcgctcaggttcatcaccagcaccagagcctggggcccatggggcaccgagaacgggacacgcttctgcatcaccgcgcccatcggcagcagcgtcgtgggattctacggacgcgcgggaaccaggctcgtcgacgctatcggtgtctacctgcgtcaactttgatttcaacggcatgatgcttgatttcaaatagatatattaattagttcctcgtcacagtcgatcctgtgtcaaataataaagaagctcttgtatgcatgtgtatatgttagtccttcgttctgtatgtgtcaaataaaggttgatcaaaaagacctagaataagct

SEQ ID NO: 77061 - DNA, 662 bp, Zea Mays
agcatcgcagttcgcacacagcagcagcagcccttctttttggagcagcaccacaggggagatcgatcaatcaatcagcaagcaaagcgcgatcggcacaggacatcacgacgacagaggcaccaaggcgtctgaacagcgtcaccattcgcgccggtattgccgtcgactcgattgagttcacttacactggcaaggacaggcagaggcgcacagctgggcgatggggtggacttggcggcaatgttcgaacgatcgatcttggcgacaacgaacacatcagggaggtgtcaggaacgtacggcacatttgaaggtgctactaccctaacctcgctcaggttcatcaccagcaccagagcctggggcccatggggcaccgagaacgggacacgcttctgcatcaccgcgcccatcggcagcagcgtcgtgggattctacggacgcgcgggaaccaggctcgtcgacgctatcggtgtctacctgcgtcaactttgatttcaacggcatgatgcttgatttcaaatagatatattaattagttcctcgtcacagtcgatcctgtgtcaaataataaagaagctcttgtatgcatgtgtatatgttagtccttcgttctgtatgtgtcaaataaaggttgatcaaaaagacctagaataagct

SEQ ID NO: 77062 - DNA, 557 bp, Zea Mays
atggagtgggcgtcgatgcggaccaggtcggcgcccagcccgacctccttgaccagcggcaggttggccgtgttgagcaccacgacgcggcccccgcccgggatgtccacgtccagcggcgcctccaggcagttgagcgccaccccctcgcggtcccgcggcgacggcgccggcagcggggacgaggacgcccggacgatgcccgaggccggctggctcgacaccagcgccgccgcgtccgcctccggaaggtcccacgcgcgcgacacgaactcggtggagaagcccgtgaagatgccggtcgcgcccgtcagctggaagttggtgaattgccccggcctgtggcccttggaggtgtcgccgaggaagagcaccgtgagcggggtcggcgcggcggggccgttgtgccaccacgtcaccacgccgaagggcagcgccagcgcgtcgccctccttcacggccaccaccttctccttcgtcgcctctgggaggacgatgccgcaggtgcccgtgcctgttgttcgttttcgttgttcaaggagcatcatcggattcag

SEQ ID NO: 77063 - DNA, 1707 bp, Zea Mays
caaagtggccggccgtacgtctcgtcgcctttccagtttccacgccggaagtggaggcgagccagccagccggtcgctccccactgcttccacacccaccctcgctctctctctttcgctgtcacgcggggcccacccgccgtgcgtgcgccccatccaccaccgaccaggcgccgtcgccgccatcgaagcgtttcgtttgatttgggtttcgaggcaagtggtgccgcggcggggtcgggagaggaggggccatggcggacgaggcggcgccgaggctgctgccggtggcggcagacagggacaaggacgaccgccgccgctgggcggcccgctgcggcttcgccgtcctcggcatcatgagtaccctcctcgtctacggcgtcctccaggagaagatcatgagagtcccgtatggagtggagaaggagttcttcagatactcgcttttccttgttttctgtaaccgcatcaccacatccatggtgtctgcaatggtgttactggcaagtaagaaatccttggaccctgtggctccgctacacaaatatggtgttgtctccatatcaaatatactgaccactacctgccagtatgaggccctcaagtatgtaagcttccctgtccaaacgcttgccaaatgcgccaagatgatacctgtcatgatctggggcacaataataatgagaaagaagtatgttgcaaaagattacttcttttctgtcgtcgtgactatgggttgcgcattgttcattctatatccggcgtcgatggatgtgagtccatttaataaaggcagagaaagcactatttggggtgtttcactcatgctcggttatcttggggctgattctccagaatcatctgattccagctgtggattttatgttccgtcacccagattgcttctccgatgttgtaatcctgtccagcgttgcaacagcgagtcagttcttcatatcctacaccattcggacatttggcgctctcacatttgctaccataatgacaactagacagcttgtgagcatattgctgtcctgcatctggtttgtacatcctctcagctggatgcagtgggttggcgcggccattgtgttcgtagccctatacacaaagagcttcctgaggagtaaaccgcagaagctagcggggtcaagcccgccacgtggttccagtccgaaccctgttagcaatagttgacaattggtgacataataacataggaaacaatggacttgttgcggtgtaacgggacgaagtctccgtgtctgagatcaatggcaccatggctgcatatgcaaggcgaggtaactggacagataggttccagatgttgctgtgttactgctccctgacattttttcaaggtcatgaaggtggccattttttcaagctagtcgaccctagtgttagtttagtgtccagagacccaattttgtagcccagtgagctgtgttaccaattttgtagcctcaacaaagcatcgtgtgtgtgtgtatttgtcgagcgttggcgactgagagttgaagaagtcacagcagaccatctgcaaaaactcaccagataactagaactgcgatgcgtaacaaattgcaaaacacaggagattgtcagctaacagctgtggtccgatgtaaagatcagcagataacaactgaaggcctgtttaccatggtttttgagtataccgtagtattttatacc

SEQ ID NO: 77064 - DNA, 1814 bp, Zea Mays
caaagtggccggccgtacgtctcgtcgcctttccagtttccacgccggaagtggaggcgagccagccagccggtcgctccccactgcttccacacccaccctcgctctctctctttcgctgtcacgcggggcccacccgccgtgcgtgcgccccatccaccaccgaccaggcgccgtcgccgccatcgaagcgtttcgtttgatttgggtttcgaggcaagtggtgccgcggcggggtcgggagaggaggggccatggcggacgaggcggcgccgaggctgctgccggtggcggcagacagggacaaggacgaccgccgccgctgggcggcccgctgcggcttcgccgtcctcggcatcatgagtaccctcctcgtctacggcgtcctccagatcatgagagtcccgtatggagtggagaaggagttcttcagatactcgcttttccttgttttctgtaaccgcatcaccacatccatggtgtctgcaatggtgttactggcaagtaagaaatccttggaccctgtggctccgctacacaaatatggtgttgtctccatatcaaatatactgaccactacctgccagtatgaggccctcaagtatgtaagcttccctgtccaaacgcttgccaaatgcgccaagatgatacctgtcatgatctggggcacaataataatgagaaagaagtatgttgcaaaagattacttcttttctgtcgtcgtgactatgggttgcgcattgttcattctatatccggcgtcgatggatgtgagtccatttaataaaggcagagaaagcactatttggggtgtttcactcatgctcggttatcttggttttgatgggttcacaagcacgttccaagataaactcttcaaagggtatgacatggaaatacacaaccaaatattctacacaacagtctgctcttgtcttcttagtttaagcgggctgattctccagaatcatctgattccagctgtggattttatgttccgtcacccagattgcttctccgatgttgtaatcctgtccagcgttgcaacagcgagtcagttcttcatatcctacaccattcggacatttggcgctctcacatttgctaccataatgacaactagacagcttgtgagcatattgctgtcctgcatctggtttgtacatcctctcagctggatgcagtgggttggcgcggccattgtgttcgtagccctatacacaaagagcttcctgaggagtaaaccgcagaagctagcggggtcaagcccgccacgtggttccagtccgaaccctgttagcaatagttgacaattggtgacataataacataggaaacaatggacttgttgcggtgtaacgggacgaagtctccgtgtctgagatcaatggcaccatggctgcatatgcaaggcgaggtaactggacagataggttccagatgttgctgtgttactgctccctgacattttttcaaggtcatgaaggtggccattttttcaagctagtcgaccctagtgttagtttagtgtccagagacccaattttgtagcccagtgagctgtgttaccaattttgtagcctcaacaaagcatcgtgtgtgtgtgtatttgtcgagcgttggcgactgagagttgaagaagtcacagcagaccatctgcaaaaactcaccagataactagaactgcgatgcgtaacaaattgcaaaacacaggagattgtcagctaacagctgtggtccgatgtaaagatcagcagataacaactgaaggcctgtttaccatggtttttgagtataccgtagtattttatacc

SEQ ID NO: 77065 - DNA, 1815 bp, Zea Mays
cgcaaagtggccggccgtacgtctcgtcgcctttccagtttccacgccggaagtggaggcgagccagccagccggtcgctccccactgcttccacacccaccctcgctctctctctttcgctgtcacgcggggcccacccgccgtgcgtgcgccccatccaccaccgaccaggcgccgtcgccgccatcgaagcgtttcgtttgatttgggtttcgaggcaagtggtgccgcggcggggtcgggagaggaggggccatggcggacgaggcggcgccgaggctgctgccggtggcggcagacagggacaaggacgaccgccgccgctgggcggcccgctgcggcttcgccgtcctcggcatcatgagtaccctcctcgtctacggcgtcctccaggagaagatcatgagagtcccgtatggagtggagaaggagttcttcagatactcgcttttccttgttttctgtaaccgcatcaccacatccatggtgtctgcaatggtgttactggcaagtaagaaatccttggaccctgtggctccgctacacaaatatggtgttgtctccatatcaaatatactgaccactacctgccagccctcaagtatgtaagcttccctgtccaaacgcttgccaaatgcgccaagatgatacctgtcatgatctggggcacaataataatgagaaagaagtatgttgcaaaagattacttcttttctgtcgtcgtgactatgggttgcgcattgttcattctatatccggcgtcgatggatgtgagtccatttaataaaggcagagaaagcactatttggggtgtttcactcatgctcggttatcttggttttgatgggttcacaagcacgttccaagataaactcttcaaagggtatgacatggaaatacacaaccaaatattctacacaacagtctgctcttgtcttcttagtttaagcgggctgattctccagaatcatctgattccagctgtggattttatgttccgtcacccagattgcttctccgatgttgtaatcctgtccagcgttgcaacagcgagtcagttcttcatatcctacaccattcggacatttggcgctctcacatttgctaccataatgacaactagacagcttgtgagcatattgctgtcctgcatctggtttgtacatcctctcagctggatgcagtgggttggcgcggccattgtgttcgtagccctatacacaaagagcttcctgaggagtaaaccgcagaagctagcggggtcaagcccgccacgtggttccagtccgaaccctgttagcaatagttgacaattggtgacataataacataggaaacaatggacttgttgcggtgtaacgggacgaagtctccgtgtctgagatcaatggcaccatggctgcatatgcaaggcgaggtaactggacagataggttccagatgttgctgtgttactgctccctgacattttttcaaggtcatgaaggtggccattttttcaagctagtcgaccctagtgttagtttagtgtccagagacccaattttgtagcccagtgagctgtgttaccaattttgtagcctcaacaaagcatcgtgtgtgtgtgtatttgtcgagcgttggcgactgagagttgaagaagtcacagcagaccatctgcaaaaactcaccagataactagaactgcgatgcgtaacaaattgcaaaacacaggagattgtcagctaacagctgtggtccgatgtaaagatcagcagataacaactgaaggcctgtttaccatggtttttgagtataccgtagtattttatacc

SEQ ID NO: 77066 - DNA, 900 bp, Zea Mays
atttactagtctgcagcagcttctggtgtctagaagctggaaaaaaaagctgcggacctggtctctccctcgcccacttatgtgccattaaagcccaatacatgagctacaatgtggcccagcctcagaaggcccaataggtggtcactctactacccgaagccgcgggctgaaccctaactgacccagagcgatcggagctgacgacgatggccgggaaggcggcggccgcgacggcggcgaggtgggcggaggggtacccgtggaaggagaagctggcaaagtacaagggtgagctcgggaagggggtgtggggatactgggagctcggcgcgtggaagccgctcggcatcagcgctcgcaagcgcgcccgcctccgcaaggaggtgctcctcgccggcgaggactggagctacgatcctccccgcggggagatgcgtaccaagcgcaagggccacaagtgcgaccgcatctccgccgagaagcgagcaaatactgttgagctgatgaagaagatgccccagatgctgctcgactacaagaaacgtaggtgggagaagaagatgaaagcggaggagagcggcaagaattgataccacgcggctcgtccagggtgcttctcttcctaaataaggtccaaactttatccaggaggtttgcaggacggctagattctgacgcgtcatttccttgtggattccttctctcctgtgatgcgactttggacgcactatcctgattgtgatgctttccaacacttgtgccactggatcgtgatttcagtgagccccaacttctgcagcactagtattttgttgagacaaatcagctataagcatgccatctgcccaataaacttgttcatcatgtaagatcaatgctgttagtttttaaaaaaat

SEQ ID NO: 77067 - DNA, 685 bp, Zea Mays
aaacatagtcatattttgaatcttgatcactgatctagacaagccacaggccttgggcacagttgttttagctttgttgcagcaagccagaaggctatcttggtatttcccctggaaaattccttcaactgctatattttggctggaatgctagcttatgctggattgcagaaacgtaggtgggagaagaagatgaaagcggaggagagcggcaagaattgataccacgcggctcgtccagggtgcttctcttcctaaataaggtccaaactttatccaggaggtttgcaggacggctagattctgacgcgtcatttccttgtggattccttctctcctgtgatgcgactttggacgcactatcctgattgtgatgctttccaacacttgtgccactggatcgtgatttcagtgagccccaacttctgcagcactagtattttgttgagacaaatcagctataagcatgccatctgcccaataaacttgttcatcatgtaagatcaatgctgttagtttttgtccgagtttgtgcttgcgtttgattacacttacctgcagaagaatgattgtctgaaaagtttgtccttgtgtaataagtgttgaatgttggaaatcctaaccctctcaaggattgggagattaatatatagaattagttggatgggctaggcccattacaata

SEQ ID NO: 77068 - DNA, 580 bp, Zea Mays
aatctcaggcgagcaaatactgttgagctgatgaagaagatgccccagatgctgctcgactacaagaaacgtaggtgggagaagaagatgaaagcggaggagagcggcaagaattgataccacgcggctcgtccagggtgcttctcttcctaaataaggtccaaactttatccaggaggtttgcaggacggctagattctgacgcgtcatttccttgtggattccttctctcctgtgatgcgactttggacgcactatcctgattgtgatgctttccaacacttgtgccactggatcgtgatttcagtgagccccaacttctgcagcactagtattttgttgagacaaatcagctataagcatgccatctgcccaataaacttgttcatcatgtaagatcaatgctgttagtttttgtccgagtttgtgcttgcgtttgattacacttacctgcagaagaatgattgtctgaaaagtttgtccttgtgtaataagtgttgaatgttggaaatcctaaccctctcaaggattgggagattaatatatagaattagttggatgggctaggcccattacaata

SEQ ID NO: 77069 - DNA, 2566 bp, Zea Mays
ctgtttctgtttctattctcacgtcacgcgcaggctgcgggcaagcaatggcaggtgggccctgtcgcgctggccgatccagcgctgactcagcccccgcaccgcatacatgagagatgagaagccgccacccgccgctgcggctgcggcgcccgcgccaccacgagtgacccatcgtgctcggatcgtacggcctcaaccgcaaaatccagtatttaagcgctgcggaacactcgtcgagaggagaggacagagcagaggaccaccaccggaccgggctggagctggaggcgtggcggcgccggcgcgtccatcaggaggagaaggggcagggatggtgctgggcggcggcatggcggcagcggccgtaggcggggacgacgccgtcgtcatgcagctgggcggcgccgagggcgaggagaccgtcgtcaccgtcaactgccccgaccagacaggcctgggctgcgacctctgccgcaccatcctcgagttcggcctccgcatcacccgcgccgcagacgtgtccacggacggccactggtgcttcgtggtgttctgggtcgtgccccgctcctcgtccatcaaggtccggtgggcgagcctcaagaaccggctcatgtccatgtgcccttcctcctactccatccccttcttctaccgggacgtgagccagccagagccaggccccttgcagttctacctcctcaagctcatgtcgccggaccgcaaaggattgctgcatgatgtgacgcacatactatcggatctggagctcataatccacagggtgaaggtgtcgaccacaccggacggaagagttgtggacctcttctttatcactgatggcatggaactgctgcacagaaaggagaggcaagaggagacctgctcggcgctaactgcaaccctgggcccttccatcagctgcgaggtcgtaccagcagaagggttccagcaggggttctcttccctcccgccggagatcgccgaggaactgttcagggcggagctagctgacactgacagcgaggtgtgctcgagcccgctcagcgcggagctgaggaaggtccggacgacggccactgtcaacttcgacaactccctgagccccgcgcacacgctggttcagatcgtctgcgctgaccagaaggggctcatttacgatatcttgaggacgatgaaggactgcaacatccagatattttatggccggttcagatcagacaagaaagggtcagccagcaaaggttcatcaggttgccgtgaggtggatcttttcgtgaagcaagtagacgggaagaaggtgactgatcctgcgaaacaggacgcgctgcggtcacgcctgaggtccgagacgctccatccgctcagggtcatggtcgtcggccgtggacccgacacggagctcctcgtcgccaacccggtcgaggcctccgggaagggacggccgcgcgtgttctacgacgccactcttgctctgaaggcgcttgggatctgcatcttctctgctgagatcgggaggcaagcggcgtccgagcgccactgggaggtgtacaggttcctcctggatgacagcaaggagttccccttggcaagcagcctcgctaacaggaactgtgtcgtcgatagggcgaggaagacgctgatgggatgctacaactgagacttgggtgggtgtcgatctgtatctgtctgcaagaatccaacgaagcagtgcaagtgcaatgcaaggcttcccccatccacagatgcatttgcatgctatgctgcttcctggagttgtgcacggggatggtttgaaaccagagttgtggacagcacagactggaatgaatgaacatcttgctgccatggatccattgtctacggaaaaaggagcatgcttggtgtggaggtgcgatgcaatggcgggagctttttttttttgataatggaagaaacatgttccagccttttgcatcatatcaaggatgcatatggcttcatagcatattcaacctgacaaaagcagcaacaagtagcaatgaagcacatggttctcatgaacaataataagaaactaagaggcctcaatcctagcattgcatcgccatccatgtattgtaaaaatgttcattgccaccacttccaatgcgtgacaaatatctttgatatcttggtgtatctcctctctcctttcctttcttttgcagcagtctccagaatctaagccactaagaccccttgaaaataacatgcatataattgaaggtgccattaaatacaatatcattgtggcttagccagattaaccaaaacatggcagctacccctattacaatgattgagcttttgtttgttcagggatgctgacacagatacatggaggagccggcctgttgtatagcttattttagtggaacaactgctgcctcaccatcttgccttccccttgtcgttgttctcctcatgtaagcgcagtttgtaaggatgcatgtgttggagttggaaagtgatccgatggcggatgctactactgctccctatacagtgagtacagcttggttgttcaaagaagatactgatg

SEQ ID NO: 77070 - DNA, 2840 bp, Zea Mays
ctgtttctgtttctattctcacgtcacgcgcaggctgcgggcaagcaatggcaggtgggccctgtcgcgctggccgatccagcgctgactcagcccccgcaccgcatacatgagagatgagaagccgccacccgccgctgcggctgcggcgcccgcgccaccacgagtgacccatcgtgctcggatcgtacggcctcaaccgcaaaatccagtatttaagcgctgcggaacactcgtcgagaggagaggacagagcagaggaccaccaccggaccgggctggagctggaggcgtggcggcgccggcgcgtccatcaggaggagaaggggcagggatggtgctgggcggcggcatggcggcagcggccgtaggcggggacgacgccgtcgtcatgcagctgggcggcgccgagggcgaggagaccgtcgtcaccgtcaactgccccgaccagacaggcctgggctgcgacctctgccgcaccatcctcgagttcggcctccgcatcacccgcgccggtacgtctccgctccccatcggccaaatccatcgcttcttctcctcctttccagatttattttttcatcgttatctgtctgcttcttctgctcttcctacaacggaaagcctttccccttttttctatactgccgaagttgccagccaccaccaatcttgctacagttcatgtcgtctccttaataaactcttttacgcatcattgcctgttcctaatcataaacaactgtggagtccagaattctgcgaacctggaaccatttgacccttcgttcgttcattcatcgttgtcgtcgcctaaaattcgattcggttcctttttcgtgtgtggttggttggttctagcagacgtgtccacggacggccactggtgcttcgtggtgttctgggtcgtgccccgctcctcgtccatcaaggtccggtgggcgagcctcaagaaccggctcatgtccatgtgcccttcctcctactccatccccttcttctaccgggacgtgagccagccagagccaggccccttgcagttctacctcctcaagctcatgtcgccggaccgcaaaggattgctgcatgatgtgacgcacatactatcggatctggagctcataatccacagggtgaaggtgtcgaccacaccggacggaagagttgtggacctcttctttatcactgatggcatggaactgctgcacagaaaggagaggcaagaggagacctgctcggcgctaactgcaaccctgggcccttccatcagctgcgaggtcgtaccagcagaagggttccagcaggggttctcttccctcccgccggagatcgccgaggaactgttcagggcggagctagctgacactgacagcgaggtgtgctcgagcccgctcagcgcggagctgaggaaggtccggacgacggccactgtcaacttcgacaactccctgagccccgcgcacacgctggttcagatcgtctgcgctgaccagaaggggctcatttacgatatcttgaggacgatgaaggactgcaacatccagatattttatggccggttcagatcagacaagaaagggtcagccagcaaaggttcatcaggttgccgtgaggtggatcttttcgtgaagcaagtagacgggaagaaggtgactgatcctgcgaaacaggacgcgctgcggtcacgcctgaggtccgagacgctccatccgctcagggtcatggtcgtcggccgtggacccgacacggagctcctcgtcgccaacccggtcgaggcctccgggaagggacggccgcgcgtgttctacgacgccactcttgctctgaaggcgcttgggatctgcatcttctctgctgagatcgggaggcaagcggcgtccgagcgccactgggaggtgtacagggcgaggaagacgctgatgggatgctacaactgagacttgggtgggtgtcgatctgtatctgtctgcaagaatccaacgaagcagtgcaagtgcaatgcaaggcttcccccatccacagatgcatttgcatgctatgctgcttcctggagttgtgcacggggatggtttgaaaccagagttgtggacagcacagactggaatgaatgaacatcttgctgccatggatccattgtctacggaaaaaggagcatgcttggtgtggaggtgcgatgcaatggcgggagctttttttttttgataatggaagaaacatgttccagccttttgcatcatatcaaggatgcatatggcttcatagcatattcaacctgacaaaagcagcaacaagtagcaatgaagcacatggttctcatgaacaataataagaaactaagaggcctcaatcctagcattgcatcgccatccatgtattgtaaaaatgttcattgccaccacttccaatgcgtgacaaatatctttgatatcttggtgtatctcctctctcctttcctttcttttgcagcagtctccagaatctaagccactaagaccccttgaaaataacatgcatataattgaaggtgccattaaatacaatatcattgtggcttagccagattaaccaaaacatggcagctacccctattacaatgattgagcttttgtttgttcagggatgctgacacagatacatggaggagccggcctgttgtatagcttattttagtggaacaactgctgcctcaccatcttgccttccccttgtcgttgttctcctcatgtaagcgcagtttgtaaggatgcatgtgttggagttggaaagtgatccgatggcggatgctactactgctccctatacagtgagtacagcttggttgttcaaagaagatactgatg

SEQ ID NO: 77071 - DNA, 2268 bp, Zea Mays
ctgtttctgtttctattctcacgtcacgcgcaggctgcgggcaagcaatggcaggtgggccctgtcgcgctggccgatccagcgctgactcagcccccgcaccgcatacatgagagatgagaagccgccacccgccgctgcggctgcggcgcccgcgccaccacgagtgacccatcgtgctcggatcgtacggcctcaaccgcaaaatccagtatttaagcgctgcggaacactcgtcgagaggagaggacagagcagaggaccaccaccggaccgggctggagctggaggcgtggcggcgccggcgcgtccatcaggaggagaaggggcagggatggtgctgggcggcggcatggcggcagcggccgtaggcggggacgacgccgtcgtcatgcagctgggcggcgccgagggcgaggagaccgtcgtcaccgtcaactgccccgaccagacaggcctgggctgcgacctctgccgcaccatcctcgagttcggcctccgcatcacccgcgccgcagacgtgtccacggacggccactggtgcttcgtggtgttctgggtcgtgccccgctcctcgtccatcaaggtccggtgggcgagcctcaagaaccggctcatgtccatgtgcccttcctcctactccatccccttcttctaccgggacgtgagccagccagagccaggccccttgcagttctacctcctcaagctcatgtcgccggaccgcaaaggattgctgcatgatgtgacgcacatactatcggatctggagctcataatccacagggtgaaggtgtcgaccacaccggacggaagagttgtggacctcttctttatcactgatggcatggaactgctgcacagaaaggagaggcaagaggagacctgctcggcgctaactgcaaccctgggcccttccatcagctgcgaggtcgtaccagcagaagggttccagcaggggttctcttccctcccgccggagatcgccgaggaactgttcagggcggagctagctgacactgacagcgaggtgtgctcgagcccgctcagcgcggagctgaggaaggtccggacgacggccactgtcaacttcgacaactccctgagccccgcgcacacgctggttcagatcgtctgcgctgaccagaaggggctcatttacgatatcttgaggacgatgaaggactgcaacatccagatattttatggccggttcagatcagacaagaaagggtcagccagcaaaggttcatcaggttgccgtgaggtggatcttttcgtgaagcaagtagacgggaagaaggtgactgatcctgcgaaacaggacgcgctgcggtcacgcctgaggtccgagacgctccatccgctcagggtcatggtcgtcggccgtggacccgacacggagctcctcgtcgccaacccggtcgaggcctccgggaagggacggccgcgcgtgttctacgacgccactcttgctctgaaggcgcttgggatctgcatcttctctgctgagatcgggaggcaagcggcgtccgagcgccactgggaggtgtacaggttcctcctggatgacagcaaggagttccccttggcaagcagcctcgctaacaggaactgtgtcgtcgatagggcgaggaagacgctgatgggatgctacaactgagacttgggtgggtgtcgatctgtatctgtctgcaagaatccaacgaagcagtgcaagtgcaatgcaaggcttcccccatccacagatgcatttgcatgctatgctgcttcctggagttgtgcacggggatggtttgaaaccagagttgtggacagcacagactggaatgaatgaacatcttgctgccatggatccattgtctacggaaaaaggagcatgcttggtgtggagcagtctccagaatctaagccactaagaccccttgaaaataacatgcatataattgaaggtgccattaaatacaatatcattgtggcttagccagattaaccaaaacatggcagctacccctattacaatgattgagcttttgtttgttcagggatgctgacacagatacatggaggagccggcctgttgtatagcttattttagtggaacaactgctgcctcaccatcttgccttccccttgtcgttgttctcctcatgtaagcgcagtttgtaaggatgcatgtgttggagttggaaagtgatccgatggcggatgctactactgctccctatacagtgagtacagcttggttgttcaaagaagatactgatg

SEQ ID NO: 77072 - DNA, 2422 bp, Zea Mays
cagcacgacacgagcactctgcactccactaccgcggtaccgcctgcctgcaggctgcagcccagccgtccgcagtccgcatcagatcctgcgctgccctgccctgccctgccccgaccatgccgccgccgccaccgtcggccccggcctcgcaccacctgcgcctgtggtggaggcgccggggccgggccggcgcggtcggggccaccttcgccgtcgcgctgctcgcgaccgctttgctcctcgcgctctccagctacgcctccatagtattccctgcgtccagtggccgccgcggccccgccctcgtcggactcaccctcgtccgccgcgccagcgagaagggcgcgctgtgcttggatgggagcgcgcccgggtaccatctgcagggagggtctgggagtggatcgcggagctggctaatccacttggagggtggaggctggtgtcgtaatctcaaatcatgtgcctcacgtcagagatcaatgttgggatcatcccggtacatggaaggccaggttgagtttacagggatcttgagcgatgacaaatctcagaatcccgatttttacaattggaataaagtgaagataagatattgcgacggggcatcattctctggggatgtaaaagatgaattgcagaatggtacacgattcttcttcagaggccagcgtatctgggaagcagttatgaacgaacttgtagttaaggggctcaggaatgctaaacaggtcattccttgcaagtagaatcaattgccttttcttaagggaaaaattgtatgtattacaatagtactagtctcatttactttggcattcactctaagggtatgtttggttgcaatggcaggagcgggacgagagtacgggataggatgagacaatcctttagataaggttgtttggttcagggtcaggggttggaacatgatcatcctaattttatcccagttgtccgtcaaaattggacgaatgagaggggacaccgaaggacatgtctgtctctggctgtctcgcaaccaaacacaccctaagtttctctctatcattaactaatagtatatgaattagtgaaggacgaatattttggatgctttacattgatgattttattgccaatagtagtatgttgtataattgtatccgcttgcaattttagttctaggtgtgatcaggaatgtataatcttgattgcatactaatttcatctttgcccatataaagtaattataaaccactgtactgatagtgtgatgctgatattctatttcagctttcaggctttcctaacaggatgctctgctggtggactagccacttacattcactgtgattcttttcgtgcgctactaccaaaggattctagggttaagtgtctcgcggatggtggttttttccttgatgtagaagacatttctgggaggaggacaatgcactctttctacagtgatattgtgcgccttcagggtctaagggaaaggttttcgcattgtaactcaaacatggacgcaggccagtgtttctttccacgtgaagttgtgaagcacattgtcaacccagttttcgttcttaatccagcatatgatgcctggcagatttaatgtttcaggtacaacatgcgttggctccagaagcatctgaccctcaacattcatggctggactgcagattggatattagcaagtgcagccctaaacaacttggaattctccaaggtttcaggaaagaactgcatgacgctataagtgaagctaagcagaaaaggggctggggattttatatcaactcgtgctttgttcattgtcagtcgctgaactcgttgacttggcactctccaacttcccccagagtcaacaataagagcattgcagaagcagttggagactggttctttgacagaagagaggtgaaggagatagattgcgaatacccctgcaacccgacgtgccacaacttggtcttcgcaaggcctttcaagatatgaaattttatctctcttcttccgctatgattttgttgtaaaatcagaaaaaaaatataaacttgttattataaatcattttacccgattggtggagtcgacggagaagcttgagaagcagccttgagttcacagttgccaagccccccctttttttagatcgcggttttttcgggacactacccaggagaccaggcagcatgcttcgctagtcttgggtttgccagaccacgaaaaaggcctgtcattggctctcctgttgaccaatgacgccctgcggcagcgttattgccgacatgaatgtcgccatgctatcgagcactgactttacgagggcaacccgcccggctttgctgagaagaaccgactgccggtcagggtagacttgtggaaatgaggcttcctggcactgtagaatccggatgagtcgaggtag

SEQ ID NO: 77073 - DNA, 2275 bp, Zea Mays
cagcacgacacgagcactctgcactccactaccgcggtaccgcctgcctgcaggctgcagcccagccgtccgcagtccgcatcagatcctgcgctgccctgccctgccctgccccgaccatgccgccgccgccaccgtcggccccggcctcgcaccacctgcgcctgtggtggaggcgccggggccgggccggcgcggtcggggccaccttcgccgtcgcgctgctcgcgaccgctttgctcctcgcgctctccagctacgcctccatagtattccctgcgtccagtggccgccgcggccccgccctcgtcggactcaccctcgtccgccgcgccagcgagaagggcgcgctgtgcttggatgggagcgcgcccgggtaccatctgcagggagggtctgggagtggatcgcggagctggctaatccacttggagggtggaggctggtgtcgtaatctcaaatcatgtgcctcacgtcagagatcaatgttgggatcatcccggtacatggaaggccaggttgagtttacagggatcttgagcgatgacaaatctcagaatcccgatttttacaattggaataaagtgaagataagatattgcgacggggcatcattctctggggatgtaaaagatgaattgcagaatggtacacgattcttcttcagaggccagcgtatctgggaagcagttatgaacgaacttgtagttaaggggctcaggaatgctaaacaggagcgggacgagagtacgggataggatgagacaatcctttagataaggttgtttggttcagggtcaggggttggaacatgatcatcctaattttatcccagttgtccgtcaaaattggacgaatgagaggggacaccgaaggacatgtctgtctctggctgtctcgcaaccaaacacaccctaagtttctctctatcattaactaatagtatatgaattagtgaaggacgaatattttggatgctttacattgatgattttattgccaatagtagtatgttgtataattgtatccgcttgcaattttagttctaggtgtgatcaggaatgtataatcttgattgcatactaatttcatctttgcccatataaagtaattataaaccactgtactgatagtgtgatgctgatattctatttcagctttcaggctttcctaacaggatgctctgctggtggactagccacttacattcactgtgattcttttcgtgcgctactaccaaaggattctagggttaagtgtctcgcggatggtggttttttccttgatgtagaagacatttctgggaggaggacaatgcactctttctacagtgatattggtctaagggaaaggttttcgcattgtaactcaaacatggacgcaggccagtgtttctttccacgtgaagttgtgaagcacattgtcaacccagttttcgttcttaatccagcatatgatgcctggcaggtacaacatgcgttggctccagaagcatctgaccctcaacattcatggctggactgcagattggatattagcaagtgcagccctaaacaacttggaattctccaaggtttcaggaaagaactgcatgacgctataagtgaagctaagcagaaaaggggctggggattttatatcaactcgtgctttgttcattgtcagtcgctgaactcgttgacttggcactctccaacttcccccagagtcaacaataagagcattgcagaagcagttggagactggttctttgacagaagagaggtgaaggagatagattgcgaatacccctgcaacccgacgtgccacaacttggtcttcgcaaggcctttcaagatatgaaattttatctctcttcttccgctatgattttgttgtaaaatcagaaaaaaaatataaacttgttattataaatcattttacccgattggtggagtcgacggagaagcttgagaagcagccttgagttcacagttgccaagccccccctttttttagatcgcggttttttcgggacactacccaggagaccaggcagcatgcttcgctagtcttgggtttgccagaccacgaaaaaggcctgtcattggctctcctgttgaccaatgacgccctgcggcagcgttattgccgacatgaatgtcgccatgctatcgagcactgactttacgagggcaacccgcccggctttgctgagaagaaccgactgccggtcagggtagacttgtggaaatgaggcttcctggcactgtagaatccggatgagtcgaggtag

SEQ ID NO: 77074 - DNA, 1853 bp, Zea Mays
cagcacgacacgagcactctgcactccactaccgcggtaccgcctgcctgcaggctgcagcccagccgtccgcagtccgcatcagatcctgcgctgccctgccctgccctgccccgaccatgccgccgccgccaccgtcggccccggcctcgcaccacctgcgcctgtggtggaggcgccggggccgggccggcgcggtcggggccaccttcgccgtcgcgctgctcgcgaccgctttgctcctcgcgctctccagctacgcctccatagtattccctgcgtccagtggccgccgcggccccgccctcgtcggactcaccctcgtccgccgcgccagcgagaagggcgcgctgtgcttggatgggagcgcgcccgggtaccatctgcagggagggtctgggagtggatcgcggagctggctaatccacttggagggtggaggctggtgtcgtaatctcaaatcatgtgcctcacgtcagagatcaatgttgggatcatcccggtacatggaaggccaggttgagtttacagggatcttgagcgatgacaaatctcagaatcccgatttttacaattggaataaagtgaagataagatattgcgacggggcatcattctctggggatgtaaaagatgaattgcagaatggtacacgattcttcttcagaggccagcgtatctgggaagcagttatgaacgaacttgtagttaaggggctcaggaatgctaaacaggctttcctaacaggatgctctgctggtggactagccacttacattcactgtgattcttttcgtgcgctactaccaaaggattctagggttaagtgtctcgcggatggtggttttttccttgatgtagaagacatttctgggaggaggacaatgcactctttctacagtgatattgtgcgccttcagggtctaagggaaaggttttcgcattgtaactcaaacatggacgcaggccagtgtttctttccacgtgaagttgtgaagcacattgtcaacccagttttcgttcttaatccagcatatgatgcctggtacaacatgcgttggctccagaagcatctgaccctcaacattcatggctggactgcagattggatattagcaagtgcagccctaaacaacttggaattctccaaggtttcaggaaagaactgcatgacgctataagtgaagctaagcagaaaaggggctggggattttatatcaactcgtgctttgttcattgtcagtcgctgaactcgttgacttggcactctccaacttcccccagagtcaacaataagagcattgcagaagcagttggagactggttctttgacagaagagaggtgaaggagatagattgcgaatacccctgcaacccgacgtgccacaacttggtcttcgcaaggcctttcaagatatgaaattttatctctcttcttccgctatgattttgttgtaaaatcagaaaaaaaatataaacttgttattataaatcattttacccgattggtggagtcgacggagaagcttgagaagcagccttgagttcacagttgccaagccccccctttttttagatcgcggttttttcgggacactacccaggagaccaggcagcatgcttcgctagtcttgggtttgccagaccacgaaaaaggcctgtcattggctctcctgttgaccaatgacgccctgcggcagcgttattgccgacatgaatgtcgccatgctatcgagcactgactttacgagggcaacccgcccggctttgctgagaagaaccgactgccggtcagggtagacttgtggaaatgaggcttcctggcactgtagaatccggatgagtcgaggtag

SEQ ID NO: 77075 - DNA, 1732 bp, Zea Mays
cagcacgacacgagcactctgcactccactaccgcggtaccgcctgcctgcaggctgcagcccagccgtccgcagtccgcatcagatcctgcgctgccctgccctgccctgccccgaccatgccgccgccgccaccgtcggccccggcctcgcaccacctgcgcctgtggtggaggcgccggggccgggccggcgcggtcggggccaccttcgccgtcgcgctgctcgcgaccgctttgctcctcgcgctctccagctacgcctccatagtattccctgcgtccagtggccgccgcggccccgccctcgtcggactcaccctcgtccgccgcgccagcgagaagggcgcgctgtgcttggatgggagcgcgcccgggtaccatctgcagggagggtctgggagtggatcgcggagctggctaatccacttggagggtggaggctggtgtcgtaatctcaaatcatgtgcctcacgtcagagatcaatgttgggatcatcccggtacatggaaggccaggttgagtttacagggatcttgagcgatgacaaatctcagaatcccgatttttacaattggaataaagtgaagataagatattgcgacggggcatcattctctggggatgtaaaagatgaattgcagaatggtacacgattcttcttcagaggccagcgtatctgggaagcagttatgaacgaacttgtagttaaggggctcaggaatgctaaacagagaagacatttctgggaggaggacaatgcactctttctacagtgatattgtgcgccttcagggtctaagggaaaggttttcgcattgtaactcaaacatggacgcaggccagtgtttctttccacgtgaagttgtgaagcacattgtcaacccagttttcgttcttaatccagcatatgatgcctggcaggtacaacatgcgttggctccagaagcatctgaccctcaacattcatggctggactgcagattggatattagcaagtgcagccctaaacaacttggaattctccaaggtttcaggaaagaactgcatgacgctataagtgaagctaagcagaaaaggggctggggattttatatcaactcgtgctttgttcattgtcagtcgctgaactcgttgacttggcactctccaacttcccccagagtcaacaataagagcattgcagaagcagttggagactggttctttgacagaagagaggtgaaggagatagattgcgaatacccctgcaacccgacgtgccacaacttggtcttcgcaaggcctttcaagatatgaaattttatctctcttcttccgctatgattttgttgtaaaatcagaaaaaaaatataaacttgttattataaatcattttacccgattggtggagtcgacggagaagcttgagaagcagccttgagttcacagttgccaagccccccctttttttagatcgcggttttttcgggacactacccaggagaccaggcagcatgcttcgctagtcttgggtttgccagaccacgaaaaaggcctgtcattggctctcctgttgaccaatgacgccctgcggcagcgttattgccgacatgaatgtcgccatgctatcgagcactgactttacgagggcaacccgcccggctttgctgagaagaaccgactgccggtcagggtagacttgtggaaatgaggcttcctggcactgtagaatccggatgagtcgaggtag

SEQ ID NO: 77076 - DNA, 2012 bp, Zea Mays
cacagcacgacacgagcactctgcactccactaccgcggtaccgcctgcctgcaggctgcagcccagccgtccgcagtccgcatcagatcctgcgctgccctgccctgccctgccccgaccatgccgccgccgccaccgtcggccccggcctcgcaccacctgcgcctgtggtggaggcgccggggccgggccggcgcggtcggggccaccttcgccgtcgcgctgctcgcgaccgctttgctcctcgcgctctccagctacgcctccatagtattccctgcgtccagtggccgccgcggccccgccctcgtcggactcaccctcgtccgccgcgccagcgagaagggcgcgctgtgcttggatgggagcgcgcccgggtaccatctgcagggagggtctgggagtggatcgcggagctggctaatccacttggagggtggaggctggtgtcgtaatctcaaatcatgtgcctcacgtcagagatcaatgttgggatcatcccggtacatggaaggccaggttgagtttacagggatcttgagcgatgacaaatctcagaatcccgatttttacaattggaataaagtgaagataagatattgcgacggggcatcattctctggggatgtaaaagatgaattgcagaatggtacacgattcttcttcagaggccagcgtatctgggaagcagttatgaacgaacttgtagttaaggggctcaggaatgctaaacaggagcgggacgagagtacgggataggatgagacaatcctttagataaggttgtttggttcagggtcaggggttggaacatgatcatcctaattttatcccagttgtccgtcaaaattggacgaatgagaggggacaccgaaggacatctttcaggctttcctaacaggatgctctgctggtggactagccacttacattcactgtgattcttttcgtgcgctactaccaaaggattctagggttaagtgtctcgcggatggtggttttttccttgatgtagaagacatttctgggaggaggacaatgcactctttctacagtgatattgtgcgccttcagggtctaagggaaaggttttcgcattgtaactcaaacatggacgcaggccagtgtttctttccacgtgaagttgtgaagcacattgtcaacccagttttcgttcttaatccagcatatgatgcctggcaggtacaacatgcgttggctccagaagcatctgaccctcaacattcatggctggactgcagattggatattagcaagtgcagccctaaacaacttggaattctccaaggtttcaggaaagaactgcatgacgctataagtgaagctaagcagaaaaggggctggggattttatatcaactcgtgctttgttcattgtcagtcgctgaactcgttgacttggcactctccaacttcccccagagtcaacaataagagcattgcagaagcagttggagactggttctttgacagaagagaggtgaaggagatagattgcgaatacccctgcaacccgacgtgccacaacttggtcttcgcaaggcctttcaagatatgaaattttatctctcttcttccgctatgattttgttgtaaaatcagaaaaaaaatataaacttgttattataaatcattttacccgattggtggagtcgacggagaagcttgagaagcagccttgagttcacagttgccaagccccccctttttttagatcgcggttttttcgggacactacccaggagaccaggcagcatgcttcgctagtcttgggtttgccagaccacgaaaaaggcctgtcattggctctcctgttgaccaatgacgccctgcggcagcgttattgccgacatgaatgtcgccatgctatcgagcactgactttacgagggcaacccgcccggctttgctgagaagaaccgactgccggtcagggtagacttgtggaaatgaggcttcctggcactgtagaatccggatgagtcgaggtag

SEQ ID NO: 77077 - DNA, 732 bp, Zea Mays
gttctagtaatgtatttgcatttgtcaagattgaaaaaaccgtgagagcacctcatcgagcagaatgccatgtctgtcagtgccctttggagtaccgcacgaaaattgagaaatcttcgtcagggcctagaagaagttgggtctacggccgggtttatctagtgaagcaagggcatcctgaaacggaaatggataaatgaaaaattctaattgattgagactgctgagggaagtttagataatcccatgagatggcactcttctggtcgactgaaacatttttcagatgccacttattttgatcagaagggcttactgtgtacgaatcatttgaaagatttgatccagccaagtgctttgtaatacagatacatttctgagatgtccagacgctgcagatgaaccccatgctgcattgtattcttttctgttttctctttagatgaatccatgatacagtttggatgaagaactactgaagaggctacgaaggtgccattgctatcaggagggagggtcactgaaaggctcacaggagggagggtcactgaaaggctcacactctgcaccaaacatgtttaatcatttgatcaaagatgcccacactcagcatgtatacagacttgctcaaatgtgatgtgttatacaagtgtgtgtgtgtgtatatatgaagttttcagctttattgtatgtatgttttcagattaatttgcctgaatctggaacccgtct

SEQ ID NO: 77078 - DNA, 1571 bp, Zea Mays
cccgccactacttctccatagctaagatctgtccggaccctgagacgccgccgtcgtcccgtggagcggagccacacgttgtccttccttcgccccgcccttctcggtcgcggctggttgcctgttccctctccgcgccatacggccatacccagagcaagtaggtcgtcaagtaagtccgacgacgagagaaacagccgccgctcggcctcatcatatggcggccgccgccccggttgcgtccgggagcggccgcctcagccgcccgcgcccgccccgtgtggggctgcgcggcgcgcgggtcgccgccgcggcgcaggggccgtcctgcctctacgtggggccaatcgagaccgccagccaggagaagctcgaggcgctctaccaccaggccagggattcttactacagtggtcagccattgatcatcgatgacatgttcgacaaagtcgagcttaagctccggctttatggctccaaatccgtcgtcaaatacccccgttgtagcctcataaggcattcaacctacgccgacgccgaggaggaccaatcgatgttcatggcgttatcaagcatctggatgctgctcctcctgtttggtacctctgcagttcttgttcctactctgtacactctgagcatcgcgttcggggatgtgtttggggcaaggcaccttctgtacggtgaaaagtccctcgatgcggtaacaagagttaacgacttggctttggttggattggggtatctggttggttatcccatcgcatctgcgtccgttggcgcgctgcaaggcttattgtcaaacaatttggttgccctaaaagggtcctgcccaaattgtggcgagcaggtatttgcatttgtcaagattgaaaaaaccgtgagagcacctcatcgagcagaatgccatgtctgtcagtgccctttggagtaccgcacgaaaattgagaaatcttcgtcagggcctagaagaagttgggtctacggccgggtttatctagtgaagcaagggcatcctgaaacggaaatggataaatgaaaaattctaattgattgagactgctgagggaagtttagataatcccatgagatggcactcttctggtcgactgaaacatttttcagatgccacttattttgatcagaagggcttactgtgtacgaatcatttgaaagatttgatccagccaagtgctttgtaatacagatacatttctgagatgtccagacgctgcagatgaaccccatgctgcattgtattcttttctgttttctctttagatgaatccatgatacagtttggatgaagaactactgaagaggctacgaaggtgccattgctatcaggagggagggtcactgaaaggctcacaggagggagggtcactgaaaggctcacactctgcaccaaacatgtttaatcatttgatcaaagatgcccacactcagcatgtatacagacttgctcaaatgtgatgtgttatacaagtgtgtgtgtgtgtatatatgaagttttcagctttattgtatgtatgttttcagattaatttgcctgaatctggaacccgtct

SEQ ID NO: 77079 - DNA, 869 bp, Zea Mays
ggcgagttctccccgccgctgcttggagctccctcgccggtgaattctcccgccactacttctccatagctaagttggcgcgctgcaaggcttattgtcaaacaatttggttgccctaaaagggtcctgcccaaattgtggcgagcaggtatttgcatttgtcaagattgaaaaaaccgtgagagcacctcatcgagcagaatgccatgtctgtcagtgccctttggagtaccgcacgaaaattgagaaatcttcgtcagggcctagaagaagttgggtctacggccgggtttatctagtgaagcaagggcatcctgaaacggaaatggataaatgaaaaattctaattgattgagactgctgagggaagtttagataatcccatgagatggcactcttctggtcgactgaaacatttttcagatgccacttattttgatcagaagggcttactgtgtacgaatcatttgaaagatttgatccagccaagtgctttgtaatacagatacatttctgagatgtccagacgctgcagatgaaccccatgctgcattgtattcttttctgttttctctttagatgaatccatgatacagtttggatgaagaactactgaagaggctacgaaggtgccattgctatcaggagggagggtcactgaaaggctcacaggagggagggtcactgaaaggctcacactctgcaccaaacatgtttaatcatttgatcaaagatgcccacactcagcatgtatacagacttgctcaaatgtgatgtgttatacaagtgtgtgtgtgtgtatatatgaagttttcagctttattgtatgtatgttttcagattaatttgcctgaatctggaacccgtct

SEQ ID NO: 77080 - DNA, 1298 bp, Zea Mays
cttcgctgctatagaaccaagacagaggttggagctccttcgccggcgagttctccccgccgctgcttggagctccctcgccggtgaattctcccgccactacttctccatagctaaggccagggattcttactacagtggtcagccattgatcatcgatgacatgttcgacaaagtcgagcttaagctccggctttatggctccaaatccgtcgtcaaatacccccgttgtagcctcataaggcattcaacctacgccgacgccgaggaggaccaatcgatgttcatggcgttatcaagcatctggatgctgctcctcctgtttggtacctctgcagttcttgttcctactctgtacactctgagcatcgcgttcggggatgtgtttggggcaaggcaccttctgtacggtgaaaagtccctcgatgcggtaacaagagttaacgacttggctttggttggattggggtatctggttggttatcccatcgcatctgcgtccgttggcgcgctgcaaggcttattgtcaaacaatttggttgccctaaaagggtcctgcccaaattgtggcgagcaggtatttgcatttgtcaagattgaaaaaaccgtgagagcacctcatcgagcagaatgccatgtctgtcagtgccctttggagtaccgcacgaaaattgagaaatcttcgtcagggcctagaagaagttgggtctacggccgggtttatctagtgaagcaagggcatcctgaaacggaaatggataaatgaaaaattctaattgattgagactgctgagggaagtttagataatcccatgagatggcactcttctggtcgactgaaacatttttcagatgccacttattttgatcagaagggcttactgtgtacgaatcatttgaaagatttgatccagccaagtgctttgtaatacagatacatttctgagatgtccagacgctgcagatgaaccccatgctgcattgtattcttttctgttttctctttagatgaatccatgatacagtttggatgaagaactactgaagaggctacgaaggtgccattgctatcaggagggagggtcactgaaaggctcacaggagggagggtcactgaaaggctcacactctgcaccaaacatgtttaatcatttgatcaaagatgcccacactcagcatgtatacagacttgctcaaatgtgatgtgttatacaagtgtgtgtgtgtgtatatatgaagttttcagctttattgtatgtatgttttcagattaatttgcctgaatctggaacccgtct

SEQ ID NO: 77081 - DNA, 1037 bp, Zea Mays
cgccgaggaggaccaatcgatgttcatggcgttatcaagcatctggatgctgctcctcctgtttggtacctctgcagttcttgttcctactctgtacactctgagcatcgcgttcggggatgtgtttggggcaaggcaccttctgtacggtgaaaagtccctcgatgcggtaacaagagttaacgacttggctttggttggattggggtatctggttggttatcccatcgcatctgcgtccgttggcgcgctgcaaggcttattgtcaaacaatttggttgccctaaaagggtcctgcccaaattgtggcgagcaggtatttgcatttgtcaagattgaaaaaaccgtgagagcacctcatcgagcagaatgccatgtctgtcagtgccctttggagtaccgcacgaaaattgagaaatcttcgtcagggcctagaagaagttgggtctacggccgggtttatctagtgaagcaagggcatcctgaaacggaaatggataaatgaaaaattctaattgattgagactgctgagggaagtttagataatcccatgagatggcactcttctggtcgactgaaacatttttcagatgccacttattttgatcagaagggcttactgtgtacgaatcatttgaaagatttgatccagccaagtgctttgtaatacagatacatttctgagatgtccagacgctgcagatgaaccccatgctgcattgtattcttttctgttttctctttagatgaatccatgatacagtttggatgaagaactactgaagaggctacgaaggtgccattgctatcaggagggagggtcactgaaaggctcacaggagggagggtcactgaaaggctcacactctgcaccaaacatgtttaatcatttgatcaaagatgcccacactcagcatgtatacagacttgctcaaatgtgatgtgttatacaagtgtgtgtgtgtgtatatatgaagttttcagctttattgtatgtatgttttcagattaatttgcctgaatctggaacccgtct

SEQ ID NO: 77082 - DNA, 687 bp, Zea Mays
cagactccggtcttccatatacaattataaagctggcggtttacaagataaagatggtggcttgcgagagttgattgttgggaaggatgatgagatcctgaaaacagaaacaagaactatagccagggccgatgttgcagaagtttgcatacaggcattgctattcgaagagtcaaagtttaaggcatttgatctggcatcaaaaccagaaggtgaagggacgccaactacagactttagggcactttttgcacaagttaatagtcgcttctaaagacataagattgttcttgccaagaagttgagggcattctttcgtaaagcgatatgaaatgtgtgtttagtaaggacactgatggttctttgctagaacatcggcgctgcatcgactcggtacatttggaaggagatgaacgctctccgttttcaaccatgaagaagcttcagcagcaacacaggttgttcgtccatctgactgctcttggctgcagcagcacttagggcctatttggaaggaaagtgtttttttatatttttccagttaataccatggaatactagaatattttatgttacgaagtgtttggttgcaatcctaaaaactatgttttcaaaagcatggtattttagataacatggtatgtttggaatatttaaaactccgtttcaatccaaagtttttatgac

SEQ ID NO: 77083 - DNA, 1527 bp, Zea Mays
agttgatttggaagaaatgtagggacttttttttaaaaaaaatgacgcgggacgaccgttgaaactggtgctttaagtatagtagagattttgattagacgttgtagttagttgtagaaaagtttattcatctcttctaatatgtcattttgacaccacaaatatccattcatactactctctccttcataaggactgttctagtcttcgatccctactactttaaaaccttattttttttcaaccaccatttttcaaaatcttcctagcaacaaacacaatcacaaccaaattttgggccatttccagcaacggaacacattcccgtctgatcctgacaaaacgagcacaactctaagtgggtatggcccatgacacatgcggctatccttcgcgaccagcgggcacgaaagtgataaggagacggtactagtaaactgactaactgctgcccactcgccggagaaccatggccacggcggcggcgtgtgtgcgggtggcgtctccgttcacgggcccacctatctggcatcccagacacgtcatctcaacgaggcggggacccaggagggccgggctggccgtcacggcggcggctgccgccggtggatcgccgcgcactgtgctcgtcaccggcgcgggcggccgaacaggccaaattgtgtacaagaagttgaaggagagggaaggacagtttgtgggacgtggcctagtcaggacgggagagagcaaaggcaaaattggaggcggtgacgacgtgtttgtcggcgacatcagagaccccgagagcattgctcctgcgatcgagggcattgacgcgctcatcatcctcaccagcgcggtcccaaagatgaaaccggggtttgatcctagcaaaggggggcgccctgagttttactttgaagaagggagttatcctgagcaggtggattggattggccaaaagaatcaaattgatgctgctaagagcatcggtgcaaagcacatagttttggtgggatccatgggaggaacagacatcaatcacccgctaaacaagttaggaaatgcaaatatactggtgtggaagcgcaaggcagaacagtacctagcagactccggtcttccatatacaattataagagctggcggtttacaagataaagatggtggcttgcgagagttgattgttgggaaggatgatgagatcctgaaaacagaaacaagaactatagccagggccgatgttgcagaagtttgcatacaggcattgctattcgaagagtcaaagtttaaggcatttgatctggcatcaaaaccagaaggtgaagggacgccaactacagactttagggcactttttgcacaagttaatagtcgcttctaaagacataagattgttcttgccaagaagttgagggcattctttcgtaaagcgatatgaaatgtgtgtttagtaaggtcattgctctctggatcaaccaccaagttcccaatacttggaacaaacttctttgcttcctcagcaattctgttgaactgcaaagc

SEQ ID NO: 77084 - DNA, 986 bp, Zea Mays
gcatgggtcgaccagtcaggcggcagcgacgtgcctccccactcccctccctcgcttatccgcgacccacttttgtgaggtcgcaattcatcctggtcgccaccagtaccacctctccatccttaatccttcactagcttagctagccagccacctccgttcactccatctcttgccggccagtgctccgtcgatcgacccgtagccaaccaccgacaactagctagcaacaatggctgccgtcgtcaacgcgcgagccgcaactgctcgttgctcggccgccggcgggccaccacgcggtgctgcgtcttcgtttccgccgtcgacgataaggacgaggaagaggacgacggcggcggcgggcggccgcggccggcttgtcgcggtctcggcggtgggcgacgtcgcggcggagggcaacacgtacctcatcgccggcgcggtggccgtcgccctcgtcggcacggccttccccatactcttctcgcgcaaggacgtgcccggagtgcgacggcgccgggttcatccgaaaggcgggcgcgacgctgcgggcgaacgccgcgaggaaggacgaggcccagatcgtctgccccaactgcaacggcctcggcaagctcggacagatcgacaagtagctaaataatcccatccaccatgcatgctacgtactaagctcatatacatgtgctgatgtgcatgcatggaccaaccaaactgctcctttgtataagctcttaattaaatctcctctccgacaatgtctgaatgtatatgctgagtgagtgttaatttggtctgtaatataacctgttgctttgtcagaaacgatgttgtgcaataacattgttgtcggtggtgttgttgtatgtgctagtgatgtctctcaatatatgtatgtctatcagatcaaactgttgtgcaatcaagcttttcgtgcaaccgaactatctaaagttctgaaaaaatatccaaatattaatagaaat

SEQ ID NO: 77085 - DNA, 531 bp, Zea Mays
acatgcccttcctcttctctgcgtcgggggactacacgcttgtgcccggagtgcgacggcgccgggttcatccgaaaggcgggcgcgacgctgcgggcgaacgccgcgaggaaggacgaggcccagatcgtctgccccaactgcaacggcctcggcaagctcggacagatcgacaagtagctaaataatcccatccaccatgcatgctacgtactaagctcatatacatgtgctgatgtgcatgcatggaccaaccaaactgctcctttgtataagctcttaattaaatctcctctccgacaatgtctgaatgtatatgctgagtgagtgttaatttggtctgtaatataacctgttgctttgtcagaaacgatgttgtgcaataacattgttgtcggtggtgttgttgtatgtgctagtgatgtctctcaatatatgtatgtctatcagatcaaactgttgtgcaatcaagcttttcgtgcaaccgaactatctaaagttctgaaaaaatatccaaatattaatagaaat

SEQ ID NO: 77086 - DNA, 1562 bp, Zea Mays
gcatctcctaattctttggcaaaggtaatattttgttgaccaatggccactactttacagaaaaagacaagtactctaaataatgtcctcacctattataaggataagcgcaaaaacaaacatgatcaagtagtcaatgcgaacgactctagatactccaccagcaagttggtggcttcttcatggcatctgtagtttatgtattgtctgaataaggcagcaggtagcagactacttgatcatgacatagtaattgtaggtgtaagctctttgctcgtgacaccgttcagtactaaattaagcacttgtaacataacaaaagaagaatgcagtgaaggcatgcatagcaggtagcagcacatgcattgtggttcttcaaattgaatttttgaatcattttcttcttcttcttagtttttagaatcaacaggcaaatacagtaatctctccctttgcccctcgcctccacgccaaacctgcaatggacgaagcaccttctgtgctgcactacaccatagagatttaggatttagaacacagagacattgtcaaatctagcaataaacgtcttgtggttgtgcgcgagtggtgagggctgcttttattcaccacaaagaaaataaagcccagcgacagcacactgtacagctaccaagcaactaaattgttagatcatatgactacttgtagctataacctaattgtctagtaacaacatgtggttctcttgtatggtcttatatttcctatctgccaagatacacctaatattaagccctttttattagcagatggttcggggctgtttatagatatgagagagggcataatctagtattaccgaaactggtaagataaaaaaactcagcttatatctctactattatagaggatatacgtaaccaatggatcaaataagaggctgctgtcaaaagttggtaattatcgaatgctaatcaataccatggtccaaaccattgaaatttttgtaatccttagcttatgttaaaagcttaggccaccagttattcacacacatgaatcttgatttgaacttcttatttaggcgttgcagttattccaccaaacttatttgatttgtatatgctgctgccatattttttactggaatcattgttggcgattccgtattttttcatacttggaattggggtatgctatgctatatgctgaagcagatagaactagaagcgatcgagataaagaatggaagtgagaggcttaaaacgtgaaaactctaaaaatattcacaaaagatgaactcggcaaaataaccatgaacaattcgttgtctcttggcaagggatgatttggtgaggttcacaaagggaatttacctgacaagaccgaggtggctgtcaaggcctcaaacgaggtcactcaaggtacgctagacaagtttgtggaggaagtagagatccagtcaaaggtgatgcaaaccgcttataccagtaggggagggggctgtaccggtggctgttgcgaggtggggtggagtgggggctgtctcgctcgccgccaggagggggtcacctcgccct

SEQ ID NO: 77087 - DNA, 617 bp, Zea Mays
cttggcgttgtgactgcggatgttgaagagggaggggaggtcctatggctcgagacggtagaggtcgatctcggcgattggattatacatgcaacaaaaataaaactaaaaaatcaaaatacaatcacatgagcatcctattttttgtggatcaagcacgagctgttgtgcttttggcagagctataccatcaagtgaatatatatcaccgaccaaggaaaagaactataccattcaaacattgtcactttcagtgttgctatggcatataactacagaagtccagatctcacaagtggaggtagtgctacagtccaagatcttttctctagaaaaccatgagtcgtacaagaatactcaaaatgagcaatcctagattaacaccatattagcattattgtaacggtccaatatttttctctagaaaaccatgagtcatacatgaataataaaaaatgagcaagactaaaaatgcaaagatcccatttctgagcgctaatttctttgttgtataattctttgaagagttaatctgtgacttacatagccttataagttacaaaaactatgaaatacatgtccaatactttatacaggtttctacacacaaaatattg

SEQ ID NO: 77088 - DNA, 1535 bp, Zea Mays
atgtggactttacacaactcgtcagcatttatacgaatgtaatatccgtcagaatctaatattccaatgcagttcatgaagcacaacaacttgtagaattcaataacaccaataaatggaaatttgatatccagatcggcgatacacgcaaattgccaactttcagatgtttgtttgtgttttataagaaccaaagtaggagctatatatacaccatcaatcgatatatacagatttcttgtaaattatatgctgcaaggtttgaaataatggtttcttgacacaaggctctataataagcactaacacacgttgatttagtcgacacgatgactgctacaacgttggtatgatatatggtttgcgtgcgtatgtttatgcatgtgcgtctactgtgtaattagtaggggggaaatcatatagaactcctgcccttcgatttttaataaaatcttactgcaacctcctaatagtaaccccactttggtaacctcactttccggtggataaaaaaaaaacttgcagatgatctataccctaattcctctcccctgtgatatatttcattctagagattttaggacatattaagagaaaacacaaaggacgcatgttttctcactttattttctaatcagatcctatcttcagtacggggcatgtttggactaaactttactgcatacttcggttgccaactctaagatctaaacataaattaacaagaacaaatagaagctaattgatgagtagaactcattagaatttcttaattagtcaacgttaggctaaactttcgtccggtgacgatccaaataggcccataattaattgtaccgaatttaacctcatactttttttttgctgtcaacacaatatattcactgtgcaagaaggggcgacatttgaatacgtttatttatgcattacttaattagtgagaattcacacatccattattcggcatgcccgcgttatttcatcgtatatatatttatttcaagttctggggcaaggaaaggaaatagcggctagcttatatattatcagccgatgtggggcgtctgggcgacgatgtcgacgaagatgcggacacggttagggcgataatccgcggtcaccacggagccgacgggcagcaccacgatgtcggcgtccggcttgtccttgaggatcaccttcttggcgtcctccacgctcagcccgaccacctcaggccacgacgtcttggcgccgccgccgccgccgccgcactccgtggagctcatggtgtcgcgaagggcaggtaaatcttgcttgttgcactgctggttgttggatatatattaagcgagtgcaccggtgatgaggtatttatagagctgcgttgcgtgcaggcaggacgtgtgtgtatatacgcacgcgaggcacacgaggataaacagccactacgaaacaaagaacagatagcaacactgcaggaaaaaaaatccatggttatcccatgcttgcagccaaaatagtcagcattttccagcgcgcgtagctggcgctga

SEQ ID NO: 77089 - DNA, 874 bp, Zea Mays
cgacggagagggtttggtgtgttgtgggggtaggtggcaagagccggagcagacgaaatttggcagtcgatcggatttgtggctcgcggagctggaccagccgccgcggttttaaaaggagggaccgcaaccaaccacctcgccatcgacctcctcgatccagacagcaggcagcagccatgtccaaggtcttcaccctcgacgcggtcgccaagcacaactccaaggaggattgctggctcatcatcggcggcaaggtgtatgatgtgacgaagtttttggtagaccacccaggaggtgatgatgttctgttgtcctcaactgcaacactgcccgcgcgatgatggatgagtacttggtgggtgaaatcgacgcgtcgacgatcccttccaggacgaagtatgtccccccgaaacaaccgcactacaaccaggacaagactcccgagtttgtcatcaagatcctccagtttttggttcccctggcaatcctgggcttggctgttgccgttaggatgtacaccaagtcggagtctgcttagctttgttgcccacttgcccttgcccccctcgcgattgtacgagtcgaacttgtcgaataagctagcaagagttttgtgaggttttattacatgtgtaacttgtcacgaaattcatcgaatgttctgagctgctgtgggttctgtggtttaaagtgtgatcggaatgcatcttactggactaattgtcatctcagttgagcaaggaagtctgattgtttgaaaccagcagctaacagcagttcctcctagttttgttacaagccaatattctaccgtcagttctgattgtctggcttcatttatctgacaataatatgactagcgtcagttacc

SEQ ID NO: 77090 - DNA, 212 bp, Zea Mays
ccccctcctcgtcgtcgccagctaggctgggctatctgagcgcggcggcggcggcaacgcacatcggatgccgcgggaagggaaggaagaagggttcaggcggccgattgggggcggaattgctccctcggcgactgcgaggggaaggaggggtactcggcggggttgctgacgtcgtcgcacgcccgtgaggaggaagcagaaatgggaag

SEQ ID NO: 77091 - DNA, 545 bp, Zea Mays
caggaggcagaaccacatgataccattagcaaatctcaacatgttcttgctgctacgagaatcgaataactcatctgcaactaaccattccatgccatgcaggttcgattacagggttgtggcagggagattaaaccggttaattatatctactaccatacattaggtaagcacccaaaaaaagaacatatatgcacagagcaagcaacaagtgcttccttctcatataaaacccagctgggtgaggtcatcgtccgggatctccagggcgcctgaaagatcaatgtcttgcaacgagtcgtcaaggccatccgtgaaccacgagctgatgtcgttgccctgcccatccagccctccagggacgtccaatatgtcatctaatccaggcaatgctggcagtccagcatccacggtcagccgcggggccacgttcctagagggatgctgagtcttcttctcgcttgcaggttcagggggctcttgcgcttgcgccgctggagatgagaatggctcaaccactctacccagcacgtttccggaagtcg

SEQ ID NO: 77092 - DNA, 3351 bp, Zea Mays
cacagatttatgactgttttggcaggaaccatacttgatttatgattgcgttgtggctatgcagaccggattcgtgagttattggatgtttcacgtgagctgtctggggttcgtgatagatcactggatcacagttctcctggaaattatgtcagtgaagcaaaccatatagaattttcagatgttaaggtagtcacacctgcaggtaatgttttggttgacgatttgactcttcgggtagaaactggttctaatcttttgatcactggtcccaatggtagcggaaaaagctccctttttcgggtccttgggggtctatggccactggtatctggccacattgttaaacctggtgttggttcagatctaaataaggagatcttctatgtcccgcaaagaccatacacagctgttggaacactacgtgaacagctaatctatcctcttacggcagatcaggggattgaaccacttacatatgatggaatggtggaccttctaaagaatgttgacctggaatatttgcttgaacgctatcctcttgataaggaagttaactggggtgatgagctgtccctcggtgaacagcaaagattgggaatggccaggttattctaccataagccaaagtttgccatccttgatgagtgcactagtgctgtgacaaccgacatggaagaacgtttttgcaaaaaagttcgagctatgggtacatcctgcataacaatatctcatcgaccagctttagttgcatttcatgatattgttttatccttggacggtgaaggaggttggaatgttcagcatagaagggatgattcgtccttttccaccgaagaatctgatttttcatcatcagaaactgatcgtaaatctgacgcactgactgttcaaagggcttttatgagcagggcaaagagcaatgcttcattggggtccaaggatcatccatattgtacagaggttatagcaacttcccctgaggtggaaatagaacatccagcacggacacctcgaattccacatttacgatgtcacccaagacctttgcctctcagagtagctgcaatgctaaaaatactggttcctagactatttgataaacaaggcgggcagttgcttgctgtcgctgtacttgttttctctcggacatggatctctgatcgtattgcttcgttgaatgggacaactgtgaagtttgtcttggaacaggacaaagatgcctttattcgcttgattggtgtcagtattctacaaagtggtgcaaattcttttgtggcaccatctctcaggacccttactgcgaaacttgcccttggatggcgaattcgcatgaccaatcatatgcttcgatattatttgaaaaggaatgcattctacaaggtattcaacatgtcaggtaaaagcattgatgcagaccaaagattaacacttgatgtagacaagttgaccactgaccttgctggcctagttactggaatggtaaaaccgctagttgacattctttggtttacatggagaatgaagcttttatctggacgaagaggagttgctatactgtatgcttacatgctactgggtttgggctttcttagagctatatcccctgacttcggtcatctctcaggccaagaacaagaacttgaaggaacattcaggttcatgcactcgagactgcggacacatgctgaatcaattgctttctttggtggtggttcaagagaaaaagcgatggttgaggctaaattcgtcaagttaattaaccactcaaagattcttttgaggaaacagtggctttatggtattgttgatgattttgtaacaaagcaacttccacacaatgtaacgtggggtctgagtctgttgtatgctttggagcacaagggagatagagctttaacctcaactcaaggagagttggcacatgctctgcggttcttggcttcagtggtgtcacagagcttcatagccttcggcgacattcttgagttacataagaagttccttgaactttctggtggcattaaccggatctttgagcttgaggagtttacacgcttcgctcaaagaaatactgtggtgtctcccaatgccatcagtgcagcctcaaaagaaacgatttcgtttcatgaagtggacattgtaacaccatcacagaagctattggctagaaaactctcgtgcgatgtggtacaagggaaaagccttcttctgaccggtcccaatggtagtggaaagagttctatttttagagtgctcagggatctctggcccaccttctctgggagagttaccaagccctcagaagggatgtttcacgttcctcagcgcccatataccagcctaggtactctgcgggatcagatcatataccctctctcaagggaggaagcgaagataaaagttctttcgctacatagatctggtaacaattctagtgcctccatgctgctggatgatcacctgaagacaattctagagaatgttcggctggtgtatcttctagaaagggaagggtgggattctacaccaaactgggaagatgttctgtcgttaggggaacaacagaggcttggaatggctcgtttgtttttccatcatcctaagtttggtatcctggacgagtgcaccaatgctacgagtgttgatgtcgaagagcatctgtacagacttgcaactagcatgggcataactgtgatcacttcctctcaaaggcctgctttgatacccttccatgccttggagctgaagctcattgacggcgaagggaactgggagctatgtgcgatccagcagtgagtgatggtgcccattaggagttgatgccattaaatgcaccatcagctgcatgtacaaaagcaagcagctagcacattgccattgtttgtgtatggacaacgtagacagtggcagcgttgctatgttggaagatgctatattcttgtcatagtctgcctcaggttgagcagcaaagcattgtgatgatgtatgattgtgagccatgcatggtagctgaatcctgatattagcttttagatagtggacatgattgtgagccatgcatggtagctgaatagcagagcagaagggttgtgtgttagaagctgtacctattgattcattacattatattgattctgcgtagcagatgtatattacaggcaagcaaaatataaataaatacgatgtggaattgtggatgctgctgccatgcagacatcagaaaattgaatcaggtgtggatgggaaattgtgcaagggtaagctgcattcagcgtagaggctctgccgcctgcatctaaatgacagctgataaataatgtgccatagtgttatttgagctcttattag

SEQ ID NO: 77093 - DNA, 3784 bp, Zea Mays
gtaaaattctcgttacaaaatttcagcagcggcatatgttctagttgctggtggggtaataaagaacttttctcctgcttttgggaagctgaaatctacagaacagcaactagaaggagactatcgtcaacttcactcgcggttaagaacacatgctgagagtgtggcattttatggcggtgagaacagagaagcatctcatattatgcagcggtttgaggctcttgttgagcacctgaatcttgtgcgtcatgaaaactggtggttcggcatgattcaagatttctttctgaagtattttggtgctactgtggcagttgtccttattatagaacctttcttctctggcaaccttagacctgattcatctacacttggaagggctgaaatgttgagcaatcttcgatatcacacaagcgtgatcatatcactgtttcagtctcttggaatcctttctatcagcacaagacgtttaaatattctaagtggctatgcagaccggattcgtgagttattggatgtttcacgtgagctgtctggggttcgtgatagatcactggatcacagttctcctggaaattatgtcagtgaagcaaaccatatagaattttcagatgttaaggtagtcacacctgcaggtaatgttttggttgacgatttgactcttcgggtagaaactggttctaatcttttgatcactggtcccaatggtagcggaaaaagctccctttttcgggtccttgggggtctatggccactggtatctggccacattgttaaacctggtgttggttcagatctaaataaggagatcttctatgtcccgcaaagaccatacacagctgttggaacactacgtgaacagctaatctatcctcttacggcagatcaggggattgaaccacttacatatgatggaatggtggaccttctaaagaatgttgacctggaatatttgcttgaacgctatcctcttgataaggaagttaactggggtgatgagctgtccctcggtgaacagcaaagattgggaatggccaggttattctaccataagccaaagtttgccatccttgatgagtgcactagtgctgtgacaaccgacatggaagaacgtttttgcaaaaaagttcgagctatgggtacatcctgcataacaatatctcatcgaccagctttagttgcatttcatgatattgttttatccttggacggtgaaggaggttggaatgttcagcatagaagggatgattcgtccttttccaccgaagaatctgatttttcatcatcagaaactgatcgtaaatctgacgcactgactgttcaaagggcttttatgagcagggcaaagagcaatgcttcattggggtccaaggatcatccatattgtacagaggttatagcaacttcccctgaggtggaaatagaacatccagcacggacacctcgaattccacatttacgatgtcacccaagacctttgcctctcagagtagctgcaatgctaaaaatactggttcctagactatttgataaacaaggcgggcagttgcttgctgtcgctgtacttgttttctctcggacatggatctctgatcgtattgcttcgttgaatgggacaactgtgaagtttgtcttggaacaggacaaagatgcctttattcgcttgattggtgtcagtattctacaaagtggtgcaaattcttttgtggcaccatctctcaggacccttactgcgaaacttgcccttggatggcgaattcgcatgaccaatcatatgcttcgatattatttgaaaaggaatgcattctacaaggtattcaacatgtcaggtaaaagcattgatgcagaccaaagattaacacttgatgtagacaagttgaccactgaccttgctggcctagttactggaatggtaaaaccgctagttgacattctttggtttacatggagaatgaagcttttatctggacgaagaggagttgctatactgtatgcttacatgctactgggtttgggctttcttagagctatatcccctgacttcggtcatctctcaggccaagaacaagaacttgaaggaacattcaggttcatgcactcgagactgcggacacatgctgaatcaattgctttctttggtggtggttcaagagaaaaagcgatggttgaggctaaattcgtcaagttaattaaccactcaaagattcttttgaggaaacagtggctttatggtattgttgatgattttgtaacaaagcaacttccacacaatgtaacgtggggtctgagtctgttgtatgctttggagcacaagggagatagagctttaacctcaactcaaggagagttggcacatgctctgcggttcttggcttcagtggtgtcacagagcttcatagccttcggcgacattcttgagttacataagaagttccttgaactttctggtggcattaaccggatctttgagcttgaggagtttacacgcttcgctcaaagaaatactgtggtgtctcccaatgccatcagtgcagcctcaaaagaaacgatttcgtttcatgaagtggacattgtaacaccatcacagaagctattggctagaaaactctcgtgcgatgtggtacaagggaaaagccttcttctgaccggtcccaatggtagtggaaagagttctatttttagagtgctcagggatctctggcccaccttctctgggagagttaccaagccctcagaagggatgtttcacgttcctcagcgcccatataccagcctaggtactctgcgggatcagatcatataccctctctcaagggaggaagcgaagataaaagttctttcgctacatagatctggtaacaattctagtgcctccatgctgctggatgatcacctgaagacaattctagagaatgttcggctggtgtatcttctagaaagggaagggtgggattctacaccaaactgggaagatgttctgtcgttaggggaacaacagaggcttggaatggctcgtttgtttttccatcatcctaagtttggtatcctggacgagtgcaccaatgctacgagtgttgatgtcgaagagcatctgtacagacttgcaactagcatgggcataactgtgatcacttcctctcaaaggcctgctttgatacccttccatgccttggagctgaagctcattgacggcgaagggaactgggagctatgtgcgatccagcagtgagtgatggtgcccattaggagttgatgccattaaatgcaccatcagctgcatgtacaaaagcaagcagctagcacattgccattgtttgtgtatggacaacgtagacagtggcagcgttgctatgttggaagatgctatattcttgtcatagtctgcctcaggttgagcagcaaagcattgtgatgatgtatgattgtgagccatgcatggtagctgaatcctgatattagcttttagatagtggacatgattgtgagccatgcatggtagctgaatagcagagcagaagggttgtgtgttagaagctgtacctattgattcattacattatattgattctgcgtagcagatgtatattacaggcaagcaaaatataaataaatacgatgtggaattgtggatgctgctgccatgcagacatcagaaaattgaatcaggtgtggatgggaaattgtgcaagggtaagctgcattcagcgtagaggctctgccgcctgcatctaaatgacagctgataaataatgtgccatagtgttatttgagctcttattag

SEQ ID NO: 77094 - DNA, 4818 bp, Zea Mays
cttaaatctcatcatcacatcaaccgttcctcccctgtactctcatcacccattgcttcgcgttcgcggcatctactgctgctcctctgctcggccccgcgtcgccgtcgggagatctctccggccgccgagatcgattccacgcgccgctctcgcctgcctccgctcactgtccccgctgccgcaggattcgcccgccctgccggtgcgccggtggttctctacggcgtcttccggttcgggtgccgccatgctccgtggcgacgggggagggacgccgtgattccttgcctggccgccggtcgccgcacgtgaggctgagatctcggggagctcgccgtctcgcggcgccgccaccaccatgccgtctctgcagctgctgcagctgacggaccgcggccgggggcttctcgcttccaggaggaggacgctcgcctttgtctccggcgcggtgcttgccggtggagctctggcgtacgcccgctcgagccagagccgccggcggaggaggcgcccggaggcgagtcgcagcggcggagccggtgcattggccgccaatggggatggtttcagccagaacggtgccggcggtggattggctgcagcggaccagaggaggagtggcctcaaatctctgcatttcctcgcttctatcctactcaagaagatggggcccagtggcacgcgctaccttctatgcttggtattaacatcggtgctgcgtacagccgtagggcatagattagcaagagttcaagggtttttgtttaaagcagcatttcttcggcgcatcccaacatttacacgcttgatcatagaaaatcttacgctatgtttcctccaatcaacattatatcagacctcaaaatacttaacaggctctttaagtttgcgtttcaagaaaattctaacagatatcgcccatgctgattactttgagaatatggtttactacaagatctcacatgtggatcatcggatatcaaatccggagcaaaggattgctagtgatatcccaaagttctcttctgaactaggtgaacttgtacaagatgatctggctgcagttgcagaagggttaatatacacgtggcgtctctgttcttatgccagtccaaaatacgtgttctggattatggcatatgttctagttgctggtggggtaataaagaacttttctcctgcttttgggaagctgaaatctacagaacagcaactagaaggagactatcgtcaacttcactcgcggttaagaacacatgctgagagtgtggcattttatggcggtgagaacagagaagcatctcatattatgcagcggtttgaggctcttgttgagcacctgaatcttgtgcgtcatgaaaactggtggttcggcatgattcaagatttctttctgaagtattttggtgctactgtggcagttgtccttattatagaacctttcttctctggcaaccttagacctgattcatctacacttggaagggctgaaatgttgagcaatcttcgatatcacacaagcgtgatcatatcactgtttcagtctcttggaatcctttctatcagcacaagacgtttaaatattctaagtggctatgcagaccggattcgtgagttattggatgtttcacgtgagctgtctggggttcgtgatagatcactggatcacagttctcctggaaattatgtcagtgaagcaaaccatatagaattttcagatgttaaggtagtcacacctgcaggtaatgttttggttgacgatttgactcttcgggtagaaactggttctaatcttttgatcactggtcccaatggtagcggaaaaagctccctttttcgggtccttgggggtctatggccactggtatctggccacattgttaaacctggtgttggttcagatctaaataaggagatcttctatgtcccgcaaagaccatacacagctgttggaacactacgtgaacagctaatctatcctcttacggcagatcaggggattgaaccacttacatatgatggaatggtggaccttctaaagaatgttgacctggaatatttgcttgaacgctatcctcttgataaggaagttaactggggtgatgagctgtccctcggtgaacagcaaagattgggaatggccaggttattctaccataagccaaagtttgccatccttgatgagtgcactagtgctgtgacaaccgacatggaagaacgtttttgcaaaaaagttcgagctatgggtacatcctgcataacaatatctcatcgaccagctttagttgcatttcatgatattgttttatccttggacggtgaaggaggttggaatgttcagcatagaagggatgattcgtccttttccaccgaagaatctgatttttcatcatcagaaactgatcgtaaatctgacgcactgactgttcaaagggcttttatgagcagggcaaagagcaatgcttcattggggtccaaggatcatccatattgtacagaggttatagcaacttcccctgaggtggaaatagaacatccagcacggacacctcgaattccacatttacgatgtcacccaagacctttgcctctcagagtagctgcaatgctaaaaatactggttcctagactatttgataaacaaggcgggcagttgcttgctgtcgctgtacttgttttctctcggacatggatctctgatcgtattgcttcgttgaatgggacaactgtgaagtttgtcttggaacaggacaaagatgcctttattcgcttgattggtgtcagtattctacaaagtggtgcaaattcttttgtggcaccatctctcaggacccttactgcgaaacttgcccttggatggcgaattcgcatgaccaatcatatgcttcgatattatttgaaaaggaatgcattctacaaggtattcaacatgtcaggtaaaagcattgatgcagaccaaagattaacacttgatgtagacaagttgaccactgaccttgctggcctagttactggaatggtaaaaccgctagttgacattctttggtttacatggagaatgaagcttttatctggacgaagaggagttgctatactgtatgcttacatgctactgggtttgggctttcttagagctatatcccctgacttcggtcatctctcaggccaagaacaagaacttgaaggaacattcagatggttgaggctaaattcgtcaagttaattaaccactcaaagattcttttgaggaaacagtggctttatggtattgttgatgattttgtaacaaagcaacttccacacaatgtaacgtggggtctgagtctgttgtatgctttggagcacaagggagatagagctttaacctcaactcaaggagagttggcacatgctctgcggttcttggcttcagtggtgtcacagagcttcatagccttcggcgacattcttgagttacataagaagttccttgaactttctggtggcattaaccggatctttgagcttgaggagtttacacgcttcgctcaaagaaatactgtggtgtctcccaatgccatcagtgcagcctcaaaagaaacgatttcgtttcatgaagtggacattgtaacaccatcacagaagctattggctagaaaactctcgtgcgatgtggtacaagggaaaagccttcttctgaccggtcccaatggtagtggaaagagttctatttttagagtgctcagggatctctggcccaccttctctgggagagttaccaagccctcagaagggatgtttcacgttcctcagcgcccatataccagcctaggtactctgcgggatcagatcatataccctctctcaagggaggaagcgaagataaaagttctttcgctacatagatctggtaacaattctagtgcctccatgctgctggatgatcacctgaagacaattctagagaatgttcggctggtgtatcttctagaaagggaagggtgggattctacaccaaactgggaagatgttctgtcgttaggggaacaacagaggcttggaatggctcgtttgtttttccatcatcctaagtttggtatcctggacgagtgcaccaatgctacgagtgttgatgtcgaagagcatctgtacagacttgcaactagcatgggcataactgtgatcacttcctctcaaaggcctgctttgatacccttccatgccttggagctgaagctcattgacggcgaagggaactgggagctatgtgcgatccagcagtgagtgatggtgcccattaggagttgatgccattaaatgcaccatcagctgcatgtacaaaagcaagcagctagcacattgccattgtttgtgtatggacaacgtagacagtggcagcgttgctatgttggaagatgctatattcttgtcatagtctgcctcaggttgagcagcaaagcattgtgatgatgtatgattgtgagccatgcatggtagctgaatcctgatattagcttttagatagtggacatgattgtgagccatgcatggtagctgaatagcagagcagaagggttgtgtgttagaagctgtacctattgattcattacattatattgattctgcgtagcagatgtatattacaggcaagcaaaatataaataaatacgatgtggaattgtggatgctgctgccatgcagacatcagaaaattgaatcaggtgtggatgggaaattgtgcaagggtaagctgcattcagcgtagaggctctgccgcctgcatctaaatgacagctgataaataatgtgccatagtgttatttgagctcttattag

SEQ ID NO: 77095 - DNA, 5598 bp, Zea Mays
gttggtttttacgcaaaacttgtgtagattcaggattctctcagtataccaccagtctctctcagtgctgcgctgtatctgtctgtgactgagcccccccttcttctctctctcttgcttaaatctcatcatcacatcaaccgttcctcccctgtactctcatcacccattgcttcgcgttcgcggcatctactgctgctcctctgctcggccccgcgtcgccgtcgggagatctctccggccgccgagatcgattccacgcgccgctctcgcctgcctccgctcactgtccccgctgccgcaggattcgcccgccctgccggtgcgccggtggttctctacggcgtcttccggttcgggtgccgccatgctccgtggcgacgggggagggacgccgtgattccttgcctggccgccggtcgccgcacgtgaggctgagatctcggggagctcgccgtctcgcggcgccgccaccaccatgccgtctctgcagctgctgcagctgacggaccgcggccgggggcttctcgcttccaggaggaggacgctcgcctttgtctccggcgcggtgcttgccggtggagctctggcgtacgcccgctcgagccagagccgccggcggaggaggcgcccggaggcgagtcgcagcggcggagccggtgcattggccgccaatggggatggtttcagccagaacggtgccggcggtggattggctgcagcggaccagaggaggagtggcctcaaatctctgcatttcctcgcttctatcctactcaagaagatggggcccagtggcacgcgctaccttctatgcttggtattaacatcggtgctgcgtacagccgtagggcatagattagcaagagttcaagggtttttgtttaaagcagcatttcttcggcgcatcccaacatttacacgcttgatcatagaaaatcttacgctatgtttcctccaatcaacattatatcagacctcaaaatacttaacaggctctttaagtttgcgtttcaagaaaattctaacagatatcgcccatgctgattactttgagaatatggtttactacaagatctcacatgtggatcatcggatatcaaatccggagcaaaggattgctagtgatatcccaaagttctcttctgaactaggtgaacttgtacaagatgatctggctgcagttgcagaagggttaatatacacgtggcgtctctgttcttatgccagtccaaaatacgtgttctggattatggcatatgttctagttgctggtggggtaataaagaacttttctcctgcttttgggaagctgaaatctacagaacagcaactagaaggagactatcgtcaacttcactcgcggttaagaacacatgctgagagtgtggcattttatggcggtgagaacagagaagcatctcatattatgcagcggtttgaggctcttgttgagcacctgaatcttgtgcgtcatgaaaactggtggttcggcatgattcaagatttctttctgaagtattttggtgctactgtggcagttgtccttattatagaacctttcttctctggcaaccttagacctgattcatctacacttggaagggctgaaatgttgagcaatcttcgatatcacacaagcgtgatcatatcactgtttcagtctcttggaatcctttctatcagcacaagacgtttaaatattctaaggtgcagttctccacctattttagaaattgctacctggtagatctgaatcgtggaaggtggcaccttgcttcaaaaagttgctggattatggtgcacgtcatccaattaagtctggtttcattttttcttgcaattggcaatgtgacattttttgttccattatttctcacaaatgctgactgagaataattttatttcatggaaccgtttttacgatctgttttttatgaaggaagaatctcacttctattttttgtttgattgatggtttaatatggttccaagaagaagtcaagaagacacattatgccactttgtttagtgctttgacggagactggaaatcattaacatcctctcccaatatgcccttttagttttcaaattctgccaattatgacattattttctatatgatttgacctgttgcatgctgtgtaggtggcttttctacattccagtatacgagaatttcagtgtcattaaagttttgcactgatgtccgccacagatttatgactgttttggcaggaaccatacttgatttatgattgcgttggtaggaacaatacttgatctatgatcgttttgtggctatgcagaccggattcgtgagttattggatgtttcacgtgagctgtctggggttcgtgatagatcactggatcacagttctcctggaaattatgtcagtgaagcaaaccatatagaattttcagatgttaaggtagtcacacctgcaggtaatgttttggttgacgatttgactcttcgggtagaaactggttctaatcttttgatcactggtcccaatggtagcggaaaaagctccctttttcgggtccttgggggtctatggccactggtatctggccacattgttaaacctggtgttggttcagatctaaataaggagatcttctatgtcccgcaaagaccatacacagctgttggaacactacgtgaacagctaatctatcctcttacggcagatcaggggattgaaccacttacatatgatggaatggtggaccttctaaagaatgttgacctggaatatttgcttgaacgctatcctcttgataaggaagttaactggggtgatgagctgtccctcggtgaacagcaaagattgggaatggccaggttattctaccataagccaaagtttgccatccttgatgagtgcactagtgctgtgacaaccgacatggaagaacgtttttgcaaaaaagttcgagctatgggtacatcctgcataacaatatctcatcgaccagctttagttgcatttcatgatattgttttatccttggacggtgaaggaggttggaatgttcagcatagaagggatgattcgtccttttccaccgaagaatctgatttttcatcatcagaaactgatcgtaaatctgacgcactgactgttcaaagggcttttatgagcagggcaaagagcaatgcttcattggggtccaaggatcatccatattgtacagaggttatagcaacttcccctgaggtggaaatagaacatccagcacggacacctcgaattccacatttacgatgtcacccaagacctttgcctctcagagtagctgcaatgctaaaaatactggttcctagactatttgataaacaaggcgggcagttgcttgctgtcgctgtacttgttttctctcggacatggatctctgatcgtattgcttcgttgaatgggacaactgtgaagtttgtcttggaacaggacaaagatgcctttattcgcttgattggtgtcagtattctacaaagtggtgcaaattcttttgtggcaccatctctcaggacccttactgcgaaacttgcccttggatggcgaattcgcatgaccaatcatatgcttcgatattatttgaaaaggaatgcattctacaaggtattcaacatgtcaggtaaaagcattgatgcagaccaaagattaacacttgatgtagacaagttgaccactgaccttgctggcctagttactggaatggtaaaaccgctagttgacattctttggtttacatggagaatgaagcttttatctggacgaagaggagttgctatactgtatgcttacatgctactgggtttgggctttcttagagctatatcccctgacttcggtcatctctcaggccaagaacaagaacttgaaggaacattcaggttcatgcactcgagactgcggacacatgctgaatcaattgctttctttggtggtggttcaagagaaaaagcgatggttgaggctaaattcgtcaagttaattaaccactcaaagattcttttgaggaaacagtggctttatggtattgttgatgattttgtaacaaagcaacttccacacaatgtaacgtggggtctgagtctgttgtatgctttggagcacaagggagatagagctttaacctcaactcaaggagagttggcacatgctctgcggttcttggcttcagtggtgtcacagagcttcatagccttcggcgacattcttgagttacataagaagttccttgaactttctggtggcattaaccggatctttgagcttgaggagtttacacgcttcgctcaaagaaatactgtggtgtctcccaatgccatcagtgcagcctcaaaagaaacgatttcgtttcatgaagtggacattgtaacaccatcacagaagctattggctagaaaactctcgtgcgatgtggtacaagggaaaagccttcttctgaccggtcccaatggtagtggaaagagttctatttttagagtgctcagggatctctggcccaccttctctgggagagttaccaagccctcagaagggatgtttcacgttcctcagcgcccatataccagcctaggtactctgcgggatcagatcatataccctctctcaagggaggaagcgaagataaaagttctttcgctacatagatctggtaacaattctagtgcctccatgctgctggatgatcacctgaagacaattctagagaatgttcggctggtgtatcttctagaaagggaagggtgggattctacaccaaactgggaagatgttctgtcgttaggggaacaacagaggcttggaatggctcgtttgtttttccatcatcctaagtttggtatcctggacgagtgcaccaatgctacgagtgttgatgtcgaagagcatctgtacagacttgcaactagcatgggcataactgtgatcacttcctctcaaaggcctgctttgatacccttccatgccttggagctgaagctcattgacggcgaagggaactgggagctatgtgcgatccagcagtgagtgatggtgcccattaggagttgatgccattaaatgcaccatcagctgcatgtacaaaagcaagcagctagcacattgccattgtttgtgtatggacaacgtagacagtggcagcgttgctatgttggaagatgctatattcttgtcatagtctgcctcaggttgagcagcaaagcattgtgatgatgtatgattgtgagccatgcatggtagctgaatcctgatattagcttttagatagtggacatgattgtgagccatgcatggtagctgaatagcagagcagaagggttgtgtgttagaagctgtacctattgattcattacattatattgattctgcgtagcagatgtatattacaggcaagcaaaatataaataaatacgatgtggaattgtggatgctgctgccatgcagacatcagaaaattgaatcaggtgtggatgggaaattgtgcaagggtaagctgcattcagcgtagaggctctgccgcctgcatctaaatgacagctgataaataatgtgccatagtgttatttgagctcttattag

SEQ ID NO: 77096 - DNA, 4234 bp, Zea Mays
aaagaaagctacccaaatccatgcatcccttaagaaattcgacaccacaacgaacatggtgctgcgtacagccgtagggcatagattagcaagagttcaagggtttttgtttaaagcagcatttcttcggcgcatcccaacatttacacgcttgatcatagaaaatcttacgctatgtttcctccaatcaacattatatcagacctcaaaatacttaacaggctctttaagtttgcgtttcaagaaaattctaacagatatcgcccatgctgattactttgagaatatggtttactacaagatctcacatgtggatcatcggatatcaaatccggagcaaaggattgctagtgatatcccaaagttctcttctgaactaggtgaacttgtacaagatgatctggctgcagttgcagaagggttaatatacacgtggcgtctctgttcttatgccagtccaaaatacgtgttctggattatggcatatgttctagttgctggtggggtaataaagaacttttctcctgcttttgggaagctgaaatctacagaacagcaactagaaggagactatcgtcaacttcactcgcggttaagaacacatgctgagagtgtggcattttatggcggtgagaacagagaagcatctcatattatgcagcggtttgaggctcttgttgagcacctgaatcttgtgcgtcatgaaaactggtggttcggcatgattcaagatttctttctgaagtattttggtgctactgtggcagttgtccttattatagaacctttcttctctggcaaccttagacctgattcatctacacttggaagggctgaaatgttgagcaatcttcgatatcacacaagcgtgatcatatcactgtttcagtctcttggaatcctttctatcagcacaagacgtttaaatattctaagtggctatgcagaccggattcgtgagttattggatgtttcacgtgagctgtctggggttcgtgatagatcactggatcacagttctcctggaaattatgtcagtgaagcaaaccatatagaattttcagatgttaaggtagtcacacctgcaggtaatgttttggttgacgatttgactcttcgggtagaaactggttctaatcttttgatcactggtcccaatggtagcggaaaaagctccctttttcgggtccttgggggtctatggccactggtatctggccacattgttaaacctggtgttggttcagatctaaataaggagatcttctatgtcccgcaaagaccatacacagctgttggaacactacgtgaacagctaatctatcctcttacggcagatcaggggattgaaccacttacatatgatggaatggtggaccttctaaagaatgttgacctggaatatttgcttgaacgctatcctcttgataaggaagttaactggggtgatgagctgtccctcggtgaacagcaaagattgggaatggccaggttattctaccataagccaaagtttgccatccttgatgagtgcactagtgctgtgacaaccgacatggaagaacgtttttgcaaaaaagttcgagctatgggtacatcctgcataacaatatctcatcgaccagctttagttgcatttcatgatattgttttatccttggacggtgaaggaggttggaatgttcagcatagaagggatgattcgtccttttccaccgaagaatctgatttttcatcatcagaaactgatcgtaaatctgacgcactgactgttcaaagggcttttatgagcagggcaaagagcaatgcttcattggggtccaaggatcatccatattgtacagaggttatagcaacttcccctgaggtggaaatagaacatccagcacggacacctcgaattccacatttacgatgtcacccaagacctttgcctctcagagtagctgcaatgctaaaaatactggttcctagactatttgataaacaaggcgggcagttgcttgctgtcgctgtacttgttttctctcggacatggatctctgatcgtattgcttcgttgaatgggacaactgtgaagtttgtcttggaacaggacaaagatgcctttattcgcttgattggtgtcagtattctacaaagtggtgcaaattcttttgtggcaccatctctcaggacccttactgcgaaacttgcccttggatggcgaattcgcatgaccaatcatatgcttcgatattatttgaaaaggaatgcattctacaaggtattcaacatgtcaggtaaaagcattgatgcagaccaaagattaacacttgatgtagacaagttgaccactgaccttgctggcctagttactggaatggtaaaaccgctagttgacattctttggtttacatggagaatgaagcttttatctggacgaagaggagttgctatactgtatgcttacatgctactgggtttgggctttcttagagctatatcccctgacttcggtcatctctcaggccaagaacaagaacttgaaggaacattcaggttcatgcactcgagactgcggacacatgctgaatcaattgctttctttggtggtggttcaagagaaaaagcgatggttgaggctaaattcgtcaagttaattaaccactcaaagattcttttgaggaaacagtggctttatggtattgttgatgattttgtaacaaagcaacttccacacaatgtaacgtggggtctgagtctgttgtatgctttggagcacaagggagatagagctttaacctcaactcaaggagagttggcacatgctctgcggttcttggcttcagtggtgtcacagagcttcatagccttcggcgacattcttgagttacataagaagttccttgaactttctggtggcattaaccggatctttgagcttgaggagtttacacgcttcgctcaaagaaatactgtggtgtctcccaatgccatcagtgcagcctcaaaagaaacgatttcgtttcatgaagtggacattgtaacaccatcacagaagctattggctagaaaactctcgtgcgatgtggtacaagggaaaagccttcttctgaccggtcccaatggtagtggaaagagttctatttttagagtgctcagggatctctggcccaccttctctgggagagttaccaagccctcagaagggatgtttcacgttcctcagcgcccatataccagcctaggtactctgcgggatcagatcatataccctctctcaagggaggaagcgaagataaaagttctttcgctacatagatctggtaacaattctagtgcctccatgctgctggatgatcacctgaagacaattctagagaatgttcggctggtgtatcttctagaaagggaagggtgggattctacaccaaactgggaagatgttctgtcgttaggggaacaacagaggcttggaatggctcgtttgtttttccatcatcctaagtttggtatcctggacgagtgcaccaatgctacgagtgttgatgtcgaagagcatctgtacagacttgcaactagcatgggcataactgtgatcacttcctctcaaaggcctgctttgatacccttccatgccttggagctgaagctcattgacggcgaagggaactgggagctatgtgcgatccagcagtgagtgatggtgcccattaggagttgatgccattaaatgcaccatcagctgcatgtacaaaagcaagcagctagcacattgccattgtttgtgtatggacaacgtagacagtggcagcgttgctatgttggaagatgctatattcttgtcatagtctgcctcaggttgagcagcaaagcattgtgatgatgtatgattgtgagccatgcatggtagctgaatcctgatattagcttttagatagtggacatgattgtgagccatgcatggtagctgaatagcagagcagaagggttgtgtgttagaagctgtacctattgattcattacattatattgattctgcgtagcagatgtatattacaggcaagcaaaatataaataaatacgatgtggaattgtggatgctgctgccatgcagacatcagaaaattgaatcaggtgtggatgggaaattgtgcaagggtaagctgcattcagcgtagaggctctgccgcctgcatctaaatgacagctgataaataatgtgccatagtgttatttgagctcttattag

SEQ ID NO: 77097 - DNA, 1326 bp, Zea Mays
gcgccgagggggggagggcaaaccgggagagagagagacacctcctccttttcccccctttgcattgggttgccgcaacactacagacacaaacacagtctaggaggcttcttccgctcgctcaggttgagggcaagatcatcaaggcgcagatctgggacacggcaggccaggagcggtaccgggcgatcaccagcgcctactatcgcggggcgctgggcgcggtcctggtctatgacgtgagcaagcccaccaccttcgagaacatcagccggtggctcaaggagctacgcgaccacgccgactccaacaccaggatcatgctcgtcggcaacaagaccgacctgaggcacctccgggccgtcgccaccgacgacgctcggagcttcgctgaggcagaaggcctgtcctacatcgagacgtccgcgctggaggccaccaacgtggaggaggcgttccagctcatcctgggcgacatttaccgggccgtcagcaagaagcctgtggcgtccgacgaggttggcgccggccagggaggcgtcaaggaaggtaagaccatcgatgtggcgactggtgctgatgccgccgctcacaagaagcagtgctgctcggcttagaagttagaagaacccatgctggtggtctctcgttcagtggcgtatgtgttgttgtgatggttgtcgttgttgttttttttctcttcttccagtccaaaagtttgttgattcgttttgccagatagtacctttgttggagggataatcatgctcacatatatattctctaaagcaagcagttatatatgattataccatcaccaagtcaattgtcttgtagcatcaagtagtgtcagcaagcctgcatatgagatctgcattccaaaactgaagcaccaagccaattaccatatagtatcaagtttcggcaagcctacatacacatgttctctaactgagatctgctttccaaaattcaaacacagaatcttgatagacaggcaagctccggctggcaaaagatgagataggtgactttaattaccacgttcaacaaacaacagccagcactcacaccggacatcatgtagttagctgcaagtttcaagattaagtgccccctgaaccctgtctatgatgagcagcagctgcgcttctgctgtattggctgccctttcatcctgcagtagcagcacggcatcaatcaatagtaatttcaatcagtcaatgaccctcagtctaaaatccaactcagaacagcacaaaaatgcgttaaatcacctcccatacaactgccacatggggaccatacccactaggggcttgttcg

SEQ ID NO: 77098 - DNA, 246 bp, Zea Mays
ggggggatgtttgatcggaataaacatagttttttttttcttatttgtattttatgattgaccaatataaacataaacaacttcaaattggtcttgtttcccctcaacaaataaaagcttgggctaaatcctacctagtggggaagtcgttggagaagtcacaagaccctccacttttcattataaaaccgataaaccagaaaaaatggattgttttgcgaaagaatctttgggcccataaaaagc

SEQ ID NO: 77099 - DNA, 111 bp, Zea Mays
tcccttgttgcttgtggagtaaggccagatatccgatatttcctacgcatgtttccacggtgtgtgacctccactttcacacctcgtagggcttttttaatctatatatac

SEQ ID NO: 77100 - DNA, 2287 bp, Zea Mays
cagaaatatattttgtttcgatcaaaagaatataaactctgttttacacatttgcacctgctttacacatggcaatggcagtatacagacataaactctgtttcaaaacaaactaagggcagaagcaaagatcctatctagtaacagaatacattctactctttgggtcagcaaggtaactgaacagatatatgttctagctggcgggtgctcgtcgccgaagaagacttcccacgacttcctggcacctggcggcggcggtcggcgcgcgcgagagaagggcggacgccggaggatggatacgaggaaaagggaaagaatagaggaggcacaggttgaccacggcaggggcacagggctccgataaagaggcccggcccggcccggcccggcctgagtccactcttcttctgccttcccgactctacctgacttcgcccgctctgagaaattcactctcaccaccaccgcgccgcctccactccccccacccccggtctgaaacccaagcttccgcttctctcatggccgacgccaccgccgccctctcagctcggagcaaggtgcaggctttcctggaggctgcgcgcgccggcgacctccaatccctcaagaacctcgtcgcggcgctcgacgaggacggcacgggcgccgcctccgtcgccgccgccgtgcgcgacgccaacaagcgcaccgccctccacttcgcggcgatcggatgtcgcaccgacgtctgtgaattcctcatcggcgagctcggcctccctgtcgacccaaaggacgatgatggcgaaactccgctcatccatgcgacacgccagggccatctggacactgtcaagtatcttctcgaccatggagctgatccttcggtggccaccagcctaggagccacagcgctacaccatgctgcaggcatagggaacacggaactcatgaagcttctcctctccaagggagttgacgtcgagtcagaaagtgatgctggcactccccttgtgtgggctgctggtcatggcaaccaggatgctgtcaaacttctgcttcaacacaatgctaagccaaatactgaaaacgatgatggtgtcacagcattgttatctgctgttgctgcaggttccctcccatgcttggaggtcctaattgaggctggtgcaaacccaaatgtcaaggctggtggagcaaccccattgcatattgctgcagatagtggaaatatagaagtcatcaaatgtttgcttaaagctggagctgacccaaatacctgtgatgatgatgaattgaagccagttcaggttgctgcttggagaaataaccgtgaagctgttgaacttcttttaccgttaacatccccaattccaggtgtttcaaactggaacgtagatgggattatagaacacatgctccctaaagagtatgaggaaaagtctcaactgaaggaagcggcatctctgaaatcaggcctaacacaaactattgaggtgtcatctgaagcaaaaaagaggtccttggaagccaaatcaagaggtgatgatgccttcagaagaaaggactaccttgtagcggtggatgcttatacgcaggctacagagttggacccaactgatgcaacagtgctctcaaacagaagcctgtgctggctgcgggcagggcaagctgagcgtgctctggaggacgccaaagcatgccgtgcattgagaccagattgggcgaaagcctgctacagggaaggtgcggcgcatcgtctgttacagaggtttgaggaagccgcaaacgccttctatgagggggtgcagcttgagccggagaacacggagctcgtcaacgcattcagggaggccatcgaagccgggaggaagttccatggcgtcaacacgccaaactcaacacaatgagactttgctgtttggttggataggtagatgatgaagcggatggacatgaacgttgtcttagttggaagttggtgagatgatgaatgagatgataatgaaatttgaaagagcgaatttgcagatttattttgtgttttgtgattgttttcttaaacttgttttcttgcgtcgtcccggactcccggtccatgtgtgctctttcttgaattgcattttaatcagtgttagggtctgggtgatttagctgggaaagggagaagatatgctagggctatggaaaacagatcgtgcatatggtgatgatgcaaaacgatgtttacagtgtgaagtttaaaataggagatgtgaataagtaagctattggagacaatattatagagactatttgagac

SEQ ID NO: 77101 - DNA, 260 bp, Zea Mays
cttacaccttggttggacggaaggcatgtcgtgtttggccaggtcctggaagggatggatgtcgtaagtctgatcgagtcgcaggagaccgacagaggtgaccgcccgaagaagaaagtagtcatcagcgagtgtggggagcttccagtggtctaagtgttactcatctgttgtcggtcttacctaacctcggatggatggcgatatttcccccacctgaacttgtcgtgctaccctccccctccccacccccctaccct

SEQ ID NO: 77102 - DNA, 436 bp, Zea Mays
ccacgtgtggctttatgaggctcaactggcagtataagggtaccggtgggaagagcatatatggacgcaccttcaaagatgagaacttcaaattggttcacactggacctggagtggtcagcatggctaatgctgggccgaacaccaatggcagccagttctttatttgcactgtcaagacaccttggttggacggaaggcatgtcgtgtttggccaggtcctggaagggatggatgtcgtaagtctgatcgagtcgcaggagaccgacagaggtgaccgcccgaagaagaaagtagtcatcagcgagtgtggggagcttccagtggtctaagtgttactcatctgttgtcggtcttacctaacctcggatggatggcgatatttcccccacctgaacttgtcgtgctaccctccccctccccacccccctaccct

SEQ ID NO: 77103 - DNA, 1933 bp, Zea Mays
atttcagtttggaactgaactgggaatgacgtggccgaggacaaaagcaaattgacaccttctccgttcccgacgactcccgtgagcgtggagaggcgactaggcgaggccatggcctccggcatcggctccggccagcagcaacccccaggttcagcagttagattggatgccctagcagcgccggcggcagatgctgacccgggagccgtcggcgacaagctcgtcttcgaagcgccgcctcagcccgtgagggaggactacgtccagaacgccgtcaagtttctctcccaccccaaggtcaggggctcccccgtcgtctacaggcgatccttcctcgagaagaagggccttagcaccgaggagatcgacgaggccttccgaagggttcctgatcctcaacccagcactacggctaccacttctccgcagcagcaggtcaacagccagaatcaatccgtcggggtgcaagcttatgcgccagcacaacctgtgcacccagcaaacgctggccctgtcgtccttccaacgcagcccaggtttagctggtaccaagcattcctggctgcagggctcttgcttggttttggtgctagcgctgctgtctttatcaagaaactgttccttcctaggctcaagtcttggatccgcaatgttgtagcagaaggtaatggcactgaaggcaaccagcttaagcctaggattgatgatgaaacggctgatgctgtaaaggcttctgcttcggctgtttctgctattgccaaaacaaaccaacaactgcttgcttcaaaggatgaagaaaagaagatactagtgacgttgacacaagctctagattcccaagccaaggagttaaaatccttgaccgattcaatcggtcataccagggaacccataaatattaccagggatgataggttttctcagtaccgcccactggaagaccatgcccctactgttataaggaatggggcaattaacagttcatggagagcctctcagcaaactaacatgtatggtgtgtcaaatggcgactttggttccgcagtgaggtcttcatttgcgccagcacctgctgaacctacagctggatcattttcaagatcctatggcgagcagccgatgtccactgcacaacgaagcgataggtcttctggcagtaagccatgggagatgcattcgtattcacaacagaggcctggttatggatccaactcccagttgagtgatgatggatcatactctgatgcccaggacagctatgctccttcctatcaccagaatggaaaggcccctgattttcaagcggatgaacctaggcctttgacttacaacactggggttgaggaaagaccgccaccgcagcgccgctgggtgccccctcagcctccaggtgttgcgatgccagaagcagcagctgccatacgtcaaccaaaggcccttccaaagcagccctccagcgatgcctctgaggcagctggtgagatgcaggtgaatggttcaagtgcatcggatgctgtgactgaggttcctgttaatggtgctactgcaagcgatgctggacgcagtgagatccaagaacaatcagtggcggcctaagtgaaaccaagaccagctaagaactgggaagcaatctaagagagattcaggatctctagtacatctggggggtttgtcatacatctctgaataacgtctgtatcagaacagcggggcaaccacgccgatgggtacccgtaataatgcaataagtagcagatagtttctgcatttagattaatgctacttgtacacaggagaacatatcaataatatttttttggctgttcgattgagggtgcttaaaaagtgtgcttgtgaattgttgtattttgatcttgatcttgtgatgactagcaatcgcaatggaccaaatggagatggtcgtttgttt

SEQ ID NO: 77104 - DNA, 1934 bp, Zea Mays
atttcagtttggaactgaactgggaatgacgtggccgaggacaaaagcaaattgacaccttctccgttcccgacgactcccgtgagcgtggagaggcgactaggcgaggccatggcctccggcatcggctccggccagcagcaacccccaggtaggttcagcagttagattggatgccctagcagcgccggcggcagatgctgacccgggagccgtcggcgacaagctcgtcttcgaagcgccgcctcagcccgtgagggaggactacgtccagaacgccgtcaagtttctctcccaccccaaggtcaggggctcccccgtcgtctacaggcgatccttcctcgagaagaagggccttagcaccgaggagatcgacgaggccttccgaagggttcctgatcctcaacccagcactacggctaccacttctccgcagcagcaggtcaacagccagaatcaatccgtcggggtgcaagcttatgcgccagcacaacctgtgcacccagcaaacgctggccctgtcgtccttccaacgcagcccaggtttagctggtaccaagcattcctggctgcagggctcttgcttggttttggtgctagcgctgctgtctttatcaagaaactgttccttcctaggctcaagtcttggatccgcaatgttgtagcagaaggtaatggcactgaaggcaaccagcttaagcctaggattgatgatgaaacggctgatgctgtaaaggcttctgcttcggctgtttctgctattgccaaaacaaaccaacaactgcttgcttcaaaggatgaagaaaagaagatactagtgacgttgacacaagctctagattcccaagccaaggagttaaaatccttgaccgattcaatcggtcataccagggaacccataaatattaccagggatgataggttttctcagtaccgcccactggaagaccatgcccctactgttataaggaatggggcaattaacagttcatggagagcctctcagcaaactaacatgtatggtgtgtcaaatggcgactttggttccgtgaggtcttcatttgcgccagcacctgctgaacctacagctggatcattttcaagatcctatggcgagcagccgatgtccactgcacaacgaagcgataggtcttctggcagtaagccatgggagatgcattcgtattcacaacagaggcctggttatggatccaactcccagttgagtgatgatggatcatactctgatgcccaggacagctatgctccttcctatcaccagaatggaaaggcccctgattttcaagcggatgaacctaggcctttgacttacaacactggggttgaggaaagaccgccaccgcagcgccgctgggtgccccctcagcctccaggtgttgcgatgccagaagcagcagctgccatacgtcaaccaaaggcccttccaaagcagccctccagcgatgcctctgaggcagctggtgagatgcaggtgaatggttcaagtgcatcggatgctgtgactgaggttcctgttaatggtgctactgcaagcgatgctggacgcagtgagatccaagaacaatcagtggcggcctaagtgaaaccaagaccagctaagaactgggaagcaatctaagagagattcaggatctctagtacatctggggggtttgtcatacatctctgaataacgtctgtatcagaacagcggggcaaccacgccgatgggtacccgtaataatgcaataagtagcagatagtttctgcatttagattaatgctacttgtacacaggagaacatatcaataatatttttttggctgttcgattgagggtgcttaaaaagtgtgcttgtgaattgttgtattttgatcttgatcttgtgatgactagcaatcgcaatggaccaaatggagatggtcgtttgttt

SEQ ID NO: 77105 - DNA, 1927 bp, Zea Mays
atttcagtttggaactgaactgggaatgacgtggccgaggacaaaagcaaattgacaccttctccgttcccgacgactcccgtgagcgtggagaggcgactaggcgaggccatggcctccggcatcggctccggccagcagcaacccccagcagttagattggatgccctagcagcgccggcggcagatgctgacccgggagccgtcggcgacaagctcgtcttcgaagcgccgcctcagcccgtgagggaggactacgtccagaacgccgtcaagtttctctcccaccccaaggtcaggggctcccccgtcgtctacaggcgatccttcctcgagaagaagggccttagcaccgaggagatcgacgaggccttccgaagggttcctgatcctcaacccagcactacggctaccacttctccgcagcagcaggtcaacagccagaatcaatccgtcggggtgcaagcttatgcgccagcacaacctgtgcacccagcaaacgctggccctgtcgtccttccaacgcagcccaggtttagctggtaccaagcattcctggctgcagggctcttgcttggttttggtgctagcgctgctgtctttatcaagaaactgttccttcctaggctcaagtcttggatccgcaatgttgtagcagaaggtaatggcactgaaggcaaccagcttaagcctaggattgatgatgaaacggctgatgctgtaaaggcttctgcttcggctgtttctgctattgccaaaacaaaccaacaactgcttgcttcaaaggatgaagaaaagaagatactagtgacgttgacacaagctctagattcccaagccaaggagttaaaatccttgaccgattcaatcggtcataccagggaacccataaatattaccagggatgataggttttctcagtaccgcccactggaagaccatgcccctactgttataaggaatggggcaattaacagttcatggagagcctctcagcaaactaacatgtatggtgtgtcaaatggcgactttggttccgcagtgaggtcttcatttgcgccagcacctgctgaacctacagctggatcattttcaagatcctatggcgagcagccgatgtccactgcacaacgaagcgataggtcttctggcagtaagccatgggagatgcattcgtattcacaacagaggcctggttatggatccaactcccagttgagtgatgatggatcatactctgatgcccaggacagctatgctccttcctatcaccagaatggaaaggcccctgattttcaagcggatgaacctaggcctttgacttacaacactggggttgaggaaagaccgccaccgcagcgccgctgggtgccccctcagcctccaggtgttgcgatgccagaagcagcagctgccatacgtcaaccaaaggcccttccaaagcagccctccagcgatgcctctgaggcagctggtgagatgcaggtgaatggttcaagtgcatcggatgctgtgactgaggttcctgttaatggtgctactgcaagcgatgctggacgcagtgagatccaagaacaatcagtggcggcctaagtgaaaccaagaccagctaagaactgggaagcaatctaagagagattcaggatctctagtacatctggggggtttgtcatacatctctgaataacgtctgtatcagaacagcggggcaaccacgccgatgggtacccgtaataatgcaataagtagcagatagtttctgcatttagattaatgctacttgtacacaggagaacatatcaataatatttttttggctgttcgattgagggtgcttaaaaagtgtgcttgtgaattgttgtattttgatcttgatcttgtgatgactagcaatcgcaatggaccaaatggagatggtcgtttgttt

SEQ ID NO: 77106 - DNA, 3444 bp, Zea Mays
atttcagtttggaactgaactgggaatgacgtggccgaggacaaaagcaaattgacaccttctccgttcccgacgactcccgtgagcgtggagaggcgactaggcgaggccatggcctccggcatcggctccggccagcagcaacccccaggtaccttccgcgtcctcctcttgctgctcgattggattccaatttttagaccgaccaaactagaattaggtaggttcagcagttagattggatgccctagcagcgccggcggcagatgctgacccgggagccgtcggcgacaagctcgtcttcgaagcgccgcctcagcccgtgagggaggactacgtccagaacgccgtcaagtttctctcccaccccaaggtcaggggctcccccgtcgtctacaggcgatccttcctcgagaagaagggccttagcaccgaggagatcgacgaggccttccgaagggttcctgatcctcaacccagcactacggctaccacttctccgcagcagcaggtcaacagccagaatcaatccgtcggggtgcaagcttatgcgccagcacaacctgtgcacccagcaaacgctggccctgtcgtccttccaacgcagcccaggtttagctggtaccaagcattcctggctgcagggctcttgcttggttttggtgctagcgctgctgtctttatcaagaaactgttccttcctaggctcaagtcttggatccgcaatgttgtagcagaaggtaatggcactgaaggcaaccagcttaagcctaggattgatgatgaaacggctgatgctgtaaaggcttctgcttcggctgtttctgctattgccaaaacaaaccaacaactgcttgcttcaaaggatgaaggtttcaatctctaccgtccgtttcgctgcttctttcttgccaatggttcaactcactccaataatgtcattctgtttttgttagcagaaaagaagatactagtgacgttgacacaagctctagattcccaagccaaggagttaaaatccttgaccgattcaatcggtcataccagggaacccataaatattaccagggatgataggttttctcagtaccgcccactggaagaccatgcccctactgttataaggaatggggcaattaacagttcatggagagcctctcaggtatgcgcttataatatccacccatattcctgttccacaagcatgcacgtgctttgaattaccgtcctatttcttaccactttcccttctgtagcaaactaacatgtatggtgtgtcaaatggcgactttggttccggttcgtaccttttgtgaatatctttttccttgtttgccatacaagtctgctgttttctttttgctttacctatgttggactctgtttagcagtgaggtcttcatttgcgccagcacctgctgaacctacagctggatcattttcaagatcctatggcgaggtaagctgcttgactggtttatattgacatacccagcaaatcacaagacctgagattggtacccagtggatacctagttaaaagatgggaaactaattgacatcaatgtacatctgtcgagctagttggattcacttggtgcagtctgaattgcagtattgcacattcactttaactaaccttcgggcagctagtatttgctggcagccatccttctttcatgcttatgaacagcttacatctgaggaccagttatagaaaatatcgaatttcccaaaacagctagatatggttgtgtaccgaagggaattctttgcaaatctactataacaatccgtcgcttctgtatgtttttgtacatacattatctgaccaggatctgcaaactctggaatgattgtgtttttaatagtgtcactccttgtgtgagtgttgtagtgtggctagtggaagaagaggaactcttgtggtgtgctgcgggtgctcatcacctcgcttctctagaggccttcctgttcttgctcatggtcatgttgctagtgtcttgcatagtgtgtaatcttagtgaactgtgttgcttgtgtgtgtgtgtgtgttgtgtgcattggttcgtgtgcgtagttatgcagccgtgtcttttttctctcttcaatgaaaatgaaagctctcctgcatgtccgaggaacaactgaccattaactaataaggttataatagctgagctttaaaagatacggcattcctttcaaactaactacatagaggctcatattcttgacaaagctagttcttttagtatatattggttattacttcttctcagtatacatgttgctcaatctccaaatacatgtatttgtgatatgtacatattttgttctatggtgttctttattgatcagtcatcagttgaaaggtattcagctctaccatggtgtaaccgatttctataatcctgtggaacttctagctaaaatgctaaatatatgaacctgcattattgataaatatcttacatatttgagttcttgacaacacacgcatctataactgtaattcataacatcagctgttttgttgtcttccatttagcttataagttttcactgaaagcatgtggcctactataacttgaactactagcctgattgtatctgtgtgcttttagcagccgatgtccactgcacaacgaagcgataggtcttctggcagtaagccatgggagatgcattcgtattcacaacagaggcctggttatggatccaactcccagttgagtgatgatggatcatactctgatgcccaggacagctatgctccttcctatcaccagaatggaaaggcccctgattttcaagcggatgaacctaggcctttgacttacaacactggggttgaggaaagaccgccaccgcagcgccgctgggtgccccctcagcctccaggtgttgcgatgccagaagcagcagctgccatacgtcaaccaaaggcccttccaaagcagccctccagcgatgcctctgaggcagctggtgagatgcaggtgaatggttcaagtgcatcggatgctgtgactgaggttcctgttaatggtgctactgcaagcgatgctggacgcagtgagatccaagaacaatcagtggcggcctaagtgaaaccaagaccagctaagaactgggaagcaatctaagagagattcaggatctctagtacatctggggggtttgtcatacatctctgaataacgtctgtatcagaacagcggggcaaccacgccgatgggtacccgtaataatgcaataagtagcagatagtttctgcatttagattaatgctacttgtacacaggagaacatatcaataatatttttttggctgttcgattgagggtgcttaaaaagtgtgcttgtgaattgttgtattttgatcttgatcttgtgatgactagcaatcgcaatggaccaaatggagatggtcgtttgttt

SEQ ID NO: 77107 - DNA, 3322 bp, Zea Mays
atttcagtttggaactgaactgggaatgacgtggccgaggacaaaagcaaattgacaccttctccgttcccgacgactcccgtgagcgtggagaggcgactaggcgaggccatggcctccggcatcggctccggccagcagcaacccccaggttcagcagttagattggatgccctagcagcgccggcggcagatgctgacccgggagccgtcggcgacaagctcgtcttcgaagcgccgcctcagcccgtgagggaggactacgtccagaacgccgtcaagtttctctcccaccccaaggtcaggggctcccccgtcgtctacaggcgatccttcctcgagaagaagggccttagcaccgaggagatcgacgaggccttccgaagggttcctgatcctcaacccagcactacggctaccacttctccgcagcagcaggtcaacagccagaatcaatccgtcggggtgcaagcttatgcgccagcacaacctgtgcacccagcaaacgctggccctgtcgtccttccaacgcagcccaggtttagctggtaccaagcattcctggctgcagggctcttgcttggttttggtgctagcgctgctgtctttatcaagaaggtaatggcactgaaggcaaccagcttaagcctaggattgatgatgaaacggctgatgctgtaaaggcttctgcttcggctgtttctgctattgccaaaacaaaccaacaactgcttgcttcaaaggatgaaggtttcaatctctaccgtccgtttcgctgcttctttcttgccaatggttcaactcactccaataatgtcattctgtttttgttagcagaaaagaagatactagtgacgttgacacaagctctagattcccaagccaaggagttaaaatccttgaccgattcaatcggtcataccagggaacccataaatattaccagggatgataggttttctcagtaccgcccactggaagaccatgcccctactgttataaggaatggggcaattaacagttcatggagagcctctcaggtatgcgcttataatatccacccatattcctgttccacaagcatgcacgtgctttgaattaccgtcctatttcttaccactttcccttctgtagcaaactaacatgtatggtgtgtcaaatggcgactttggttccggttcgtaccttttgtgaatatctttttccttgtttgccatacaagtctgctgttttctttttgctttacctatgttggactctgtttagcagtgaggtcttcatttgcgccagcacctgctgaacctacagctggatcattttcaagatcctatggcgaggtaagctgcttgactggtttatattgacatacccagcaaatcacaagacctgagattggtacccagtggatacctagttaaaagatgggaaactaattgacatcaatgtacatctgtcgagctagttggattcacttggtgcagtctgaattgcagtattgcacattcactttaactaaccttcgggcagctagtatttgctggcagccatccttctttcatgcttatgaacagcttacatctgaggaccagttatagaaaatatcgaatttcccaaaacagctagatatggttgtgtaccgaagggaattctttgcaaatctactataacaatccgtcgcttctgtatgtttttgtacatacattatctgaccaggatctgcaaactctggaatgattgtgtttttaatagtgtcactccttgtgtgagtgttgtagtgtggctagtggaagaagaggaactcttgtggtgtgctgcgggtgctcatcacctcgcttctctagaggccttcctgttcttgctcatggtcatgttgctagtgtcttgcatagtgtgtaatcttagtgaactgtgttgcttgtgtgtgtgtgtgtgttgtgtgcattggttcgtgtgcgtagttatgcagccgtgtcttttttctctcttcaatgaaaatgaaagctctcctgcatgtccgaggaacaactgaccattaactaataaggttataatagctgagctttaaaagatacggcattcctttcaaactaactacatagaggctcatattcttgacaaagctagttcttttagtatatattggttattacttcttctcagtatacatgttgctcaatctccaaatacatgtatttgtgatatgtacatattttgttctatggtgttctttattgatcagtcatcagttgaaaggtattcagctctaccatggtgtaaccgatttctataatcctgtggaacttctagctaaaatgctaaatatatgaacctgcattattgataaatatcttacatatttgagttcttgacaacacacgcatctataactgtaattcataacatcagctgttttgttgtcttccatttagcttataagttttcactgaaagcatgtggcctactataacttgaactactagcctgattgtatctgtgtgcttttagcagccgatgtccactgcacaacgaagcgataggtcttctggcagtaagccatgggagatgcattcgtattcacaacagaggcctggttatggatccaactcccagttgagtgatgatggatcatactctgatgcccaggacagctatgctccttcctatcaccagaatggaaaggcccctgattttcaagcggatgaacctaggcctttgacttacaacactggggttgaggaaagaccgccaccgcagcgccgctgggtgccccctcagcctccaggtgttgcgatgccagaagcagcagctgccatacgtcaaccaaaggcccttccaaagcagccctccagcgatgcctctgaggcagctggtgagatgcaggtgaatggttcaagtgcatcggatgctgtgactgaggttcctgttaatggtgctactgcaagcgatgctggacgcagtgagatccaagaacaatcagtggcggcctaagtgaaaccaagaccagctaagaactgggaagcaatctaagagagattcaggatctctagtacatctggggggtttgtcatacatctctgaataacgtctgtatcagaacagcggggcaaccacgccgatgggtacccgtaataatgcaataagtagcagatagtttctgcatttagattaatgctacttgtacacaggagaacatatcaataatatttttttggctgttcgattgagggtgcttaaaaagtgtgcttgtgaattgttgtattttgatcttgatcttgtgatgactagcaatcgcaatggaccaaatggagatggtcgtttgttt

SEQ ID NO: 77108 - DNA, 1930 bp, Zea Mays
atttcagtttggaactgaactgggaatgacgtggccgaggacaaaagcaaattgacaccttctccgttcccgacgactcccgtgagcgtggagaggcgactaggcgaggccatggcctccggcatcggctccggccagcagcaacccccaggttcagcagttagattggatgccctagcagcgccggcggcagatgctgacccgggagccgtcggcgacaagctcgtcttcgaagcgccgcctcagcccgtgagggaggactacgtccagaacgccgtcaagtttctctcccaccccaaggtcaggggctcccccgtcgtctacaggcgatccttcctcgagaagaagggccttagcaccgaggagatcgacgaggccttccgaagggttcctgatcctcaacccagcactacggctaccacttctccgcagcagcaggtcaacagccagaatcaatccgtcggggtgcaagcttatgcgccagcacaacctgtgcacccagcaaacgctggccctgtcgtccttccaacgcagcccaggtttagctggtaccaagcattcctggctgcagggctcttgcttggttttggtgctagcgctgctgtctttatcaagaaactgttccttcctaggctcaagtcttggatccgcaatgttgtagcagaaggtaatggcactgaaggcaaccagcttaagcctaggattgatgatgaaacggctgatgctgtaaaggcttctgcttcggctgtttctgctattgccaaaacaaaccaacaactgcttgcttcaaaggatgaagcagaaaagaagatactagtgacgttgacacaagctctagattcccaagccaaggagttaaaatccttgaccgattcaatcggtcataccagggaacccataaatattaccagggatgataggttttctcagtaccgcccactggaagaccatgcccctactgttataaggaatggggcaattaacagttcatggagagcctctcagcaaactaacatgtatggtgtgtcaaatggcgactttggttccgtgaggtcttcatttgcgccagcacctgctgaacctacagctggatcattttcaagatcctatggcgagccgatgtccactgcacaacgaagcgataggtcttctggcagtaagccatgggagatgcattcgtattcacaacagaggcctggttatggatccaactcccagttgagtgatgatggatcatactctgatgcccaggacagctatgctccttcctatcaccagaatggaaaggcccctgattttcaagcggatgaacctaggcctttgacttacaacactggggttgaggaaagaccgccaccgcagcgccgctgggtgccccctcagcctccaggtgttgcgatgccagaagcagcagctgccatacgtcaaccaaaggcccttccaaagcagccctccagcgatgcctctgaggcagctggtgagatgcaggtgaatggttcaagtgcatcggatgctgtgactgaggttcctgttaatggtgctactgcaagcgatgctggacgcagtgagatccaagaacaatcagtggcggcctaagtgaaaccaagaccagctaagaactgggaagcaatctaagagagattcaggatctctagtacatctggggggtttgtcatacatctctgaataacgtctgtatcagaacagcggggcaaccacgccgatgggtacccgtaataatgcaataagtagcagatagtttctgcatttagattaatgctacttgtacacaggagaacatatcaataatatttttttggctgttcgattgagggtgcttaaaaagtgtgcttgtgaattgttgtattttgatcttgatcttgtgatgactagcaatcgcaatggaccaaatggagatggtcgtttgttt

SEQ ID NO: 77109 - DNA, 3292 bp, Zea Mays
atttcagtttggaactgaactgggaatgacgtggccgaggacaaaagcaaattgacaccttctccgttcccgacgactcccgtgagcgtggagaggcgactaggcgaggccatggcctccggcatcggctccggccagcagcaacccccagcgccggcggcagatgctgacccgggagccgtcggcgacaagctcgtcttcgaagcgccgcctcagcccgtgagggaggactacgtccagaacgccgtcaagtttctctcccaccccaaggtcaggggctcccccgtcgtctacaggcgatccttcctcgagaagaagggccttagcaccgaggagatcgacgaggccttccgaagggttcctgatcctcaacccagcactacggctaccacttctccgcagcagcaggtcaacagccagaatcaatccgtcggggtgcaagcttatgcgccagcacaacctgtgcacccagcaaacgctggccctgtcgtccttccaacgcagcccaggtttagctggtaccaagcattcctggctgcagggctcttgcttggttttggtgctagcgctgctgtctttatcaagaaggtaatggcactgaaggcaaccagcttaagcctaggattgatgatgaaacggctgatgctgtaaaggcttctgcttcggctgtttctgctattgccaaaacaaaccaacaactgcttgcttcaaaggatgaaggtttcaatctctaccgtccgtttcgctgcttctttcttgccaatggttcaactcactccaataatgtcattctgtttttgttagcagaaaagaagatactagtgacgttgacacaagctctagattcccaagccaaggagttaaaatccttgaccgattcaatcggtcataccagggaacccataaatattaccagggatgataggttttctcagtaccgcccactggaagaccatgcccctactgttataaggaatggggcaattaacagttcatggagagcctctcaggtatgcgcttataatatccacccatattcctgttccacaagcatgcacgtgctttgaattaccgtcctatttcttaccactttcccttctgtagcaaactaacatgtatggtgtgtcaaatggcgactttggttccggttcgtaccttttgtgaatatctttttccttgtttgccatacaagtctgctgttttctttttgctttacctatgttggactctgtttagcagtgaggtcttcatttgcgccagcacctgctgaacctacagctggatcattttcaagatcctatggcgaggtaagctgcttgactggtttatattgacatacccagcaaatcacaagacctgagattggtacccagtggatacctagttaaaagatgggaaactaattgacatcaatgtacatctgtcgagctagttggattcacttggtgcagtctgaattgcagtattgcacattcactttaactaaccttcgggcagctagtatttgctggcagccatccttctttcatgcttatgaacagcttacatctgaggaccagttatagaaaatatcgaatttcccaaaacagctagatatggttgtgtaccgaagggaattctttgcaaatctactataacaatccgtcgcttctgtatgtttttgtacatacattatctgaccaggatctgcaaactctggaatgattgtgtttttaatagtgtcactccttgtgtgagtgttgtagtgtggctagtggaagaagaggaactcttgtggtgtgctgcgggtgctcatcacctcgcttctctagaggccttcctgttcttgctcatggtcatgttgctagtgtcttgcatagtgtgtaatcttagtgaactgtgttgcttgtgtgtgtgtgtgtgttgtgtgcattggttcgtgtgcgtagttatgcagccgtgtcttttttctctcttcaatgaaaatgaaagctctcctgcatgtccgaggaacaactgaccattaactaataaggttataatagctgagctttaaaagatacggcattcctttcaaactaactacatagaggctcatattcttgacaaagctagttcttttagtatatattggttattacttcttctcagtatacatgttgctcaatctccaaatacatgtatttgtgatatgtacatattttgttctatggtgttctttattgatcagtcatcagttgaaaggtattcagctctaccatggtgtaaccgatttctataatcctgtggaacttctagctaaaatgctaaatatatgaacctgcattattgataaatatcttacatatttgagttcttgacaacacacgcatctataactgtaattcataacatcagctgttttgttgtcttccatttagcttataagttttcactgaaagcatgtggcctactataacttgaactactagcctgattgtatctgtgtgcttttagcagccgatgtccactgcacaacgaagcgataggtcttctggcagtaagccatgggagatgcattcgtattcacaacagaggcctggttatggatccaactcccagttgagtgatgatggatcatactctgatgcccaggacagctatgctccttcctatcaccagaatggaaaggcccctgattttcaagcggatgaacctaggcctttgacttacaacactggggttgaggaaagaccgccaccgcagcgccgctgggtgccccctcagcctccaggtgttgcgatgccagaagcagcagctgccatacgtcaaccaaaggcccttccaaagcagccctccagcgatgcctctgaggcagctggtgagatgcaggtgaatggttcaagtgcatcggatgctgtgactgaggttcctgttaatggtgctactgcaagcgatgctggacgcagtgagatccaagaacaatcagtggcggcctaagtgaaaccaagaccagctaagaactgggaagcaatctaagagagattcaggatctctagtacatctggggggtttgtcatacatctctgaataacgtctgtatcagaacagcggggcaaccacgccgatgggtacccgtaataatgcaataagtagcagatagtttctgcatttagattaatgctacttgtacacaggagaacatatcaataatatttttttggctgttcgattgagggtgcttaaaaagtgtgcttgtgaattgttgtattttgatcttgatcttgtgatgactagcaatcgcaatggaccaaatggagatggtcgtttgttt

SEQ ID NO: 77110 - DNA, 1907 bp, Zea Mays
tggagtccctatttcagtttggaactgaactgggaatgacgtggccgaggacaaaagcaaattgacaccttctccgttcccgacgactcccgtgagcgtggagaggcgactaggcgaggccatggcctccggcatcggctccggccagcagcaacccccagcgccggcggcagatgctgacccgggagccgtcggcgacaagctcgtcttcgaagcgccgcctcagcccgtgagggaggactacgtccagaacgccgtcaagtttctctcccaccccaaggtcaggggctcccccgtcgtctacaggcgatccttcctcgagaagaagggccttagcaccgaggagatcgacgaggccttccgaagggttcctgatcctcaacccagcactacggctaccacttctccgcagcagcaggtcaacagccagaatcaatccgtcggggtgcaagcttatgcgccagcacaacctgtgcacccagcaaacgctggccctgtcgtccttccaacgcagcccaggtttagctggtaccaagcattcctggctgcagggctcttgcttggttttggtgctagcgctgctgtctttatcaagaaactgttccttcctaggctcaagtcttggatccgcaatgttgtagcagaaggtaatggcactgaaggcaaccagcttaagcctaggattgatgatgaaacggctgatgctgtaaaggcttctgcttcggctgtttctgctattgccaaaacaaaccaacaactgcttgcttcaaaggatgaagaaaagaagatactagtgacgttgacacaagctctagattcccaagccaaggagttaaaatccttgaccgattcaatcggtcataccagggaacccataaatattaccagggatgataggttttctcagtaccgcccactggaagaccatgcccctactgttataaggaatggggcaattaacagttcatggagagcctctcagcaaactaacatgtatggtgtgtcaaatggcgactttggttccgtgaggtcttcatttgcgccagcacctgctgaacctacagctggatcattttcaagatcctatggcgagccgatgtccactgcacaacgaagcgataggtcttctggcagtaagccatgggagatgcattcgtattcacaacagaggcctggttatggatccaactcccagttgagtgatgatggatcatactctgatgcccaggacagctatgctccttcctatcaccagaatggaaaggcccctgattttcaagcggatgaacctaggcctttgacttacaacactggggttgaggaaagaccgccaccgcagcgccgctgggtgccccctcagcctccaggtgttgcgatgccagaagcagcagctgccatacgtcaaccaaaggcccttccaaagcagccctccagcgatgcctctgaggcagctggtgagatgcaggtgaatggttcaagtgcatcggatgctgtgactgaggttcctgttaatggtgctactgcaagcgatgctggacgcagtgagatccaagaacaatcagtggcggcctaagtgaaaccaagaccagctaagaactgggaagcaatctaagagagattcaggatctctagtacatctggggggtttgtcatacatctctgaataacgtctgtatcagaacagcggggcaaccacgccgatgggtacccgtaataatgcaataagtagcagatagtttctgcatttagattaatgctacttgtacacaggagaacatatcaataatatttttttggctgttcgattgagggtgcttaaaaagtgtgcttgtgaattgttgtattttgatcttgatcttgtgatgactagcaatcgcaatggaccaaatggagatggtcgtttgttt

SEQ ID NO: 77111 - DNA, 1950 bp, Zea Mays
gttttggagtccctatttcagtttggaactgaactgggaatgacgtggccgaggacaaaagcaaattgacaccttctccgttcccgacgactcccgtgagcgtggagaggcgactaggcgaggccatggcctccggcatcggctccggccagcagcaacccccaggttcagcagttagattggatgccctagcagcgccggcggcagatgctgacccgggagccgtcggcgacaagctcgtcttcgaagcgccgcctcagcccgtgagggaggactacgtccagaacgccgtcaagtttctctcccaccccaaggtcaggggctcccccgtcgtctacaggcgatccttcctcgagaagaagggccttagcaccgaggagatcgacgaggccttccgaagggttcctgatcctcaacccagcactacggctaccacttctccgcagcagcaggtcaacagccagaatcaatccgtcggggtgcaagcttatgcgccagcacaacctgtgcacccagcaaacgctggccctgtcgtccttccaacgcagcccaggtttagctggtaccaagcattcctggctgcagggctcttgcttggttttggtgctagcgctgctgtctttatcaagaaactgttccttcctaggctcaagtcttggatccgcaatgttgtagcagaaggtaatggcactgaaggcaaccagcttaagcctaggattgatgatgaaacggctgatgctgtaaaggcttctgcttcggctgtttctgctattgccaaaacaaaccaacaactgcttgcttcaaaggatgaagcagaaaagaagatactagtgacgttgacacaagctctagattcccaagccaaggagttaaaatccttgaccgattcaatcggtcataccagggaacccataaatattaccagggatgataggttttctcagtaccgcccactggaagaccatgcccctactgttataaggaatggggcaattaacagttcatggagagcctctcagcaaactaacatgtatggtgtgtcaaatggcgactttggttccgcagtgaggtcttcatttgcgccagcacctgctgaacctacagctggatcattttcaagatcctatggcgagcagccgatgtccactgcacaacgaagcgataggtcttctggcagtaagccatgggagatgcattcgtattcacaacagaggcctggttatggatccaactcccagttgagtgatgatggatcatactctgatgcccaggacagctatgctccttcctatcaccagaatggaaaggcccctgattttcaagcggatgaacctaggcctttgacttacaacactggggttgaggaaagaccgccaccgcagcgccgctgggtgccccctcagcctccaggtgttgcgatgccagaagcagcagctgccatacgtcaaccaaaggcccttccaaagcagccctccagcgatgcctctgaggcagctggtgagatgcaggtgaatggttcaagtgcatcggatgctgtgactgaggttcctgttaatggtgctactgcaagcgatgctggacgcagtgagatccaagaacaatcagtggcggcctaagtgaaaccaagaccagctaagaactgggaagcaatctaagagagattcaggatctctagtacatctggggggtttgtcatacatctctgaataacgtctgtatcagaacagcggggcaaccacgccgatgggtacccgtaataatgcaataagtagcagatagtttctgcatttagattaatgctacttgtacacaggagaacatatcaataatatttttttggctgttcgattgagggtgcttaaaaagtgtgcttgtgaattgttgtattttgatcttgatcttgtgatgactagcaatcgcaatggaccaaatggagatggtcgtttgttt

SEQ ID NO: 77112 - DNA, 1917 bp, Zea Mays
gttttggagtccctatttcagtttggaactgaactgggaatgacgtggccgaggacaaaagcaaattgacaccttctccgttcccgacgactcccgtgagcgtggagaggcgactaggcgaggccatggcctccggcatcggctccggccagcagcaacccccagcgccggcggcagatgctgacccgggagccgtcggcgacaagctcgtcttcgaagcgccgcctcagcccgtgagggaggactacgtccagaacgccgtcaagtttctctcccaccccaaggtcaggggctcccccgtcgtctacaggcgatccttcctcgagaagaagggccttagcaccgaggagatcgacgaggccttccgaagggttcctgatcctcaacccagcactacggctaccacttctccgcagcagcaggtcaacagccagaatcaatccgtcggggtgcaagcttatgcgccagcacaacctgtgcacccagcaaacgctggccctgtcgtccttccaacgcagcccaggtttagctggtaccaagcattcctggctgcagggctcttgcttggttttggtgctagcgctgctgtctttatcaagaaactgttccttcctaggctcaagtcttggatccgcaatgttgtagcagaaggtaatggcactgaaggcaaccagcttaagcctaggattgatgatgaaacggctgatgctgtaaaggcttctgcttcggctgtttctgctattgccaaaacaaaccaacaactgcttgcttcaaaggatgaagaaaagaagatactagtgacgttgacacaagctctagattcccaagccaaggagttaaaatccttgaccgattcaatcggtcataccagggaacccataaatattaccagggatgataggttttctcagtaccgcccactggaagaccatgcccctactgttataaggaatggggcaattaacagttcatggagagcctctcagcaaactaacatgtatggtgtgtcaaatggcgactttggttccgcagtgaggtcttcatttgcgccagcacctgctgaacctacagctggatcattttcaagatcctatggcgagcagccgatgtccactgcacaacgaagcgataggtcttctggcagtaagccatgggagatgcattcgtattcacaacagaggcctggttatggatccaactcccagttgagtgatgatggatcatactctgatgcccaggacagctatgctccttcctatcaccagaatggaaaggcccctgattttcaagcggatgaacctaggcctttgacttacaacactggggttgaggaaagaccgccaccgcagcgccgctgggtgccccctcagcctccaggtgttgcgatgccagaagcagcagctgccatacgtcaaccaaaggcccttccaaagcagccctccagcgatgcctctgaggcagctggtgagatgcaggtgaatggttcaagtgcatcggatgctgtgactgaggttcctgttaatggtgctactgcaagcgatgctggacgcagtgagatccaagaacaatcagtggcggcctaagtgaaaccaagaccagctaagaactgggaagcaatctaagagagattcaggatctctagtacatctggggggtttgtcatacatctctgaataacgtctgtatcagaacagcggggcaaccacgccgatgggtacccgtaataatgcaataagtagcagatagtttctgcatttagattaatgctacttgtacacaggagaacatatcaataatatttttttggctgttcgattgagggtgcttaaaaagtgtgcttgtgaattgttgtattttgatcttgatcttgtgatgactagcaatcgcaatggaccaaatggagatggtcgtttgttt

SEQ ID NO: 77113 - DNA, 1947 bp, Zea Mays
gttttggagtccctatttcagtttggaactgaactgggaatgacgtggccgaggacaaaagcaaattgacaccttctccgttcccgacgactcccgtgagcgtggagaggcgactaggcgaggccatggcctccggcatcggctccggccagcagcaacccccaggttcagcagttagattggatgccctagcagcgccggcggcagatgctgacccgggagccgtcggcgacaagctcgtcttcgaagcgccgcctcagcccgtgagggaggactacgtccagaacgccgtcaagtttctctcccaccccaaggtcaggggctcccccgtcgtctacaggcgatccttcctcgagaagaagggccttagcaccgaggagatcgacgaggccttccgaagggttcctgatcctcaacccagcactacggctaccacttctccgcagcagcaggtcaacagccagaatcaatccgtcggggtgcaagcttatgcgccagcacaacctgtgcacccagcaaacgctggccctgtcgtccttccaacgcagcccaggtttagctggtaccaagcattcctggctgcagggctcttgcttggttttggtgctagcgctgctgtctttatcaagaaactgttccttcctaggctcaagtcttggatccgcaatgttgtagcagaaggtaatggcactgaaggcaaccagcttaagcctaggattgatgatgaaacggctgatgctgtaaaggcttctgcttcggctgtttctgctattgccaaaacaaaccaacaactgcttgcttcaaaggatgaagcagaaaagaagatactagtgacgttgacacaagctctagattcccaagccaaggagttaaaatccttgaccgattcaatcggtcataccagggaacccataaatattaccagggatgataggttttctcagtaccgcccactggaagaccatgcccctactgttataaggaatggggcaattaacagttcatggagagcctctcagcaaactaacatgtatggtgtgtcaaatggcgactttggttccgtgaggtcttcatttgcgccagcacctgctgaacctacagctggatcattttcaagatcctatggcgagcagccgatgtccactgcacaacgaagcgataggtcttctggcagtaagccatgggagatgcattcgtattcacaacagaggcctggttatggatccaactcccagttgagtgatgatggatcatactctgatgcccaggacagctatgctccttcctatcaccagaatggaaaggcccctgattttcaagcggatgaacctaggcctttgacttacaacactggggttgaggaaagaccgccaccgcagcgccgctgggtgccccctcagcctccaggtgttgcgatgccagaagcagcagctgccatacgtcaaccaaaggcccttccaaagcagccctccagcgatgcctctgaggcagctggtgagatgcaggtgaatggttcaagtgcatcggatgctgtgactgaggttcctgttaatggtgctactgcaagcgatgctggacgcagtgagatccaagaacaatcagtggcggcctaagtgaaaccaagaccagctaagaactgggaagcaatctaagagagattcaggatctctagtacatctggggggtttgtcatacatctctgaataacgtctgtatcagaacagcggggcaaccacgccgatgggtacccgtaataatgcaataagtagcagatagtttctgcatttagattaatgctacttgtacacaggagaacatatcaataatatttttttggctgttcgattgagggtgcttaaaaagtgtgcttgtgaattgttgtattttgatcttgatcttgtgatgactagcaatcgcaatggaccaaatggagatggtcgtttgttt

SEQ ID NO: 77114 - DNA, 1944 bp, Zea Mays
gttttggagtccctatttcagtttggaactgaactgggaatgacgtggccgaggacaaaagcaaattgacaccttctccgttcccgacgactcccgtgagcgtggagaggcgactaggcgaggccatggcctccggcatcggctccggccagcagcaacccccaggttcagcagttagattggatgccctagcagcgccggcggcagatgctgacccgggagccgtcggcgacaagctcgtcttcgaagcgccgcctcagcccgtgagggaggactacgtccagaacgccgtcaagtttctctcccaccccaaggtcaggggctcccccgtcgtctacaggcgatccttcctcgagaagaagggccttagcaccgaggagatcgacgaggccttccgaagggttcctgatcctcaacccagcactacggctaccacttctccgcagcagcaggtcaacagccagaatcaatccgtcggggtgcaagcttatgcgccagcacaacctgtgcacccagcaaacgctggccctgtcgtccttccaacgcagcccaggtttagctggtaccaagcattcctggctgcagggctcttgcttggttttggtgctagcgctgctgtctttatcaagaaactgttccttcctaggctcaagtcttggatccgcaatgttgtagcagaaggtaatggcactgaaggcaaccagcttaagcctaggattgatgatgaaacggctgatgctgtaaaggcttctgcttcggctgtttctgctattgccaaaacaaaccaacaactgcttgcttcaaaggatgaagaaaagaagatactagtgacgttgacacaagctctagattcccaagccaaggagttaaaatccttgaccgattcaatcggtcataccagggaacccataaatattaccagggatgataggttttctcagtaccgcccactggaagaccatgcccctactgttataaggaatggggcaattaacagttcatggagagcctctcagcaaactaacatgtatggtgtgtcaaatggcgactttggttccgtgaggtcttcatttgcgccagcacctgctgaacctacagctggatcattttcaagatcctatggcgagcagccgatgtccactgcacaacgaagcgataggtcttctggcagtaagccatgggagatgcattcgtattcacaacagaggcctggttatggatccaactcccagttgagtgatgatggatcatactctgatgcccaggacagctatgctccttcctatcaccagaatggaaaggcccctgattttcaagcggatgaacctaggcctttgacttacaacactggggttgaggaaagaccgccaccgcagcgccgctgggtgccccctcagcctccaggtgttgcgatgccagaagcagcagctgccatacgtcaaccaaaggcccttccaaagcagccctccagcgatgcctctgaggcagctggtgagatgcaggtgaatggttcaagtgcatcggatgctgtgactgaggttcctgttaatggtgctactgcaagcgatgctggacgcagtgagatccaagaacaatcagtggcggcctaagtgaaaccaagaccagctaagaactgggaagcaatctaagagagattcaggatctctagtacatctggggggtttgtcatacatctctgaataacgtctgtatcagaacagcggggcaaccacgccgatgggtacccgtaataatgcaataagtagcagatagtttctgcatttagattaatgctacttgtacacaggagaacatatcaataatatttttttggctgttcgattgagggtgcttaaaaagtgtgcttgtgaattgttgtattttgatcttgatcttgtgatgactagcaatcgcaatggaccaaatggagatggtcgtttgttt

SEQ ID NO: 77115 - DNA, 1920 bp, Zea Mays
gttttggagtccctatttcagtttggaactgaactgggaatgacgtggccgaggacaaaagcaaattgacaccttctccgttcccgacgactcccgtgagcgtggagaggcgactaggcgaggccatggcctccggcatcggctccggccagcagcaacccccagcgccggcggcagatgctgacccgggagccgtcggcgacaagctcgtcttcgaagcgccgcctcagcccgtgagggaggactacgtccagaacgccgtcaagtttctctcccaccccaaggtcaggggctcccccgtcgtctacaggcgatccttcctcgagaagaagggccttagcaccgaggagatcgacgaggccttccgaagggttcctgatcctcaacccagcactacggctaccacttctccgcagcagcaggtcaacagccagaatcaatccgtcggggtgcaagcttatgcgccagcacaacctgtgcacccagcaaacgctggccctgtcgtccttccaacgcagcccaggtttagctggtaccaagcattcctggctgcagggctcttgcttggttttggtgctagcgctgctgtctttatcaagaaactgttccttcctaggctcaagtcttggatccgcaatgttgtagcagaaggtaatggcactgaaggcaaccagcttaagcctaggattgatgatgaaacggctgatgctgtaaaggcttctgcttcggctgtttctgctattgccaaaacaaaccaacaactgcttgcttcaaaggatgaagcagaaaagaagatactagtgacgttgacacaagctctagattcccaagccaaggagttaaaatccttgaccgattcaatcggtcataccagggaacccataaatattaccagggatgataggttttctcagtaccgcccactggaagaccatgcccctactgttataaggaatggggcaattaacagttcatggagagcctctcagcaaactaacatgtatggtgtgtcaaatggcgactttggttccgcagtgaggtcttcatttgcgccagcacctgctgaacctacagctggatcattttcaagatcctatggcgagcagccgatgtccactgcacaacgaagcgataggtcttctggcagtaagccatgggagatgcattcgtattcacaacagaggcctggttatggatccaactcccagttgagtgatgatggatcatactctgatgcccaggacagctatgctccttcctatcaccagaatggaaaggcccctgattttcaagcggatgaacctaggcctttgacttacaacactggggttgaggaaagaccgccaccgcagcgccgctgggtgccccctcagcctccaggtgttgcgatgccagaagcagcagctgccatacgtcaaccaaaggcccttccaaagcagccctccagcgatgcctctgaggcagctggtgagatgcaggtgaatggttcaagtgcatcggatgctgtgactgaggttcctgttaatggtgctactgcaagcgatgctggacgcagtgagatccaagaacaatcagtggcggcctaagtgaaaccaagaccagctaagaactgggaagcaatctaagagagattcaggatctctagtacatctggggggtttgtcatacatctctgaataacgtctgtatcagaacagcggggcaaccacgccgatgggtacccgtaataatgcaataagtagcagatagtttctgcatttagattaatgctacttgtacacaggagaacatatcaataatatttttttggctgttcgattgagggtgcttaaaaagtgtgcttgtgaattgttgtattttgatcttgatcttgtgatgactagcaatcgcaatggaccaaatggagatggtcgtttgttt

SEQ ID NO: 77116 - DNA, 1280 bp, Zea Mays
catagaaaacggcacagagatcaacaatatattgactggaagatgacatcatgtgtggttacataaggcttgtgcaaaaaacaagatcatcacataatgtcgcactaatcaacagttcagcacagctacttactgttaacccgtgcccccatgtgtggttaggaggtgagcctagtttgtccttactctctttcgctatggcagatccatcaccaccatatacaaggaaaaaaatactgaagagccacaacgaggacatgccattttcatagggaaacgaacggtaatggagatataagaaaaagttaaaaagaacaggtcatgctagtagtgttctcttatgagcctaacggtactacacttcatagaatatacaggtcatttgcaagcccaaggcagcgactgcaatgcgaatacacagaacccaatctgtcaagcagttgctgaaaggttccattccaacatcttccttacaaaccaggtgcactacattagatgtgcctaaactgctgtccagggacagaaaaggctttcgattgctggggcattccttctatcatggttaactgccttctcagcttggctatgtgaacctgaacctagaggaagaaaagaatccaatgtcaaatcgttggacgtggtattctttcccctcatttccattatttatgttcattcaaacagaataaggagaacagcatagaaactgctttgagtaactcaggaaaactaaataagggcttgtttgtttcagcttatagattacataatctggattataatctaaattatataatctagattataatctagacatattataatctatatgtagttgtttggtagtctagattatacaaatgtagattattcataaagacaacaatacccttatttgtttatttgaggtgaggaaagaaggatggcatatattgtaatttatatttacataatcatgggtagtgggtcttttgccaaaataatctcaaataagctactcttgaggagattatgagattatcataatctaagctttagattatataatctgaaccaataatctagatgtttgtttacctgttggatttttgcgctggattatataatctagagagattataatccgaaacaaacagggcctaagtagatgaaggcggtgaatctacatcaacactagcacccacccaatgtgaattgtttgctcacaatagtgcaacatgcatattagaacgaacagtaataaagtaggcactgggagttttctgccatctatgaggaaa

SEQ ID NO: 77117 - DNA, 790 bp, Zea Mays
gacgcattacgcgacgctacagaacacgtcgtccgaaaccgacggctgctgctcaaatttgtcaaagcctcaaaggtcgtctgctgcagatgaccgtgtctgcataacgatatggccaggcttatcagccaattggaaaggcaaacaccaagcaacatgtttttttacagaaaattcaactactacgtattatacatctaaaaagatttcagaatgaaacatgagatgtttgcagcaccacggcactccaggttccatagcccataatccatctagaacgagcgaccgacagcaaccactagattcctggcccaatgaccacattgaactcctcactgtcacagctaaagtacgatgcgccttatcttcgcccaaaactgggttgaagggtatatcctgcgcttttcctacttcctattgtctatctacttgtttcatgaaaggcttggaatgactgggtatataacccttcacaggtcctactaatgacatggcttcttgtagagcctccagtagatgatcaggatgatcctcgatgtgcacacggccaaactgttctggtattttgcgcaaaacccgtccaacgatctgcgatgtgcacagggaaaagaattattcttaaaacattgcatagatgcactgatgtacaagcacatgtgagcaccatgttttcagtaagagctgaattaatagtaaataaaagaaacaaaatccacaaatacgaaagcagatgccacaccatcaacaggtataggggaagttactagctttggtgcagctaatgaccagc

SEQ ID NO: 77118 - DNA, 270 bp, Zea Mays
aaaaatagctataaaaaagaggaagagcgtggcggtgaggcggcgacgacggggagggaggaggaggcgctgtcggaggcctcgtcgatcggcgcggcgtcgtccgacagctcctccatcggcgagaactccgcgtccgacaaggagggcagcgacgggaggaggaggtggtggaaggcaaggcgcaaggcctcggcatgatgccctgctccagtccttggacgatgccctgcccatcaaggtacgcagccatggtttttcttgaggcag

SEQ ID NO: 77119 - DNA, 596 bp, Zea Mays
gaaaaattccccaaccaattccataaaaccaacaagcgccccctcgaaggttccacaaaccaactcaatgaccttgagcatcaagcagaaccaaactaattgctccacaaacaatgcctgccaacattcattgtgcagcacctcactgctgcttgcactctgcaggtcgttcgccctgctgcccttcccctccggcagttcccttggtctttgaatcgtaatcatcatcatcatcatcatcctcgtcatcttcgtcttcatcatcattgtcttcatcatcgtcatcctcaccatccataacttcaaactcctcatcttgagcagcctctccagtgaaccacgagacagcatgtgggataatcttgtctctgatggtagatctggcagatacagaaaggatagtttagaagtaataaacaaactcttaatcttggtgcatcaacagattgatcaaatcccctgatcacaaaaacataatctgtaacaagacggcaaccactataatacataacacgtaacaacatacccaatatcataatcttgttccatttcgttctgcaactgttcagcctattgaaaagggaaaaccaaatcaa

SEQ ID NO: 77120 - DNA, 1932 bp, Zea Mays
ccagtcccaggcagccagcgcaggaagctcaccgggaagccggtgcaatcacacaccacacatccccgctacaaatcccagcccccggtcgacatccctcccactcctcccccatgcgcaccggcaccggcaccggcagctcaccgatccccggagccgctactataagtacaaagcttccccggcggcggtccacccggccatggcggcagtcggagcgcgcccagtgctgtaccaccaccacccccacccggcgccggcgggcggcgcccccgcccccatgtcctcttcctacttctcccgcggcggaggcagctccagccccgcgtccagcctctccgccgcgcacttggacatatccgagttcctcttcgacgacgcctccgtcgtcgtgccgccggacgccagtggtggcggtgcgatcagcgcaggcggcgctgggagcgcggcggcgccggagcggccgcgcacggaccggatcgcgttccggacgaggtcggaggtcgaggtcctggacgacggctacaagtggaggaagtacggcaagaagtccgtcaagaacagccccaacccaaggaactactaccggtgctcgacggaagggtgcaacgtgaagaagcgggtggagcgggacagggacgaccccggctacgtggtcaccacgtacgaggggacgcacaaccacgccagccccagcacggtgtactacgccagccaggacgccgcctccggccgcttcttcgtcgccggcacgcagccgccggggccggggctgtaataagatgtacagactctgtcccaatggatgttggacccgattcttagttacatcttgtatgcagtgcaggtgtggctgaacgctccccaggcaggaggcatcagtcgcagcccttggctacgccggccgtgccaccaggccctagccatgtttgcagactccgcatgggtaggcactgaagcaaactagtagacctttttggctcttgtacacaaactgaactatatgaaactttggtactacttttttttccctgtcaaatataccccctccggccttccattcatcaggtatgtttgtatgagattgcaagcccagtgtgtgtgtgtgtgtgtgtgggagttacaatatacacgctgacacaccaacaccaaactacacactggaccctggagtacaaaactgtcatctgatacagcgatgggtagagaggccttgaatcatgaaggttacagcgcgttaattttagtgatcgtctcagccgcttggctctttacaagctcgactatcatacagcattaggggcatactaagtgccagggggggctcacggtagagatgccgattggagagatttttagccaacagaaacaagagcggggttgagcgccataaccctccacggaaaacgcatctaccatatatacatgtacaattcttgacgcccaacggacccaaaaaaaaaactgtgggccggtcaagtctcgtgcggacgaccagctagcacctagcagcagttctttggccatgccatggtcagctcagctctactgtgatggacccagaacgcccgatgctacgagttgctcctgagcttttctttcgaggtttcaggtcaaccacgatgacggtgacgttgtcctcggtacccttcttcagcgcgaccctcacgagataatccgctgcggcttgggcagcggggtcggtggtggatccatcaccctcgtcgcacaacgaccacgatgcgccagcggcaccgttgttcttgtgccacacttggatttgccggcgcgcagctttgcatgcctcttcgttcgtcaccacatcccacagcccatcgcttgcgaggatgagacagtcgtcatctttcgccctgggaacgaccgtgacctctggttttggaatcacgaacggcttcagataccggtccccaa

SEQ ID NO: 77121 - DNA, 1974 bp, Zea Mays
ccagtcccaggcagccagcgcaggaagctcaccgggaagccggtgcaatcacacaccacacatccccgctacaaatcccagcccccggtcgacatccctcccactcctcccccatgcgcaccggcaccggcaccggcagctcaccgatccccggagccgctactataagtacaaagcttccccggcggcggtccacccggccatggcggcagtcggagcgcgcccagtgctgtaccaccaccacccccacccggcgccggcgggcggcgcccccgcccccatgtcctcttcctacttctcccgcggcggaggcagctccagccccgcgtccagcctctccgccgcgcacttggacatatccgagttcctcttcgacgacgcctccgtcgtcgtgccgccggacgccagtggtggcggtgcgatcagcgcaggcggcgctgggagcgcggcggcgccggagcggccgcgcacggaccggatcgcgttccggacgaggtcggaggtcgaggtcctggacgacggctacaagtggaggaagtacggcaagaagtccgtcaagaacagccccaacccaaggaactactaccggtgctcgacggaagggtgcaacgtgaagaagcgggtggagcgggacagggacgaccccggctacgtggtcaccacgtacgaggggacgcacaaccacgccagccccagcacggtgtactacgccagccaggacgccgcctccggccgcttcttcgtcgccggcacgcagccgccggggccggggccgggctccctcgtcaactaatattatccatcccgacggccgtgtaataagatgtacagactctgtcccaatggatgttggacccgattcttagttacatcttgtatgcagtgcaggtgtggctgaacgctccccaggcaggaggcatcagtcgcagcccttggctacgccggccgtgccaccaggccctagccatgtttgcagactccgcatgggtaggcactgaagcaaactagtagacctttttggctcttgtacacaaactgaactatatgaaactttggtactacttttttttccctgtcaaatataccccctccggccttccattcatcaggtatgtttgtatgagattgcaagcccagtgtgtgtgtgtgtgtgtgtgggagttacaatatacacgctgacacaccaacaccaaactacacactggaccctggagtacaaaactgtcatctgatacagcgatgggtagagaggccttgaatcatgaaggttacagcgcgttaattttagtgatcgtctcagccgcttggctctttacaagctcgactatcatacagcattaggggcatactaagtgccagggggggctcacggtagagatgccgattggagagatttttagccaacagaaacaagagcggggttgagcgccataaccctccacggaaaacgcatctaccatatatacatgtacaattcttgacgcccaacggacccaaaaaaaaaactgtgggccggtcaagtctcgtgcggacgaccagctagcacctagcagcagttctttggccatgccatggtcagctcagctctactgtgatggacccagaacgcccgatgctacgagttgctcctgagcttttctttcgaggtttcaggtcaaccacgatgacggtgacgttgtcctcggtacccttcttcagcgcgaccctcacgagataatccgctgcggcttgggcagcggggtcggtggtggatccatcaccctcgtcgcacaacgaccacgatgcgccagcggcaccgttgttcttgtgccacacttggatttgccggcgcgcagctttgcatgcctcttcgttcgtcaccacatcccacagcccatcgcttgcgaggatgagacagtcgtcatctttcgccctgggaacgaccgtgacctctggttttggaatcacgaacggcttcagataccggtccccttt

SEQ ID NO: 77122 - DNA, 1584 bp, Zea Mays
tcgacatccctcccactcctcccccatgcgcaccggcaccggcaccggcagctcaccgatccccggagccgctactataagtacaaagcttccccggcggcggtccacccggccatggcggcagtcggagcgcgcccagtgctgtaccaccaccacccccacccggcgccggcgggcggcgcccccgcccccatgtcctcttcctacttctcccgcggcggaggcagctccagccccgcgtccagcctctccgccgcgcacttggacatatccgagttcctcttcgacgacgcctccgtcgtcgtgccgccggacgccagtggtggcggtgcgatcagcgcaggcggcgctgggagcgcggcggcgccggagcggccgcgcacggaccggatcgcgttccggacgaggtcggaggtcgaggtcctggacgacggctacaagtggaggaagtacggcaagaagtccgtcaagaacagccccaacccaaggaactactaccggtgctcgacggaagggtgcaacgtgaagaagcgggtggagcgggacagggacgaccccggctacgtggtcaccacgtacgaggggacgcacaaccacgccagccccagcacggtgtactacgccagccaggacgccgcctccggccgcttcttcgtcgccggcacgcagccgccggggccggggccgggctccctcgtcaactaatattatccatcccgacggccgtgtaataagatgtacagactctgtcccaatggatgttggacccgattcttagttacatcttgtatgcagtgcaggtgtggctgaacgctccccaggcaggaggcatcagtcgcagcccttggctacgccggccgtgccaccaggccctagccatgtttgcagactccgcatgggtcaaccacgatgacggtgacgttgtcctcggtacccttcttcagcgcgaccctcacgagataatccgctgcggcttgggcagcggggtcggtggtggatccatcaccctcgtcgcacaacgaccacgatgcgccagcggcaccgttgttcttgtgccacacttggatttgccggcgcgcagctttgcatgcctcttcgttcgtcaccacatcccacagcccatcgcttgcgaggatgagacagtcgtcatctttcgccctgggaacgaccgtgacctctggttttggaatcacgaacggcttcagataccggtcccctgcagcgagtgtttccaacttcgagttagcaaaaaaaaaaggtgacggagaattggacaaatgctacccaattccaacccacagagaagtcagctgaactgctggttcaactaaattttctagtgaaattgggggaaacaatattgtccgggagttttaacatgatggcgtatgtgtatctgatctgaagatggcgatgaatgtgagcatttccagacaagatacattgatggttaggcatggtccaagctgcaagtgccacttgcaggaaccatgccatgaggtacctttgccgtgtcgattaaagttgtcttttctacttccgacaagttcatttctgttggggtcgtgcttcggtacgtcgaag

SEQ ID NO: 77123 - DNA, 1335 bp, Zea Mays
ccgactcgacccttctcctctccgtcgcatttcccgtccggtctttccgttacccggcggctttaaaccctagttcccattccatcttcgtttccgctccgccgccgtcgatggagttctggggtctcgaggtcaaacctggatccactgtcaagtgtgagcctggacatggctttatcctgcacgtttcccaggctgcccttggggaatcaaagaaaagtgacagtgccttaatgtatgtcaaagttgatgacaagaagcttgccattggaacgctctctatcgacaaatacccacagatacaattcgatttggttttcaataaagagtttgagctgtcacacacatcgaaaactaccagtgtatttttctctggttacaaggttgagcagccaattgagggagatgaaatggatcttgattctgaggatgaagaggaggagctaaacattccagtaatcaaggaaaatggcaaagctgatgggaaggaggagcagaaaaatcaagagaaggcagtagctgctacagcttcaaaatcaagtcttggccttgaaaagaaaagcaaggatgactctgatgattctgatgaggatgagtctgatgattctgatgaggatgattctgatgattctgatgaaggcgagggattatctcctgacgaaggcgatgatgattcaagtgatgaggatgataccagtgatgatgacgaggaagaaaccccaactcctaaaaagccagaggcaggcaagaagagaggtgctgaaaatgctctgaaaacgcctctttctgataagaaagcaaaggttgccacaccgccagcccagaaaacaggtggcaagaagggtgccacccatgtggcaactccacacccagcaaaaggcaagacccctgcaaacaatgacaaatcaacggagaagtctccaaaatctggacattcaatagtgagatggctctgcaggctcactccaaggcgaagcatggggccaaatgagttgcaggtccaactgagtccatgaaggagaagcatggtggccaagtgagtcgaaggtccattcgagtccatgaaggtgaagcatgggagatccaagcgagtctggaaagattgtcgatgttagtaggctgtccttattttgtttagagacttgtggctatgtgattgatgtagcgaaacaaggctgtgatgtgttaactctgccttataatattttggttgaacgtgctcgattgttgtgctttgaattggtgctttttttttgctatatggtgaggtctcgtatggattcttatgcggtagtggcactgtagtttgtcgcactggttttgtttgaacctgtg

SEQ ID NO: 77124 - DNA, 1360 bp, Zea Mays
ccgactcgacccttctcctctccgtcgcatttcccgtccggtctttccgttacccggcggctttaaaccctagttcccattccatcttcgtttccgctccgccgccgtcgatggagttctggggtctcgaggtcaaacctggatccactgtcaagtgtgagcctggacatggctttatcctgcacgtttcccaggctgcccttggggaatcaaagaaaagtgacagtgccttaatgtatgtcaaagttgatgacaagaagcttgccattggaacgctctctatcgacaaatacccacagatacaattcgatttggttttcaataaagagtttgagctgtcacacacatcgaaaactaccagtgtatttttctctggttacaaggttgagcagccaattgagggagatgaaatggatcttgattctgaggatgaagaggaggagctaaacattccagtaatcaaggaaaatgctgatgggaaggaggagcagaaaaatcaagagaaggcagtagctgctacagcttcaaaatcaagtcttggccttgaaaagaaaagcaaggatgactctgatgattctgatgaggatgagtctgatgattctgatgaggatgattctgatgattctgatgaaggcgagggattatctcctgacgaaggcgatgatgattcaagtgatgaggatgataccagtgatgatgacgaggaagaaaccccaactcctaaaaagccagaggcaggcaagaagagaggtgctgaaaatgctctgaaaacgcctctttctgataagaaagcaaaggttgccacaccgccagcccagaaaacaggtggcaagaagggtgccacccatgtggcaactccacacccagcaaaaggcaagacccctgcaaacaatgacaaatcaacggagaagtctccaaaatctggtgggtcagtcccttgcaaatcatgcagcaagacattcaatagtgagatggctctgcaggctcactccaaggcgaagcatggggccaaatgagttgcaggtccaactgagtccatgaaggagaagcatggtggccaagtgagtcgaaggtccattcgagtccatgaaggtgaagcatgggagatccaagcgagtctggaaagattgtcgatgttagtaggctgtccttattttgtttagagacttgtggctatgtgattgatgtagcgaaacaaggctgtgatgtgttaactctgccttataatattttggttgaacgtgctcgattgttgtgctttgaattggtgctttttttttgctatatggtgaggtctcgtatggattcttatgcggtagtggcactgtagtttgtcgcactggttttgtttgaacctgtg

SEQ ID NO: 77125 - DNA, 2690 bp, Zea Mays
cattgccatctaacccatccccgttcctaggtggcgtagggcgtagcatccatctatgttcgtcttcctcgatcctgaacgaaaaccagtagccaaccttccccgcgtgctccgtgctcattcattccccatcccgtctcctcccaaaccagaagacaaaaccctagcctcctcctccgtgtgatgggatgccgtccaaaccctacccccactccctgacctcctcttcctcctccgccgtcgcccccgcgacctggatgtccgcatccgcatggacggtgcccgagtcctgatcgccgccggtgccaccgccgtctgctgcttcgtctgcgccttctgggtcttccgttcctcttcgtcctcctcccccgcatccccaaagaagcaccaatccccttccaccaactgctgtggctgcgcctcctgcggctgccgcgacgccaagcccgccaacggcgagatggccgtgggtggggagaacaagaagaaggcgccggagccggatccgccggaggcgccctccatgatggagcagctcgtgcccgagatcaccacccacgcgctcagctacctcgactacaccagcctctgccgtctctccatgaccaactccgccatgcgccgcgcagccaacgacgacggcgcctggaaggcactctaccacaagggtactataaatcctcctaatggatggaaggcatactatgcagctacaaaagccatcattaatcttaacgcggagttctacaatatcatcagggaagggtccttgccagcaatgagtcgtttttggcttaatgcagactatgtcaagtgtattcatgcgactggggagttctgccctggcatgctttgtcgtgtcgtgcagttcagctaccagcgagttgattgagttttattctagaaccagaatcggtcgaagctcaagtcatggtgtggaagtggcaggtagctgatgctgtcgaatctggagcattcagacgcagtattataaccgaggtattgtcgcgagggacgaattccaatccaacacaacatctgtagtgcagcacaagaactgatggtttgtttttatataatattgatacatgtatcttacggaacgaggtctagtcttataataaaaacaaaaataatgggacgcgtgcctcatacatagccctttatcatatcaaacaaaggtggatagtttggtctgtccctccagccattttattgtctgtgcattaatggattggcactggcggcgagggggcggcaaggaaggctcaggcgtcatccttgtcagcgaagatgtcgaggagggcgagggtctcggcgacggagagctcgagccgaaacttgggcccgtcgtagtggtgaaggatggggcggaaggcgtcctcctccagtggatcgtagatcttccgcgttgccactcgcacctgcacatcacaaacatcatgcatgcgtcaccacttgggtaacaactacgagtactagatactccctagaggcctagatgcgatgaaacaacatgctacagctacaggttgcatcctcacgcctcttgcagttgcaccatctcgtctaaagatggcaacgggacccgttgccactcgaggaattactccattagagaactaagtttggtcgtaattttacacccacgagagacctgacgtgtcccgtaaaggttaggcggtcagccggtcactagcaacctacccaggcagaggcaggcagattggttgtttcgcacggacacggtgtttgtagacaattctttaaaaaaatgtttcttgagttgtgatccggggcctctaatcttttccagctccacacgtcgtcgcaacatgtgatgtgggaatgtgtgtgtgttttattttattttattttccgtcataattctttcttgagttgtgatcccggggcctctaatctttaccggctccacacgtcgtcgcaggcgcagcatgtgatgtgggaatgggtcgccacgctagccttttgtgattttgtctgtctgtcggtgacacacgtactgtttggtgttgttgaacttgaaccgttcaaacaagtgtaataaaagtcacgctagtggtgtggttgagctgatcgatcgtccgccatgacgggagaggagaggagaggagaggctggagctgcattaattggaagaaggggactggattgaagcgtactacctgtgcagggaagcgcgactcgccggggcacttcttgtcctcccacgccgtcgggtcgatgttggtcccgccgaagctggcggcctggtgatcggaaccggatccatgagagcatagatgcagatgaagatgaaaaggcaaatcaggaattggctggctactgtaatgtactgtaccgtaccttgaagatgccgtgcagctggtgggtggagtagttgtagaggaagaggggcagccccgggcggatggcccgcaccgagtccctgtacctcgacggcagccctgcatccaccccatcaaacacaatcaatcagctctgctggtttattccggtgttcatcatcaatcaatcaacaaatatcgcttcttttcagctgccctagctatttcagacagaaacgaaacgatacggttcttgtgcctgcgcgcgcggtcagtggctcaccgaacagctccctcctgaggttctcgtccatggtgtcgttgttgcagacgaagatgtag

SEQ ID NO: 77126 - DNA, 3009 bp, Zea Mays
aaaggatccattgccatctaacccatccccgttcctaggtggcgtagggcgtagcatccatctatgttcgtcttcctcgatcctgaacgaaaaccagtagccaaccttccccgcgtgctccgtgctcattcattccccatcccgtctcctcccaaaccagaagacaaaaccctagcctcctcctccgtgtgatgggatgccgtccaaaccctacccccactccctgacctcctcttcctcctccgccgtcgcccccgcgacctggatgtccgcatccgcatggacggtgcccgagtcctgatcgccgccggtgccaccgccgtctgctgcttcgtctgcgccttctgggtcttccgttcctcttcgtcctcctcccccgcatccccaaagaagcaccaatccccttccaccaactgctgtggctgcgcctcctgcggctgccgcgacgccaagcccgccaacggcgagatggccgtgggtggggagaacaagaagaaggcgccggagccggatccgccggaggcgccctccatgatggagcagctcgtgcccgagatcaccacccacgcgctcagctacctcgactacaccagcctctgccgtctctccatgaccaactccgccatgcgccgcgcagccaacgacgacggcgcctggaaggcactctaccacaagggtactataaatcctcctaatggatggaaggcatactatgcagctacaaaagccatcattaatcttaacgcggagttctacaatatcatcagggaagggtccttgccagcaatgagtcgtttttggcttaatgcagactatgtcaagtgtattcatgcgactggggagttctgccctggatacaactcagtgatggagagctggggcctgctattcaactggggccaagatggagggcagggcattgggttccagataagggatgtccgtgtccgtgtgctcggtgagatggcatgggtgaacatgaaggcgaatgttgatgttgaccctttggtgttccatgtgacgaacgtgtacgagctctgtaatgggaggtggtatatggtccatcaccacagctcgctcatggctcaccctgctccgcacaatatgtttggttgaagctggagaaggaaagcaaagaaaacctttgggaagaaaatttgatgtgcatgctttgtcgtgtcgtgcagttcagctaccagcgagttgattgagttttattctagaaccagaatcggtcgaagctcaagtcatggtgtggaagtggcaggtagctgatgctgtcgaatctggagcattcagacgcagtattataaccgaggtattgtcgcgagggacgaattccaatccaacacaacatctgtagtgcagcacaagaactgatggtttgtttttatataatattgatacatgtatcttacggaacgaggtctagtcttataataaaaacaaaaataatgggacgcgtgcctcatacatagccctttatcatatcaaacaaaggtggatagtttggtctgtccctccagccattttattgtctgtgcattaatggattggcactggcggcgagggggcggcaaggaaggctcaggcgtcatccttgtcagcgaagatgtcgaggagggcgagggtctcggcgacggagagctcgagccgaaacttgggcccgtcgtagtggtgaaggatggggcggaaggcgtcctcctccagtggatcgtagatcttccgcgttgccactcgcacctgcacatcacaaacatcatgcatgcgtcaccacttgggtaacaactacgagtactagatactccctagaggcctagatgcgatgaaacaacatgctacagctacaggttgcatcctcacgcctcttgcagttgcaccatctcgtctaaagatggcaacgggacccgttgccactcgaggaattactccattagagaactaagtttggtcgtaattttacacccacgagagacctgacgtgtcccgtaaaggttaggcggtcagccggtcactagcaacctacccaggcagaggcaggcagattggttgtttcgcacggacacggtgtttgtagacaattctttaaaaaaatgtttcttgagttgtgatccggggcctctaatcttttccagctccacacgtcgtcgcaacatgtgatgtgggaatgtgtgtgtgttttattttattttattttccgtcataattctttcttgagttgtgatcccggggcctctaatctttaccggctccacacgtcgtcgcaggcgcagcatgtgatgtgggaatgggtcgccacgctagccttttgtgattttgtctgtctgtcggtgacacacgtactgtttggtgttgttgaacttgaaccgttcaaacaagtgtaataaaagtcacgctagtggtgtggttgagctgatcgatcgtccgccatgacgggagaggagaggagaggagaggctggagctgcattaattggaagaaggggactggattgaagcgtactacctgtgcagggaagcgcgactcgccggggcacttcttgtcctcccacgccgtcgggtcgatgttggtcccgccgaagctggcggcctggtgatcggaaccggatccatgagagcatagatgcagatgaagatgaaaaggcaaatcaggaattggctggctactgtaatgtactgtaccgtaccttgaagatgccgtgcagctggtgggtggagtagttgtagaggaagaggggcagccccgggcggatggcccgcaccgagtccctgtacctcgacggcagccctgcatccaccccatcaaacacaatcaatcagctctgctggtttattccggtgttcatcatcaatcaatcaacaaatatcgcttcttttcagctgccctagctatttcagacagaaacgaaacgatacggttcttgtgcctgcgcgcgcggtcagtggctcaccgaacagctccctcctgaggttctcgtccatggtgtcgttgttgcagacgaagatgtag

SEQ ID NO: 77127 - DNA, 3043 bp, Zea Mays
gcgaaattcgctgcggaaaggatccattgccatctaacccatccccgttcctaggtggcgtagggcgtagcatccatctatgttcgtcttcctcgatcctgaacgaaaaccagtagccaaccttccccgcgtgctccgtgctcattcattccccatcccgtctcctcccaaaccagaagacaaaaccctagcctcctcctccgtgtgatgggatgccgtccaaaccctacccccactccctgacctcctcttcctcctccgccgtcgcccccgcgacctggatgtccgcatccgcatggacggtgcccgagtcctgatcgccgccggtgccaccgccgtctgctgcttcgtctgcgccttctgggtcttccgttcctcttcgtcctcctcccccgcatccccaaagaagcaccaatccccttccaccaactgctgtggctgcgcctcctgcggctgccgcgacgccaagcccgccaacggcgagatggccgtgggtggggagaacaagaagaaggcgccggagccggatccgccggaggcgccctccatgatggagcagctcgtgcccgagatcaccacccacgcgctcagctacctcgactacaccagcctctgccgtctctccatgaccaactccgccatgcgccgcgcagccaacgacgacggcgcctggaaggcactctaccacaaggattttacggtggaacagggtactataaatcctcctaatggatggaaggcatactatgcagctacaaaagccatcattaatcttaacgcggagttctacaatatcatcagggaagggtccttgccagcaatgagtcgtttttggcttaatgcagactatgtcaagtgtattcatgcgactggggagttctgccctggatacaactcagtgatggagagctggggcctgctattcaactggggccaagatggagggcagggcattgggttccagataagggatgtccgtgtccgtgtgctcggtgagatggcatgggtgaacatgaaggcgaatgttgatgttgaccctttggtgttccatgtgacgaacgtgtacgagctctgtaatgggaggtggtatatggtccatcaccacagctcgctcatggctcaccctgctccgcacaatatgtttggttgaagctggagaaggaaagcaaagaaaacctttgggaagaaaatttgatgtgcatgctttgtcgtgtcgtgcagttcagctaccagcgagttgattgagttttattctagaaccagaatcggtcgaagctcaagtcatggtgtggaagtggcaggtagctgatgctgtcgaatctggagcattcagacgcagtattataaccgaggtattgtcgcgagggacgaattccaatccaacacaacatctgtagtgcagcacaagaactgatggtttgtttttatataatattgatacatgtatcttacggaacgaggtctagtcttataataaaaacaaaaataatgggacgcgtgcctcatacatagccctttatcatatcaaacaaaggtggatagtttggtctgtccctccagccattttattgtctgtgcattaatggattggcactggcggcgagggggcggcaaggaaggctcaggcgtcatccttgtcagcgaagatgtcgaggagggcgagggtctcggcgacggagagctcgagccgaaacttgggcccgtcgtagtggtgaaggatggggcggaaggcgtcctcctccagtggatcgtagatcttccgcgttgccactcgcacctgcacatcacaaacatcatgcatgcgtcaccacttgggtaacaactacgagtactagatactccctagaggcctagatgcgatgaaacaacatgctacagctacaggttgcatcctcacgcctcttgcagttgcaccatctcgtctaaagatggcaacgggacccgttgccactcgaggaattactccattagagaactaagtttggtcgtaattttacacccacgagagacctgacgtgtcccgtaaaggttaggcggtcagccggtcactagcaacctacccaggcagaggcaggcagattggttgtttcgcacggacacggtgtttgtagacaattctttaaaaaaatgtttcttgagttgtgatccggggcctctaatcttttccagctccacacgtcgtcgcaacatgtgatgtgggaatgtgtgtgtgttttattttattttattttccgtcataattctttcttgagttgtgatcccggggcctctaatctttaccggctccacacgtcgtcgcaggcgcagcatgtgatgtgggaatgggtcgccacgctagccttttgtgattttgtctgtctgtcggtgacacacgtactgtttggtgttgttgaacttgaaccgttcaaacaagtgtaataaaagtcacgctagtggtgtggttgagctgatcgatcgtccgccatgacgggagaggagaggagaggagaggctggagctgcattaattggaagaaggggactggattgaagcgtactacctgtgcagggaagcgcgactcgccggggcacttcttgtcctcccacgccgtcgggtcgatgttggtcccgccgaagctggcggcctggtgatcggaaccggatccatgagagcatagatgcagatgaagatgaaaaggcaaatcaggaattggctggctactgtaatgtactgtaccgtaccttgaagatgccgtgcagctggtgggtggagtagttgtagaggaagaggggcagccccgggcggatggcccgcaccgagtccctgtacctcgacggcagccctgcatccaccccatcaaacacaatcaatcagctctgctggtttattccggtgttcatcatcaatcaatcaacaaatatcgcttcttttcagctgccctagctatttcagacagaaacgaaacgatacggttcttgtgcctgcgcgcgcggtcagtggctcaccgaacagctccctcctgaggttctcgtccatggtgtcgttgttgcagacgaagatgtag

SEQ ID NO: 77128 - DNA, 2744 bp, Zea Mays
gccgaactgatagcgaaattcgctgcggaaaggatccattgccatctaacccatccccgttcctaggtggcgtagggcgtagcatccatctatgttcgtcttcctcgatcctgaacgaaaaccagtagccaaccttccccgcgtgctccgtgctcattcattccccatcccgtctcctcccaaaccagaagacaaaaccctagcctcctcctccgtgtgatgggatgccgtccaaaccctacccccactccctgacctcctcttcctcctccgccgtcgcccccgcgacctggatgtccgcatccgcatggacggtgcccgagtcctgatcgccgccggtgccaccgccgtctgctgcttcgtctgcgccttctgggtcttccgttcctcttcgtcctcctcccccgcatccccaaagaagcaccaatccccttccaccaactgctgtggctgcgcctcctgcggctgccgcgacgccaagcccgccaacggcgagatggccgtgggtggggagaacaagaagaaggcgccggagccggatccgccggaggcgccctccatgatggagcagctcgtgcccgagatcaccacccacgcgctcagctacctcgactacaccagcctctgccgtctctccatgaccaactccgccatgcgccgcgcagccaacgacgacggcgcctggaaggcactctaccacaaggattttacggtggaacagggtactataaatcctcctaatggatggaaggcatactatgcagctacaaaagccatcattaatcttaacgcggagttctacaatatcatcagggaagggtccttgccagcaatgagtcgtttttggcttaatgcagactatgtcaagtgtattcatgcgactggggagttctgccctggcatgctttgtcgtgtcgtgcagttcagctaccagcgagttgattgagttttattctagaaccagaatcggtcgaagctcaagtcatggtgtggaagtggcaggtagctgatgctgtcgaatctggagcattcagacgcagtattataaccgaggtattgtcgcgagggacgaattccaatccaacacaacatctgtagtgcagcacaagaactgatggtttgtttttatataatattgatacatgtatcttacggaacgaggtctagtcttataataaaaacaaaaataatgggacgcgtgcctcatacatagccctttatcatatcaaacaaaggtggatagtttggtctgtccctccagccattttattgtctgtgcattaatggattggcactggcggcgagggggcggcaaggaaggctcaggcgtcatccttgtcagcgaagatgtcgaggagggcgagggtctcggcgacggagagctcgagccgaaacttgggcccgtcgtagtggtgaaggatggggcggaaggcgtcctcctccagtggatcgtagatcttccgcgttgccactcgcacctgcacatcacaaacatcatgcatgcgtcaccacttgggtaacaactacgagtactagatactccctagaggcctagatgcgatgaaacaacatgctacagctacaggttgcatcctcacgcctcttgcagttgcaccatctcgtctaaagatggcaacgggacccgttgccactcgaggaattactccattagagaactaagtttggtcgtaattttacacccacgagagacctgacgtgtcccgtaaaggttaggcggtcagccggtcactagcaacctacccaggcagaggcaggcagattggttgtttcgcacggacacggtgtttgtagacaattctttaaaaaaatgtttcttgagttgtgatccggggcctctaatcttttccagctccacacgtcgtcgcaacatgtgatgtgggaatgtgtgtgtgttttattttattttattttccgtcataattctttcttgagttgtgatcccggggcctctaatctttaccggctccacacgtcgtcgcaggcgcagcatgtgatgtgggaatgggtcgccacgctagccttttgtgattttgtctgtctgtcggtgacacacgtactgtttggtgttgttgaacttgaaccgttcaaacaagtgtaataaaagtcacgctagtggtgtggttgagctgatcgatcgtccgccatgacgggagaggagaggagaggagaggctggagctgcattaattggaagaaggggactggattgaagcgtactacctgtgcagggaagcgcgactcgccggggcacttcttgtcctcccacgccgtcgggtcgatgttggtcccgccgaagctggcggcctggtgatcggaaccggatccatgagagcatagatgcagatgaagatgaaaaggcaaatcaggaattggctggctactgtaatgtactgtaccgtaccttgaagatgccgtgcagctggtgggtggagtagttgtagaggaagaggggcagccccgggcggatggcccgcaccgagtccctgtacctcgacggcagccctgcatccaccccatcaaacacaatcaatcagctctgctggtttattccggtgttcatcatcaatcaatcaacaaatatcgcttcttttcagctgccctagctatttcagacagaaacgaaacgatacggttcttgtgcctgcgcgcgcggtcagtggctcaccgaacagctccctcctgaggttctcgtccatggtgtcgttgttgcagacgaagatgtag

SEQ ID NO: 77129 - DNA, 903 bp, Zea Mays
aaaggatccattgccatctaacccatccccgttcctaggtggcgtagggcgtagcatccatctatgttcgtcttcctcgatcctgaacgaaaaccagtagccaaccttccccgcgtgctccgtgctcattcattccccatcccgtctcctcccaaaccagaagacaaaaccctagcctcctcctccgtgtgatgggatgccgtccaaaccctacccccactccctgacctcctcttcctcctccgccgtcgcccccgcgacctggatgtccgcatccgcatggacggtgcccgagtcctgatcgccgccggtgccaccgccgtctgctgcttcgtctgcgccttctgggtcttccgttcctcttcgtcctcctcccccgcatccccaaagaagcaccaatccccttccaccaactgctgtggctgcgcctcctgcggctgccgcgacgccaagcccgccaacggcgagatggccgtgggtggggagaacaagaagaaggcgccggagccggatccgccggaggcgccctccatgatggagcagctcgtgcccgagatcaccacccacgcgctcagctacctcgactacaccagcctctgccgtctctccatgaccaactccgccatgcgccgcgcagccaacgacgacggcgcctggaaggcactctaccacaaggattttacggtggaacagggtactataaatcctcctaatggatggaaggcatactatgcagctacaaaagccatcattaatcttaacgcggagttctacaatatcatcagggaagggtccttgccagcaatgagtcgtttttggcttaatgcagactatgtcaagtgtattcatgcgactggggagttctgccctgggccttactggtgtgaatgcgcccacccattt

SEQ ID NO: 77130 - DNA, 2763 bp, Zea Mays
gctccctaccgcttgtccgtttcttcctctcccgaagtagcaacgtggtgagtgagaccgccgctactctgctgctgcggaggcccaagccgaccgctactcataccctttcgctttatccatcttctagcttcttcattcacctgttccagaatcgggccaggcttgcggatgccggggtgcggagtagcggggagagggggcgtgggggtgtcgtcggccgcacgccccactccgcgccgcccctgcctctggatgcctatcgctcgcggctacgggaggcaacctgagctgaaatattgcacatcatcacaaagcaagtctgtgttactaggagcaggatttggtcgacatgttactaggagcaatccttatctgctccaaaattccagtagcactacaatggcaagactgcaaaagtctgggcagtttcagcaacttgtcttggacccttcaagaaactatttgactaagacattctacaatgcaaacatgaagaggagagttctgtcgagggttgagtgttttgtgtcttcagatccaataaacaatggttggttgaaaccaaggaggtctgagaatttcactagcttggagagcgcatgtgtccagcgagaatacaaactaccagtcagaacacgtgctgactgtaaagcagagcagtatgaaataacaggatcacctttgagcccttctgatgctgatgctgttatgattggagacacaaatgagatttctccctggtggcaggagttcccaaagcgctggatgattgttctcttgtgcttctttgcgttccttctttgcaatatggaccgtgtcaatatgagcattgcaatccttccaatgtcgtcagagttcagctggagcccagcaaccgtcggtctaatccaatcatctttcttttggggttaccttcttacacagatacttggaggtatttgggctgataggtttggtggtaagctagtactagggtttggggttatatggtggtcaattgcgacagttcttacgccccttgcagccaagattggacttccatgcttactcaccatgcgtgccttcatggggataggcgagggcgttgccatgcctgctatgaacaacatcctttccaaatggatcccagtttcagagagaagcagatctcttgccttggtgtacagtggaatgtaccttgggtcagtcaccggcctggctttgtcacctctgttgattagcagatttggctggccttctgtcttttatgcatttggatcccttggaagcgtttggtttgcactgtggcaaagcaaagtatgattgaccaaaccttgcattcatttcttaagtgtcccatattctttgttccatatgggtttactcagtaaacatatgttaattatgaaaggttgctttagataccattttctattatctgttgctgtatctccaatgcccgttttcttatactcattttgctaacttagctgagggctactatctactcttatttaggcacacagctctccagatgatgatccagagctaagtaaagctgaaaagaggcatatactgggtggcagccccttaaaagagcctgtcacttccataccatggaggttgattctatcaaaggctccagtgtgggctctcataatatcacatttttgccataactggggaacatttattctgttaacatggatgcccacatactacaatcaggttctgaagttcaatctaaccgagtccgggcttctctgtgtcttgccatggctgacaatggctgtcttcgcgaatattggtggatggattgctgatactcttgttcaaagagggatctcagttacaaacgttcgtaagatcatgcaatcaattggtttccttggaccagccttgttcttaacactgctgagcaaagttcgtactccagccatggctgtattatgtatggcatgcagtcagggtagcgatgctttttcacagtctggcctgtattcaaatcaccaagacattggaccacgttatgcgggggtacttctcggattgtcaaacactgctggcgtgcttgcaggagtttttggtactgcagccactggctacattcttcagaaaggttcttgggatagtgtgtttaaggtgtctgttgtgctgtacatagtaggaacggtggtgtggaatgtctttgcaactggagagaaagttctcgaataagctgtggacattcctatatgccaatatacgaaaattgtatgattttggtatacaaaggtaaatttaagaagagatacagctggaagaaaactccattttgtgcaagagatataccttcatctaatgtttgggctatcggaagaatgaaatcaaattagagtatcgtgtgaggtcaagaaggtactcatggaactggagaaacttcttgtacagaaagcaactgcaccaatggcacgtcagattttgcagctgtttcttgagaagtacaggcttctaccaagatcatcaatccacatatttttgttttgtttttaaaatacatggtagttaaatcgtgtttcaacttgcccttgattaaggcgctacagctactgccaactaaatgtagtattatgtgagctctttttcatcgagaattcctaattgtacctgcttcagataccttaaacgtctctgttccttgcgtcgttgctattatcgttttgtgtatgctgcataatgatattgcatggtgatggtgtcatttttttggcatcccggtgcctgaagaagagtagatttaat

SEQ ID NO: 77131 - DNA, 2399 bp, Zea Mays
gctccctaccgcttgtccgtttcttcctctcccgaagtagcaacgtgaatcgggccaggcttgcggatgccggggtgcggagtagcggggagagggggcgtgggggtgtcgtcggccgcacgccccactccgcgccgcccctgcctctggatgcctatcgctcgcggctacgggaggcaacctgagctgaaatattgcacatcatcacaaagcaagtctgtgttactaggagcaggatttggtcgacatgttactaggagcaatccttatctgctccaaaattccagtagcactacaatggcaagactgcaaaagtctgggcagtttcagcaacttgtcttggacccttcaagaaactatttgactaagacattctacaatgcaaacatgaagaggagagttctgtcgagggttgagtgttttgtgtcttcagatccaataaacaatggttggttgaaaccaaggaggtctgagaatttcactagcttggagagcgcatgtgtccagcgagaatacaaactaccagtcagaacacgtgctgactgtaaagcagagcagtatgaaataacaggatcacctttgagcccttctgatgctgatgctgttatgattggagacacaaatgagatttctccctggtggcaggagttcccaaagcgctggatgattgttctcttgtgcttctttgcgttccttctttgcaatatggaccgtgtcaatatgagcattgcaatccttccaatgtcgtcagagttcagctggagcccagcaaccgtcggtctaatccaatcatctttcttttggggttaccttcttacacagatacttggaggtatttgggctgataggtttggtggtaagctagtactagggtttggggttatatggtggtcaattgcgacagttcttacgccccttgcagccaagattggacttccatgcttactcaccatgcgtgccttcatggggataggcgagggcgttgccatgcctgctatgaacaacatcctttccaaatggatcccagtttcagagagaagcagatctcttgccttggtgtacagtggaatgtaccttgggcacacagctctccagatgatgatccagagctaagtaaagctgaaaagaggcatatactgggtggcagccccttaaaagagcctgtcacttccataccatggaggttgattctatcaaaggctccagtgtgggctctcataatatcacatttttgccataactggggaacatttattctgttaacatggatgcccacatactacaatcaggtttctacaatgttatgctgtgaaacgtttggctttgctcattgttaaagttatctattggtgtcatgccatcgcttgttgtccccaaatccttttacccaggttctgaagttcaatctaaccgagtccgggcttctctgtgtcttgccatggctgacaatggctgtcttcgcgaatattggtggatggattgctgatactcttgttcaaagagggatctcagttacaaacgttcgtaagatcatgcaatcaattggtttccttggaccagccttgttcttaacactgctgagcaaaggtagcgatgctttttcacagtctggcctgtattcaaatcaccaagacattggaccacgttatgcgggggtacttctcggattgtcaaacactgctggcgtgcttgcaggagtttttggtactgcagccactggctacattcttcagaaaggttcttgggatagtgtgtttaaggtgtctgttgtgctgtacatagtaggaacggtggtgtggaatgtctttgcaactggagagaaagttctcgaataagctgtggacattcctatatgccaatatacgaaaattgtatgattttggtatacaaaggtaaatttaagaagagatacagctggaagaaaactccattttgtgcaagagatataccttcatctaatgtttgggctatcggaagaatgaaatcaaattagagtatcgtgtgaggtcaagaaggtactcatggaactggagaaacttcttgtacagaaagcaactgcaccaatggcacgtcagattttgcagctgtttcttgagaagtacaggcttctaccaagatcatcaatccacatatttttgttttgtttttaaaatacatggtagttaaatcgtgtttcaacttgcccttgattaaggcgctacagctactgccaactaaatgtagtattatgtgagctctttttcatcgagaattcctaattgtacctgcttcagataccttaaacgtctctgttccttgcgtcgttgctattatcgttttgtgtatgctgcataatgatattgcatggtgatggtgtcatttttttggcatcccggtgcctgaagaagagtagatttaat

SEQ ID NO: 77132 - DNA, 2422 bp, Zea Mays
ctcaccgcgcgctccctaccgcttgtccgtttcttcctctcccgaagtagcaacgtgaatcgggccaggcttgcggatgccggggtgcggagtagcggggagagggggcgtgggggtgtcgtcggccgcacgccccactccgcgccgcccctgcctctggatgcctatcgctcgcggctacgggaggcaacctgagctgaaatattgcacatcatcacaaagcaagtctgtgttactaggagcaggatttggtcgacatgttactaggagcaatccttatctgctccaaaattccagtagcactacaatggcaagactgcaaaagtctgggcagtttcagcaacttgtcttggacccttcaagaaactatttgactaagacattctacaatgcaaacatgaagaggagagttctgtcgagggttgagtgttttgtgtcttcagatccaataaacaatggttggttgaaaccaaggaggtctgagaatttcactagcttggagagcgcatgtgtccagcgagaatacaaactaccagtcagaacacgtgctgactgtaaagcagagcagtatgaaataacaggatcacctttgagcccttctgatgctgatgctgttatgattggagacacaaatgagatttctccctggtggcaggagttcccaaagcgctggatgattgttctcttgtgcttctttgcgttccttctttgcaatatggaccgtgtcaatatgagcattgcaatccttccaatgtcgtcagagttcagctggagcccagcaaccgtcggtctaatccaatcatctttcttttggggttaccttcttacacagatacttggaggtatttgggctgataggtttggtggtaagctagtactagggtttggggttatatggtggtcaattgcgacagttcttacgccccttgcagccaagattggacttccatgcttactcaccatgcgtgccttcatggggataggcgagggcgttgccatgcctgctatgaacaacatcctttccaaatggatcccagtttcagagagaagcagatctcttgccttggtgtacagtggaatgtaccttgggtcagtcaccggcctggctttgtcacctctgttgattagcagatttggctggccttctgtcttttatgcatttggatcccttggaagcgtttggtttgcactgtggcaaagcaaagcacacagctctccagatgatgatccagagctaagtaaagctgaaaagaggcatatactgggtggcagccccttaaaagagcctgtcacttccataccatggaggttgattctatcaaaggctccagtgtgggctctcataatatcacatttttgccataactggggaacatttattctgttaacatggatgcccacatactacaatcaggttctgaagttcaatctaaccgagtccgggcttctctgtgtcttgccatggctgacaatggctgtcttcgcgaatattggtggatggattgctgatactcttgttcaaagagggatctcagttacaaacgttcgtaagatcatgcaatcaattggtttccttggaccagccttgttcttaacactgctgagcaaaggtagcgatgctttttcacagtctggcctgtattcaaatcaccaagacattggaccacgttatgcgggggtacttctcggattgtcaaacactgctggcgtgcttgcaggagtttttggtactgcagccactggctacattcttcagaaaggttcttgggatagtgtgtttaaggtgtctgttgtgctgtacatagtaggaacggtggtgtggaatgtctttgcaactggagagaaagttctcgaataagctgtggacattcctatatgccaatatacgaaaattgtatgattttggtatacaaaggtaaatttaagaagagatacagctggaagaaaactccattttgtgcaagagatataccttcatctaatgtttgggctatcggaagaatgaaatcaaattagagtatcgtgtgaggtcaagaaggtactcatggaactggagaaacttcttgtacagaaagcaactgcaccaatggcacgtcagattttgcagctgtttcttgagaagtacaggcttctaccaagatcatcaatccacatatttttgttttgtttttaaaatacatggtagttaaatcgtgtttcaacttgcccttgattaaggcgctacagctactgccaactaaatgtagtattatgtgagctctttttcatcgagaattcctaattgtacctgcttcagataccttaaacgtctctgttccttgcgtcgttgctattatcgttttgtgtatgctgcataatgatattgcatggtgatggtgtcatttttttggcatcccggtgcctgaagaagagtagatttaat

SEQ ID NO: 77133 - DNA, 2469 bp, Zea Mays
ctatctcctcaccgcgcgctccctaccgcttgtccgtttcttcctctcccgaagtagcaacgtgaatcgggccaggcttgcggatgccggggtgcggagtagcggggagagggggcgtgggggtgtcgtcggccgcacgccccactccgcgccgcccctgcctctggatgcctatcgctcgcggctacgggaggcaacctgagctgaaatattgcacatcatcacaaagcaagtctgtgttactaggagcaggatttggtcgacatgttactaggagcaatccttatctgctccaaaattccagtagcactacaatggcaagactgcaaaagtctgggcagtttcagcaacttgtcttggacccttcaagaaactatttgactaagacattctacaatgcaaacatgaagaggagagttctgtcgagggttgagtgttttgtgtcttcagatccaataaacaatggttggttgaaaccaaggaggtctgagaatttcactagcttggagagcgcatgtgtccagcgagaatacaaactaccagtcagaacacgtgctgactgtaaagcagagcagtatgaaataacaggatcacctttgagcccttctgatgctgatgctgttatgattggagacacaaatgagatttctccctggtggcaggagttcccaaagcgctggatgattgttctcttgtgcttctttgcgttccttctttgcaatatggaccgtgtcaatatgagcattgcaatccttccaatgtcgtcagagttcagctggagcccagcaaccgtcggtctaatccaatcatctttcttttggggttaccttcttacacagatacttggaggtatttgggctgataggtttggtggtaagctagtactagggtttggggttatatggtggtcaattgcgacagttcttacgccccttgcagccaagattggacttccatgcttactcaccatgcgtgccttcatggggataggcgagggcgttgccatgcctgctatgaacaacatcctttccaaatggatcccagtttcagagagaagcagatctcttgccttggtgtacagtggaatgtaccttgggtcagtcaccggcctggctttgtcacctctgttgattagcagatttggctggccttctgtcttttatgcatttggatcccttggaagcgtttggtttgcactgtggcaaagcaaagcacacagctctccagatgatgatccagagctaagtaaagctgaaaagaggcatatactgggtggcagccccttaaaagagcctgtcacttccataccatggaggttgattctatcaaaggctccagtgtgggctctcataatatcacatttttgccataactggggaacatttattctgttaacatggatgcccacatactacaatcaggttctgaagttcaatctaaccgagtccgggcttctctgtgtcttgccatggctgacaatggctgtcttcgcgaatattggtggatggattgctgatactcttgttcaaagagggatctcagttacaaacgttcgtaagatcatgcaatcaattggtttccttggaccagccttgttcttaacactgctgagcaaagttcgtactccagccatggctgtattatgtatggcatgcagtcagcgatgctttttcacagtctggcctgtattcaaatcaccaagacattggaccacgttatgcgggggtacttctcggattgtcaaacactgctggcgtgcttgcaggagtttttggtactgcagccactggctacattcttcagaaaggttcttgggatagtgtgtttaaggtgtctgttgtgctgtacatagtaggaacggtggtgtggaatgtctttgcaactggagagaaagttctcgaataagctgtggacattcctatatgccaatatacgaaaattgtatgattttggtatacaaaggtaaatttaagaagagatacagctggaagaaaactccattttgtgcaagagatataccttcatctaatgtttgggctatcggaagaatgaaatcaaattagagtatcgtgtgaggtcaagaaggtactcatggaactggagaaacttcttgtacagaaagcaactgcaccaatggcacgtcagattttgcagctgtttcttgagaagtacaggcttctaccaagatcatcaatccacatatttttgttttgtttttaaaatacatggtagttaaatcgtgtttcaacttgcccttgattaaggcgctacagctactgccaactaaatgtagtattatgtgagctctttttcatcgagaattcctaattgtacctgcttcagataccttaaacgtctctgttccttgcgtcgttgctattatcgttttgtgtatgctgcataatgatattgcatggtgatggtgtcatttttttggcatcccggtgcctgaagaagagtagatttaat

SEQ ID NO: 77134 - DNA, 2526 bp, Zea Mays
ctcgcatcccactatctccccgcctcaccgccacttcaccactttgctcatcctatctcctcaccgcgcgctccctaccgcttgtccgtttcttcctctcccgaagtagcaacgtgaatcgggccaggcttgcggatgccggggtgcggagtagcggggagagggggcgtgggggtgtcgtcggccgcacgccccactccgcgccgcccctgcctctggatgcctatcgctcgcggctacgggaggcaacctgagctgaaatattgcacatcatcacaaagcaagtctgtgttactaggagcaggatttggtcgacatgttactaggagcaatccttatctgctccaaaattccagtagcactacaatggcaagactgcaaaagtctgggcagtttcagcaacttgtcttggacccttcaagaaactatttgactaagacattctacaatgcaaacatgaagaggagagttctgtcgagggttgagtgttttgtgtcttcagatccaataaacaatggttggttgaaaccaaggaggtctgagaatttcactagcttggagagcgcatgtgtccagcgagaatacaaactaccagtcagaacacgtgctgactgtaaagcagagcagtatgaaataacaggatcacctttgagcccttctgatgctgatgctgttatgattggagacacaaatgagatttctccctggtggcaggagttcccaaagcgctggatgattgttctcttgtgcttctttgcgttccttctttgcaatatggaccgtgtcaatatgagcattgcaatccttccaatgtcgtcagagttcagctggagcccagcaaccgtcggtctaatccaatcatctttcttttggggttaccttcttacacagatacttggaggtatttgggctgataggtttggtggtaagctagtactagggtttggggttatatggtggtcaattgcgacagttcttacgccccttgcagccaagattggacttccatgcttactcaccatgcgtgccttcatggggataggcgagggcgttgccatgcctgctatgaacaacatcctttccaaatggatcccagtttcagagagaagcagatctcttgccttggtgtacagtggaatgtaccttgggtcagtcaccggcctggctttgtcacctctgttgattagcagatttggctggccttctgtcttttatgcatttggatcccttggaagcgtttggtttgcactgtggcaaagcaaagcacacagctctccagatgatgatccagagctaagtaaagctgaaaagaggcatatactgggtggcagccccttaaaagagcctgtcacttccataccatggaggttgattctatcaaaggctccagtgtgggctctcataatatcacatttttgccataactggggaacatttattctgttaacatggatgcccacatactacaatcaggttctgaagttcaatctaaccgagtccgggcttctctgtgtcttgccatggctgacaatggctgtcttcgcgaatattggtggatggattgctgatactcttgttcaaagagggatctcagttacaaacgttcgtaagatcatgcaatcaattggtttccttggaccagccttgttcttaacactgctgagcaaagttcgtactccagccatggctgtattatgtatggcatgcagtcagggtagcgatgctttttcacagtctggcctgtattcaaatcaccaagacattggaccacgttatgcgggggtacttctcggattgtcaaacactgctggcgtgcttgcaggagtttttggtactgcagccactggctacattcttcagaaaggttcttgggatagtgtgtttaaggtgtctgttgtgctgtacatagtaggaacggtggtgtggaatgtctttgcaactggagagaaagttctcgaataagctgtggacattcctatatgccaatatacgaaaattgtatgattttggtatacaaaggtaaatttaagaagagatacagctggaagaaaactccattttgtgcaagagatataccttcatctaatgtttgggctatcggaagaatgaaatcaaattagagtatcgtgtgaggtcaagaaggtactcatggaactggagaaacttcttgtacagaaagcaactgcaccaatggcacgtcagattttgcagctgtttcttgagaagtacaggcttctaccaagatcatcaatccacatatttttgttttgtttttaaaatacatggtagttaaatcgtgtttcaacttgcccttgattaaggcgctacagctactgccaactaaatgtagtattatgtgagctctttttcatcgagaattcctaattgtacctgcttcagataccttaaacgtctctgttccttgcgtcgttgctattatcgttttgtgtatgctgcataatgatattgcatggtgatggtgtcatttttttggcatcccggtgcctgaagaagagtagatttaat

SEQ ID NO: 77135 - DNA, 2525 bp, Zea Mays
cacggacacgctcgcatcccactatctccccgcctcaccgccacttcaccactttgctcatcctatctcctcaccgcgcgctccctaccgcttgtccgtttcttcctctcccgaagtagcaacgtggcttgcggatgccggggtgcggagtagcggggagagggggcgtgggggtgtcgtcggccgcacgccccactccgcgccgcccctgcctctggatgcctatcgctcgcggctacgggaggcaacctgagctgaaatattgcacatcatcacaaagcaagtctgtgttactaggagcaggatttggtcgacatgttactaggagcaatccttatctgctccaaaattccagtagcactacaatggcaagactgcaaaagtctgggcagtttcagcaacttgtcttggacccttcaagaaactatttgactaagacattctacaatgcaaacatgaagaggagagttctgtcgagggttgagtgttttgtgtcttcagatccaataaacaatggttggttgaaaccaaggaggtctgagaatttcactagcttggagagcgcatgtgtccagcgagaatacaaactaccagtcagaacacgtgctgactgtaaagcagagcagtatgaaataacaggatcacctttgagcccttctgatgctgatgctgttatgattggagacacaaatgagatttctccctggtggcaggagttcccaaagcgctggatgattgttctcttgtgcttctttgcgttccttctttgcaatatggaccgtgtcaatatgagcattgcaatccttccaatgtcgtcagagttcagctggagcccagcaaccgtcggtctaatccaatcatctttcttttggggttaccttcttacacagatacttggaggtatttgggctgataggtttggtggtaagctagtactagggtttggggttatatggtggtcaattgcgacagttcttacgccccttgcagccaagattggacttccatgcttactcaccatgcgtgccttcatggggataggcgagggcgttgccatgcctgctatgaacaacatcctttccaaatggatcccagtttcagagagaagcagatctcttgccttggtgtacagtggaatgtaccttgggtcagtcaccggcctggctttgtcacctctgttgattagcagatttggctggccttctgtcttttatgcatttggatcccttggaagcgtttggtttgcactgtggcaaagcaaagcacacagctctccagatgatgatccagagctaagtaaagctgaaaagaggcatatactgggtggcagccccttaaaagagcctgtcacttccataccatggaggttgattctatcaaaggctccagtgtgggctctcataatatcacatttttgccataactggggaacatttattctgttaacatggatgcccacatactacaatcaggttctgaagttcaatctaaccgagtccgggcttctctgtgtcttgccatggctgacaatggctgtcttcgcgaatattggtggatggattgctgatactcttgttcaaagagggatctcagttacaaacgttcgtaagatcatgcaatcaattggtttccttggaccagccttgttcttaacactgctgagcaaagttcgtactccagccatggctgtattatgtatggcatgcagtcagggtagcgatgctttttcacagtctggcctgtattcaaatcaccaagacattggaccacgttatgcgggggtacttctcggattgtcaaacactgctggcgtgcttgcaggagtttttggtactgcagccactggctacattcttcagaaaggttcttgggatagtgtgtttaaggtgtctgttgtgctgtacatagtaggaacggtggtgtggaatgtctttgcaactggagagaaagttctcgaataagctgtggacattcctatatgccaatatacgaaaattgtatgattttggtatacaaaggtaaatttaagaagagatacagctggaagaaaactccattttgtgcaagagatataccttcatctaatgtttgggctatcggaagaatgaaatcaaattagagtatcgtgtgaggtcaagaaggtactcatggaactggagaaacttcttgtacagaaagcaactgcaccaatggcacgtcagattttgcagctgtttcttgagaagtacaggcttctaccaagatcatcaatccacatatttttgttttgtttttaaaatacatggtagttaaatcgtgtttcaacttgcccttgattaaggcgctacagctactgccaactaaatgtagtattatgtgagctctttttcatcgagaattcctaattgtacctgcttcagataccttaaacgtctctgttccttgcgtcgttgctattatcgttttgtgtatgctgcataatgatattgcatggtgatggtgtcatttttttggcatcccggtgcctgaagaagagtagatttaat

SEQ ID NO: 77136 - DNA, 2410 bp, Zea Mays
cacggacacgctcgcatcccactatctccccgcctcaccgccacttcaccactttgctcatcctatctcctcaccgcgcgctccctaccgcttgtccgtttcttcctctcccgaagtagcaacgtggcttgcggatgccggggtgcggagtagcggggagagggggcgtgggggtgtcgtcggccgcacgccccactccgcgccgcccctgcctctggatgcctatcgctcgcggctacgggaggcaacctgagctgaaatattgcacatcatcacaaagcaagtctgtgttactaggagcaggatttggtcgacatgttactaggagcaatccttatctgctccaaaattccagtagcactacaatggcaagactgcaaaagtctgggcagtttcagcaacttgtcttggacccttcaagaaactatttgactaagacattctacaatgcaaacatgaagaggagagttctgtcgagggttgagtgttttgtgtcttcagatccaataaacaatggttggttgaaaccaaggaggtctgagaatttcactagcttggagagcgcatgtgtccagcgagaatacaaactaccagtcagaacacgtgctgactgtaaagcagagcagtatgaaataacaggatcacctttgagcccttctgatgctgatgctgttatgattggagacacaaatgagatttctccctggtggcaggagttcccaaagcgctggatgattgttctcttgtgcttctttgcgttccttctttgcaatatggaccgtgtcaatatgagcattgcaatccttccaatgtcgtcagagttcagctggagcccagcaaccgtcggtctaatccaatcatctttcttttggggttaccttcttacacagatacttggaggtatttgggctgataggtttggtggtaagctagtactagggtttggggttatatggtggtcaattgcgacagttcttacgccccttgcagccaagattggacttccatgcttactcaccatgcgtgccttcatggggataggcgagggcgttgccatgcctgctatgaacaacatcctttccaaatggatcccagtttcagagagaagcagatctcttgccttggtgtacagtggaatgtaccttgggcacacagctctccagatgatgatccagagctaagtaaagctgaaaagaggcatatactgggtggcagccccttaaaagagcctgtcacttccataccatggaggttgattctatcaaaggctccagtgtgggctctcataatatcacatttttgccataactggggaacatttattctgttaacatggatgcccacatactacaatcaggttctgaagttcaatctaaccgagtccgggcttctctgtgtcttgccatggctgacaatggctgtcttcgcgaatattggtggatggattgctgatactcttgttcaaagagggatctcagttacaaacgttcgtaagatcatgcaatcaattggtttccttggaccagccttgttcttaacactgctgagcaaagttcgtactccagccatggctgtattatgtatggcatgcagtcagggtagcgatgctttttcacagtctggcctgtattcaaatcaccaagacattggaccacgttatgcgggggtacttctcggattgtcaaacactgctggcgtgcttgcaggagtttttggtactgcagccactggctacattcttcagaaaggttcttgggatagtgtgtttaaggtgtctgttgtgctgtacatagtaggaacggtggtgtggaatgtctttgcaactggagagaaagttctcgaataagctgtggacattcctatatgccaatatacgaaaattgtatgattttggtatacaaaggtaaatttaagaagagatacagctggaagaaaactccattttgtgcaagagatataccttcatctaatgtttgggctatcggaagaatgaaatcaaattagagtatcgtgtgaggtcaagaaggtactcatggaactggagaaacttcttgtacagaaagcaactgcaccaatggcacgtcagattttgcagctgtttcttgagaagtacaggcttctaccaagatcatcaatccacatatttttgttttgtttttaaaatacatggtagttaaatcgtgtttcaacttgcccttgattaaggcgctacagctactgccaactaaatgtagtattatgtgagctctttttcatcgagaattcctaattgtacctgcttcagataccttaaacgtctctgttccttgcgtcgttgctattatcgttttgtgtatgctgcataatgatattgcatggtgatggtgtcatttttttggcatcccggtgcctgaagaagagtagatttaat

SEQ ID NO: 77137 - DNA, 868 bp, Zea Mays
cttgagaagattttatgatgatgatgtatattttgtgtagttgacacggtacaagaacttcaaggaaggacacaagaggattcttgtggctactgatttggttggtaggggaatcgacattgaacgtgtcaacattgtcgtaaactatgatatgcctgattccgctgatacatacctgcatagggttggtcgggctggacgttttggtaccaagggacttgcaataacatttgtttcttcatctgattctgatgttctcaatcaagtgcaggagaggtttgaggttgacataaaggagctgcctgagcagattgacacgtcgacatacatgccatcttgatgatcgaggtgaaccagtgtttagtttgagctggaaaggagagcttgtttgaaatatacaccttagatcgctgttggacaaccttagcaccttgtttgaaagatgttccatttgtacttaaccagcagtctagtggattaagcagtaggcgtcgcaacagctgttacatgctacctaggattttatttgcaactctgtaatgttttctatgctccgactgctaattgttctgtttgagactgccctctgggtgcatgttttactagtaaattactcgcaccatgcccgagtcttcggagcatgtgtttacatatttaaaagagttgctacaaataggagaaaaatatattgaacatcagttgtgtgttatttggtctttgactggtgtactttctgctcgtggtttcgtagtgtaactctcttgttcactggcattcggtggcattagaagaacaactgggttatgctgctgaaatcacgagcagaaggtatacgagtcagaccaaataacacgcaacaactgccatt

SEQ ID NO: 77138 - DNA, 1744 bp, Zea Mays
gaagtgcaatagagctctatatgcttgtacaaattcttctgacattttctgctggaggagaatatggtatagctttccattaatgggacaagaacgttgatttttttcttactggggtgctgctccaactttatttggttccacatcagtgcaacatgagtgcatccctcaagctattcttggaatggatgtcatctgtcaagcaaaatctggaatgggtaagactgcagtttttgtcctgtcaactcttcagcagattgatcctgttgctggccaagtagctgcacttgtgttgtgccacacaagagaattagcttaccagatttgccatgaatttgagaggtttagcaaatacctgcctgaattaagagtagctgttttctatggtggtgttcacataaaaaaccacaaggatctgctgaagaatgaatgcccccatattgtggttggcacgcctggaaggatactagctctagctagagataaggaccttcccttgaagaatgtgcggcatttcattcttgatgaatgtgacaagatgctcgaatcacttgacatgcgcagagatgtccaggagatcttcaaaatgactccgcatgataagcaagtgatgatgttttcagcaacactcagcaaggagattcgacctgtttgcaagaggttcatgcaagatcctatggaaatttatgttgatgatgaggctaaactgacccttcatggtctagttcagcactatatcaaattaagtgaggcagagaagaaccgaaagttgaacgatcttttagatgcactcgacttcaaccaagttgtgatatttgttaaaagtgttagtagagctgcagaactcaacaaattgctctgcgagtgcaatttcccctcaatctgtatacattctggaatgacacaggaagagaggttgacacggtacaagaacttcaaggaaggacacaagaggattcttgtggctactgatttggttggtaggggaatcgacattgaacgtgtcaacattgtcgtaaactatgatatgcctgattccgctgatacatacctgcatagggttggtcgggctggacgttttggtaccaagggacttgcaataacatttgtttcttcatctgattctgatgttctcaatcaagtgcaggagaggtttgaggttgacataaaggagctgcctgagcagattgacacgtcgacatacatgccatcttgatgatcgaggtgaaccagtgtttagtttgagctggaaaggagagcttgtttgaaatatacaccttagatcgctgttggacaaccttagcaccttgtttgaaagatgttccatttgtacttaaccagcagtctagtggattaagcagtaggcgtcgcaacagctgttacatgctacctaggattttatttgcaactctgtaatgttttctatgctccgactgctaattgttctgtttgagactgccctctgggtgcatgttttactagtaaattactcgcaccatgcccgagtcttcggagcatgtgtttacatatttaaaagagttgctacaaataggagaaaaatatattgaacatcagttgtgtgttatttggtctttgactggtgtactttctgctcgtggtttcgtagtgtaactctcttgttcactggcattcggtggcattagaagaacaactgggttatgctgctgaaatcacgagcagaaggtatacgagtcagaccaaataacacgcaacaactgccatt

SEQ ID NO: 77139 - DNA, 2209 bp, Zea Mays
caccaacgaaatttcgcgtgatcaacagttcaacacacaaagtatagagtggatactttctgggtctcaaatatggtattcatgagtctggaccgtaagacgggctactattgaagcagactccacccggcgcgtcctcgtctcgtctcgtctcgcacgcacccctcactttccttgtcaatcgactcgcgatcgaatccgccccgagtcgattccgccgcggaccgaccggttcacttcccttttctcccgagatctcgactctcgagcaagtatgggtgaggcgaaggacaacgaggtgtacgaggaggacctagtcgactatgaggaggaggtggagaatgtcattgatggcgcccccaccaacggctcctcagatgtcgtcaagaaggggtacgtagggatccacagctcggggttcagagacttcctgctcaagccagagcttcttcgcgccattcaggattgcgggtttgagcatccttctgaaggtacaaattcttctgacattttctgctggaggagaatatggtatagctttccattaatgggacaagaacgttgatttttttcttactggggtgctgctccaactttatttggttccacatcagtgcaacatgagtgcatccctcaagctattcttggaatggatgtcatctgtcaagcaaaatctggaatgggtaagactgcagtttttgtcctgtcaactcttcagcagattgatcctgttgctggccaagtagctgcacttgtgttgtgccacacaagagaattagcttaccagatttgccatgaatttgagaggtttagcaaatacctgcctgaattaagagtagctgttttctatggtggtgttcacataaaaaaccacaaggatctgctgaagaatgaatgcccccatattgtggttggcacgcctggaaggatactagctctagctagagataaggaccttcccttgaagaatgtgcggcatttcattcttgatgaatgtgacaagatgctcgaatcacttgacatgcgcagagatgtccaggagatcttcaaaatgactccgcatgataagcaagtgatgatgttttcagcaacactcagcaaggagattcgacctgtttgcaagaggttcatgcaagatcctatggaaatttatgttgatgatgaggctaaactgacccttcatggtctagttcagcactatatcaaattaagtgaggcagagaagaaccgaaagttgaacgatcttttagatgcactcgacttcaaccaagttgtgatatttgttaaaagtgttagtagagctgcagaactcaacaaattgctctgcgagtgcaatttcccctcaatctgtatacattctggaatgacacaggaagagaggttgacacggtacaagaacttcaaggaaggacacaagaggattcttgtggctactgatttggttggtaggggaatcgacattgaacgtgtcaacattgtcgtaaactatgatatgcctgattccgctgatacatacctgcatagggttggtcgggctggacgttttggtaccaagggacttgcaataacatttgtttcttcatctgattctgatgttctcaatcaagtgcaggagaggtttgaggttgacataaaggagctgcctgagcagattgacacgtcgacatacatgccatcttgatgatcgaggtgaaccagtgtttagtttgagctggaaaggagagcttgtttgaaatatacaccttagatcgctgttggacaaccttagcaccttgtttgaaagatgttccatttgtacttaaccagcagtctagtggattaagcagtaggcgtcgcaacagctgttacatgctacctaggattttatttgcaactctgtaatgttttctatgctccgactgctaattgttctgtttgagactgccctctgggtgcatgttttactagtaaattactcgcaccatgcccgagtcttcggagcatgtgtttacatatttaaaagagttgctacaaataggagaaaaatatattgaacatcagttgtgtgttatttggtctttgactggtgtactttctgctcgtggtttcgtagtgtaactctcttgttcactggcattcggtggcattagaagaacaactgggttatgctgctgaaatcacgagcagaaggtatacgagtcagaccaaataacacgcaacaactgccatt

SEQ ID NO: 77140 - DNA, 463 bp, Zea Mays
ggaaagagctaaaaagatggaagaaaagaaagtgtatctgcaactatacgaagcaatggaggcgttggtcaagatcaatctggagaccaacaagatcatggacttcatcaagtttgacgtcggcaacgtggtcatggtgactggcgggaggaacaccggacgtgtaggagtcatcaagaacagggagaagcacaagggcagctttgagaccatccacgtgctgcttggagctttttgctatgtctagttttctcctatttgttgtacatgaaaacatagaatagaattcaaatttggtggtcgcaaaagtgtggagactttaattcatacaaagttaggcttaacattagtgcaaacagttgtattttagtttagatttagagtacacttatgtatgcattgtttgacaatgtttatttatgatatattgaatggtacttaattatattatattaattataat

SEQ ID NO: 77141 - DNA, 593 bp, Zea Mays
ctgggtgaaggggacactgcaaagcttgagattcagattaagttggacaaagagaagaaaatcctctccattcgggataggggtattggaacaggagctgctcgagtctcttgtcgaagctgatacggcaggaaagagctaaaaagatggaagaaaagaaagtgtatctgcaactatacgaagcaatggaggcgttggtcaagatcaatctggagaccaacaagatcatggacttcatcaagtttgacgtcggcaacgtggtcatggtgactggcgggaggaacaccggacgtgtaggagtcatcaagaacagggagaagcacaagggcagctttgagaccatccacgtgctgcttggagctttttgctatgtctagttttctcctatttgttgtacatgaaaacatagaatagaattcaaatttggtggtcgcaaaagtgtggagactttaattcatacaaagttaggcttaacattagtgcaaacagttgtattttagtttagatttagagtacacttatgtatgcattgtttgacaatgtttatttatgatatattgaatggtacttaattatattatattaattataat

SEQ ID NO: 77142 - DNA, 1968 bp, Zea Mays
tgccgctcacctgggctcatcttccagccgccctctccgcccagcagcagagcacaccatcctctcaactcggatccccaagccctcgcctccagctcttgccacggcatccatcccctgctcggacctccacccggccgcgtcctcgccggtggccagcgccgctgcatcgcccttcctagcgtcggccttggcaccgcttccccgagtgccccagtcgagctcgcccatcctctgctctagccctttctccacgccgtcgctgagctcgcccctcccctcagccatggacacgacgacctgcagcccttcttggtggccaagcccatcttcctgctcgcgccccctctttttccacctctgcgcgtatcagctcgtccaacccccatggtgtttcctccctctcggctcccttgctccctccccatggcgttccccctggatgttggtgatctgttccccacggtgcaggcaaatgttctttccctccctgcagcagcaccttggtggttgtcaagcagcacgtcgcgcttgcgcagcctcggtcacgacgttgttcaccccggggaacttggtacagccatccatggtatcagaatatgatctgggaggagaaggggacctgttcaaagctccagaagccatcatcgaggaaccgctgctcctgaactgtctgtctgattctgttaatttgttgctgtgtaggctgggcttgtgccgagcttgaatcctcttgtgaaggagtttctcaatgctgctgatgacaagcggaaggaagtcctctctaaaatagaagaggatgttgctaagctcagcggttctgcagccaactaagaagctacaagtgaatgccgaggagagcagcgatgacttggctaacccaccgaaggtagaggagaagcttggtgctgtccctcatggcctgtccaccgactctgaggttgcccagagggaagccgagtctatctctaggaagactctcaggagctcagccgagaagtttgagttccaagctgaggtttccagactcatggacatcatcatcaactcactctacagcaacaaggatatcttcctgagggagctcatatctaatgcctctgatgtatgtactacatactgacccctgtgtttgttctgcattgtggatgctcgaaattaactgggtgttctacatgtctgtaggctggataagattaggttcctttcccttactgataaggaagttctgggtgaaggggacactgcaaagcttgagattcaggtagatttcaatgttgagagctgttttttttctgttgggcaacgctttagaatcagacctcaaggcatctggtctatgcttatgcagattaagttggacaaagagaagaaaatcctctccattcgggataggggtattggtatgaccaaggaagatcttattaagaaccttggaacgattgctaaatctggcacttcaggaacaggagctgctcgagtctcttgtcgaagctgatacggcaggaaagagctaaaaagatggaagaaaagaaagtgtatctgcaactatacgaagcaatggaggcgttggtcaagatcaatctggagaccaacaagatcatggacttcatcaagtttgacgtcggcaacgtggtcatggtgactggcgggaggaacaccggacgtgtaggagtcatcaagaacagggagaagcacaagggcagctttgagaccatccacgtgctgcttggagctttttgctatgtctagttttctcctatttgttgtacatgaaaacatagaatagaattcaaatttggtggtcgcaaaagtgtggagactttaattcatacaaagttaggcttaacattagtgcaaacagttgtattttagtttagatttagagtacacttatgtatgcattgtttgacaatgtttatttatgatatattgaatggtacttaattatattatattaattataat

SEQ ID NO: 77143 - DNA, 2320 bp, Zea Mays
tgccgctcacctgggctcatcttccagccgccctctccgcccagcagcagagcacaccatcctctcaactcggatccccaagccctcgcctccagctcttgccacggcatccatcccctgctcggacctccacccggccgcgtcctcgccggtggccagcgccgctgcatcgcccttcctagcgtcggccttggcaccgcttccccgagtgccccagtcgagctcgcccatcctctgctctagccctttctccacgccgtcgctgagctcgcccctcccctcagccatggacacgacgacctgcagcccttcttggtggccaagcccatcttcctgctcgcgccccctctttttccacctctgcgcgtatcagctcgtccaacccccatggtgtttcctccctctcggctcccttgctccctccccatggcgttccccctggatgttggtgatctgttccccacggtgcaggcaaatgttctttccctccctgcagcagcaccttggtggttgtcaagcagcacgtcgcgcttgcgcagcctcggtcacgacgttgttcaccccgctaaccattggtgtcatacctcatgtgtcatgtgttcgccgaaatgcctaaacatgtagtctgtcgtcgtcgtatccacagtcaattttagtcatggcttccatttgttagtaaatctgcacttttaggagactcggagttcgtcctagatgcaaaagtaccttgctggttatggagaggtcagctgaagcaggatcaggtggtgttttggaggtagatttaaacattttggaggtggattgaagctttgactggactgaagtttattgcatctggagaacatcatttggctctacctctattttattggggaacttggtacagccatccatggtatcagaatatgatctgggaggagaaggggacctgttcaaagctccagaagccatcatcgaggaaccgctgctcctgaactgtctgtctgattctgttaatttgttgctgtgtaggctgggcttgtgccgagcttgaatcctcttgtgaaggagtttctcaatgctgctgatgacaagcggaaggaagtcctctctaaaatagaagaggatgttgctaagctcagcggttctgcagccaactaagaagctacaagtgaatgccgaggagagcagcgatgacttggctaacccaccgaaggtagaggagaagcttggtgctgtccctcatggcctgtccaccgactctgaggttgcccagagggaagccgagtctatctctaggaagactctcaggagctcagccgagaagtttgagttccaagctgaggtttccagactcatggacatcatcatcaactcactctacagcaacaaggatatcttcctgagggagctcatatctaatgcctctgatgtatgtactacatactgacccctgtgtttgttctgcattgtggatgctcgaaattaactgggtgttctacatgtctgtaggctggataagattaggttcctttcccttactgataaggaagttctgggtgaaggggacactgcaaagcttgagattcaggtagatttcaatgttgagagctgttttttttctgttgggcaacgctttagaatcagacctcaaggcatctggtctatgcttatgcagattaagttggacaaagagaagaaaatcctctccattcgggataggggtattggaacaggagctgctcgagtctcttgtcgaagctgatacggaactgtataggatgttctctaaccaatggccaggccaatgctcgttgtggtttgaaacctttgttcgatatatagtgtgaactctgaattgatgcagagaaggcaggaaagagctaaaaagatggaagaaaagaaagtgtatctgcaactatacgaagcaatggaggcgttggtcaagatcaatctggagaccaacaagatcatggacttcatcaagtttgacgtcggcaacgtggtcatggtgactggcgggaggaacaccggacgtgtaggagtcatcaagaacagggagaagcacaagggcagctttgagaccatccacgtgctgcttggagctttttgctatgtctagttttctcctatttgttgtacatgaaaacatagaatagaattcaaatttggtggtcgcaaaagtgtggagactttaattcatacaaagttaggcttaacattagtgcaaacagttgtattttagtttagatttagagtacacttatgtatgcattgtttgacaatgtttatttatgatatattgaatggtacttaattatattatattaattataat

SEQ ID NO: 77144 - DNA, 2369 bp, Zea Mays
tgccgctcacctgggctcatcttccagccgccctctccgcccagcagcagagcacaccatcctctcaactcggatccccaagccctcgcctccagctcttgccacggcatccatcccctgctcggacctccacccggccgcgtcctcgccggtggccagcgccgctgcatcgcccttcctagcgtcggccttggcaccgcttccccgagtgccccagtcgagctcgcccatcctctgctctagccctttctccacgccgtcgctgagctcgcccctcccctcagccatggacacgacgacctgcagcccttcttggtggccaagcccatcttcctgctcgcgccccctctttttccacctctgcgcgtatcagctcgtccaacccccatggtgtttcctccctctcggctcccttgctccctccccatggcgttccccctggatgttggtgatctgttccccacggtgcaggcaaatgttctttccctccctgcagcagcaccttggtggttgtcaagcagcacgtcgcgcttgcgcagcctcggtcacgacgttgttcaccccgctaaccattggtgtcatacctcatgtgtcatgtgttcgccgaaatgcctaaacatgtagtctgtcgtcgtcgtatccacagtcaattttagtcatgtaaatctgcacttttaggagactcggagttcgtcctagatgcaaaagtaccttgctggttatggagaggtcagctgaaggttggaggatcaggtggtgttttggaggtagatttaaacattttggaggtggattgaagctttgactggactgaagtttattgcatctggagaacatcatttggctctacctctattttattggggaacttggtacagccatccatggtatcagaatatgatctgggaggagaaggggacctgttcaaagctccagaagccatcatcgaggaaccgctgctcctgaactgtctgtctgattctgttaatttgttgctgtgtaggctgggcttgtgccgagcttgaatcctcttgtgaaggagtttctcaatgctgctgatgacaagcggaaggaagtcctctctaaaatagaagaggatgttgctaagctcagcggttctgcagccaactaagaagctacaagtgaatgccgaggagagcagcgatgacttggctaacccaccgaaggtagaggagaagcttggtgctgtccctcatggcctgtccaccgactctgaggttgcccagagggaagccgagtctatctctaggaagactctcaggagctcagccgagaagtttgagttccaagctgaggtttccagactcatggacatcatcatcaactcactctacagcaacaaggatatcttcctgagggagctcatatctaatgcctctgatgtatgtactacatactgacccctgtgtttgttctgcattgtggatgctcgaaattaactgggtgttctacatgtctgtaggctggataagattaggttcctttcccttactgataaggaagttctgggtgaaggggacactgcaaagcttgagattcaggtagatttcaatgttgagagctgttttttttctgttgggcaacgctttagaatcagacctcaaggcatctggtctatgcttatgcagattaagttggacaaagagaagaaaatcctctccattcgggataggggtattggtatgaccaaggaagatcttattaagaaccttggaacgattgctaaatctggcacttcaggaacaggagctgctcgagtctcttgtcgaagctgatacggaactgtataggatgttctctaaccaatggccaggccaatgctcgttgtggtttgaaacctttgttcgatatatagtgtgaactctgaattgatgcagagaaggcaggaaagagctaaaaagatggaagaaaagaaagtgtatctgcaactatacgaagcaatggaggcgttggtcaagatcaatctggagaccaacaagatcatggacttcatcaagtttgacgtcggcaacgtggtcatggtgactggcgggaggaacaccggacgtgtaggagtcatcaagaacagggagaagcacaagggcagctttgagaccatccacgtgctgcttggagctttttgctatgtctagttttctcctatttgttgtacatgaaaacatagaatagaattcaaatttggtggtcgcaaaagtgtggagactttaattcatacaaagttaggcttaacattagtgcaaacagttgtattttagtttagatttagagtacacttatgtatgcattgtttgacaatgtttatttatgatatattgaatggtacttaattatattatattaattataat

SEQ ID NO: 77145 - DNA, 2442 bp, Zea Mays
cagccgtctccttatccctgcgatgccgctcacctgggctcatcttccagccgccctctccgcccagcagcagagcacaccatcctctcaactcggatccccaagccctcgcctccagctcttgccacggcatccatcccctgctcggacctccacccggccgcgtcctcgccggtggccagcgccgctgcatcgcccttcctagcgtcggccttggcaccgcttccccgagtgccccagtcgagctcgcccatcctctgctctagccctttctccacgccgtcgctgagctcgcccctcccctcagccatggacacgacgacctgcagcccttcttggtggccaagcccatcttcctgctcgcgccccctctttttccacctctgcgcgtatcagctcgtccaacccccatggtgtttcctccctctcggctcccttgctccctccccatggcgttccccctggatgttggtgatctgttccccacggtgcaggcaaatgttctttccctccctgcagcagcaccttggtggttgtcaagcagcacgtcgcgcttgcgcagcctcggtcacgacgttgttcaccccgctaaccattggtgtcatacctcatgtgtcatgtgttcgccgaaatgcctaaacatgtagtctgtcgtcgtcgtatccacagtcaattttagtcatggcttccatttgttagtaaatctgcacttttaggagactcggagttcgtcctagatgcaaaagtaccttgctggttatggagaggtcagctgaaggatcaggtggtgttttggaggtagatttaaacattttggaggtggattgaagctttgactggactgaagtttattgcatctggagaacatcatttggctctacctctattttattggggaacttggtacagccatccatggtatcagaatatgatctgggaggagaaggggacctgttcaaagctccagaagccatcatcgaggaaccgctgctcctgaactgtctgtctgattctgttaatttgttgctgtgtaggctgggcttgtgccgagcttgaatcctcttgtgaaggagtttctcaatgctgctgatgacaagcggaaggaagtcctctctaaaatagaagaggatgttgctaagctcagcggttctgcagccaactaagaagctacaagtgaatgccgaggagagcagcgatgacttggctaacccaccgaaggtagaggagaagcttggtgctgtccctcatggcctgtccaccgactctgaggttgcccagagggaagccgagtctatctctaggaagactctcaggagctcagccgagaagtttgagttccaagctgaggtttccagactcatggacatcatcatcaactcactctacagcaacaaggatatcttcctgagggagctcatatctaatgcctctgatgtatgtactacatactgacccctgtgtttgttctgcattgtggatgctcgaaattaactgggtgttctacatgtctgtaggctggataagattaggttcctttcccttactgataaggaagttctgggtgaaggggacactgcaaagcttgagattcaggtagatttcaatgttgagagctgttttttttctgttgggcaacgctttagaatcagacctcaaggcatctggtctatgcttatgcagattaagttggacaaagagaagaaaatcctctccattcgggataggggtattggaacaggagctgctcgagtctcttgtcgaagctgatacggtgagttctctgtgatgattggtctcagtattgtactgggtttcagtgtgtctgctcagagtcttagcccgttgaatccatagtttgtctgtttttcaccaggaactgtataggatgttctctaaccaatggccaggccaatgctcgttgtggtttgaaacctttgttcgatatatagtgtgaactctgaattgatgcagagaaggcaggaaagagctaaaaagatggaagaaaagaaagtgtatctgcaactatacgaagcaatggaggcgttggtcaagatcaatctggagaccaacaagatcatggacttcatcaagtttgacgtcggcaacgtggtcatggtgactggcgggaggaacaccggacgtgtaggagtcatcaagaacagggagaagcacaagggcagctttgagaccatccacgtgctgcttggagctttttgctatgtctagttttctcctatttgttgtacatgaaaacatagaatagaattcaaatttggtggtcgcaaaagtgtggagactttaattcatacaaagttaggcttaacattagtgcaaacagttgtattttagtttagatttagagtacacttatgtatgcattgtttgacaatgtttatttatgatatattgaatggtacttaattatattatattaattataat

SEQ ID NO: 77146 - DNA, 2124 bp, Zea Mays
catcttcaagccagccgtctccttatccctgcgatgccgctcacctgggctcatcttccagccgccctctccgcccagcagcagagcacaccatcctctcaactcggatccccaagccctcgcctccagctcttgccacggcatccatcccctgctcggacctccacccggccgcgtcctcgccggtggccagcgccgctgcatcgcccttcctagcgtcggccttggcaccgcttccccgagtgccccagtcgagctcgcccatcctctgctctagccctttctccacgccgtcgctgagctcgcccctcccctcagccatggacacgacgacctgcagcccttcttggtggccaagcccatcttcctgctcgcgccccctctttttccacctctgcgcgtatcagctcgtccaacccccatggtgtttcctccctctcggctcccttgctccctccccatggcgttccccctggatgttggtgatctgttccccacggtgcaggcaaatgttctttccctccctgcagcagcaccttggtggttgtcaagcagcacgtcgcgcttgcgcagcctcggtcacgacgttgttcaccccggggaacttggtacagccatccatggtatcagaatatgatctgggaggagaaggggacctgttcaaagctccagaagccatcatcgaggaaccgctgctcctgaactgtctgtctgattctgttaatttgttgctgtgtaggctgggcttgtgccgagcttgaatcctcttgtgaaggagtttctcaatgctgctgatgacaagcggaaggaagtcctctctaaaatagaagaggatgttgctaagctcagcggttctgcagccaactaagaagctacaagtgaatgccgaggagagcagcgatgacttggctaacccaccgaaggtagaggagaagcttggtgctgtccctcatggcctgtccaccgactctgaggttgcccagagggaagccgagtctatctctaggaagactctcaggagctcagccgagaagtttgagttccaagctgaggtttccagactcatggacatcatcatcaactcactctacagcaacaaggatatcttcctgagggagctcatatctaatgcctctgatgtatgtactacatactgacccctgtgtttgttctgcattgtggatgctcgaaattaactgggtgttctacatgtctgtaggctggataagattaggttcctttcccttactgataaggaagttctgggtgaaggggacactgcaaagcttgagattcaggtagatttcaatgttgagagctgttttttttctgttgggcaacgctttagaatcagacctcaaggcatctggtctatgcttatgcagattaagttggacaaagagaagaaaatcctctccattcgggataggggtattggtatgaccaaggaagatcttattaagaaccttggaacgattgctaaatctggcacttcaggaacaggagctgctcgagtctcttgtcgaagctgatacgtttgtctgtttttcaccaggaactgtataggatgttctctaaccaatggccaggccaatgctcgttgtggtttgaaacctttgttcgatatatagtgtgaactctgaattgatgcagagaaggcaggaaagagctaaaaagatggaagaaaagaaagtgtatctgcaactatacgaagcaatggaggcgttggtcaagatcaatctggagaccaacaagatcatggacttcatcaagtttgacgtcggcaacgtggtcatggtgactggcgggaggaacaccggacgtgtaggagtcatcaagaacagggagaagcacaagggcagctttgagaccatccacgtgctgcttggagctttttgctatgtctagttttctcctatttgttgtacatgaaaacatagaatagaattcaaatttggtggtcgcaaaagtgtggagactttaattcatacaaagttaggcttaacattagtgcaaacagttgtattttagtttagatttagagtacacttatgtatgcattgtttgacaatgtttatttatgatatattgaatggtacttaattatattatattaattataat

SEQ ID NO: 77147 - DNA, 2379 bp, Zea Mays
ccccttcgtacttgctcccagccaaatcattcacgtatccatcttcaagccagccgtctccttatccctgcgatgccgctcacctgggctcatcttccagccgccctctccgcccagcagcagagcacaccatcctctcaactcggatccccaagccctcgcctccagctcttgccacggcatccatcccctgctcggacctccacccggccgcgtcctcgccggtggccagcgccgctgcatcgcccttcctagcgtcggccttggcaccgcttccccgagtgccccagtcgagctcgcccatcctctgctctagccctttctccacgccgtcgctgagctcgcccctcccctcagccatggacacgacgacctgcagcccttcttggtggccaagcccatcttcctgctcgcgccccctctttttccacctctgcgcgtatcagctcgtccaacccccatggtgtttcctccctctcggctcccttgctccctccccatggcgttccccctggatgttggtgatctgttccccacggtgcaggcaaatgttctttccctccctgcagcagcaccttggtggttgtcaagcagcacgtcgcgcttgcgcagcctcggtcacgacgttgttcaccccgctaaccattggtgtcatacctcatgtgtcatgtgttcgccgaaatgcctaaacatgtagtctgtcgtcgtcgtatccacagtcaattttagtcatggcttccatttgttagtaaatctgcacttttaggagactcggagttcgtcctagatgcaaaagtaccttgctggttatggagaggatcaggtggtgttttggaggtagatttaaacattttggaggtggattgaagctttgactggactgaagtttattgcatctggagaacatcatttggctctacctctattttattggggaacttggtacagccatccatggtatcagaatatgatctgggaggagaaggggacctgttcaaagctccagaagccatcatcgaggaaccgctgctcctgaactgtctgtctgattctgttaatttgttgctgtgtaggctgggcttgtgccgagcttgaatcctcttgtgaaggagtttctcaatgctgctgatgacaagcggaaggaagtcctctctaaaatagaagaggatgttgctaagctcagcggttctgcagccaactaagaagctacaagtgaatgccgaggagagcagcgatgacttggctaacccaccgaaggtagaggagaagcttggtgctgtccctcatggcctgtccaccgactctgaggttgcccagagggaagccgagtctatctctaggaagactctcaggagctcagccgagaagtttgagttccaagctgaggtttccagactcatggacatcatcatcaactcactctacagcaacaaggatatcttcctgagggagctcatatctaatgcctctgatgtatgtactacatactgacccctgtgtttgttctgcattgtggatgctcgaaattaactgggtgttctacatgtctgtaggctggataagattaggttcctttcccttactgataaggaagttctgggtgaaggggacactgcaaagcttgagattcaggtagatttcaatgttgagagctgttttttttctgttgggcaacgctttagaatcagacctcaaggcatctggtctatgcttatgcagattaagttggacaaagagaagaaaatcctctccattcgggataggggtattggaacaggagctgctcgagtctcttgtcgaagctgatacggaactgtataggatgttctctaaccaatggccaggccaatgctcgttgtggtttgaaacctttgttcgatatatagtgtgaactctgaattgatgcagagaaggcaggaaagagctaaaaagatggaagaaaagaaagtgtatctgcaactatacgaagcaatggaggcgttggtcaagatcaatctggagaccaacaagatcatggacttcatcaagtttgacgtcggcaacgtggtcatggtgactggcgggaggaacaccggacgtgtaggagtcatcaagaacagggagaagcacaagggcagctttgagaccatccacgtgctgcttggagctttttgctatgtctagttttctcctatttgttgtacatgaaaacatagaatagaattcaaatttggtggtcgcaaaagtgtggagactttaattcatacaaagttaggcttaacattagtgcaaacagttgtattttagtttagatttagagtacacttatgtatgcattgtttgacaatgtttatttatgatatattgaatggtacttaattatattatattaattataat

SEQ ID NO: 77148 - DNA, 3460 bp, Zea Mays
gcatcgtcctcgtcgccgccacagagcccctcgtctcggccgcccttcgccgcctccgcggagcaggcatcgcaggagaccaaagatccggccagctctgatgtcaggagctagtggctcaaccgggcgcgcggccccgcggtacgccccggatgacctgacgttgctcaagccgtggcgcggcctcgtcgacggcaccaccggctacctgtactactggaacccggagacgaacgtcacgcagtacgagcggcctatgccccctgagaatcagctgcccccgcccccgcccccgttgcctcccccgcctccccggagccgcgaccggcgcgacaggtccagatcccgatcccgcacccctcccaggcgcgaccgccgcgaccgcgaccgtgacgacgagcatgcgtcctccaagacggcgtcttcccaccaccatccggctccgatagccgtcgccgactatccgtccaccgaggcataccgacgccgccatgagatcaccgtcacgggggataacgtgccggctccaataacttcatttgaggctggtggcttcccatcagaaattctgaaggaggtatggttccataggtgaacccacataactcatgatctaattctaaccctaacaaagttgcatgcgagggaccaaggtcttcaagtatggcgagggaaatggatcgtgcacatgtgctccagttgcctgcttgtttctctttatttgcttcattgtgctaaatcagcgctggctatgtgtaccgactgcttatctccatctgtggcagatgcgatatctgctccgagggggagctaatgtcgtatgctgcctcgcgcgcccttggccaatctataagtgagatgagctgagggcaggtcttgctgatggagctgccaaggtgggtgaacgctcgaggttgctcgcttcctccctggggggccgcccatggagcggaggagggccacccactcgtggcacccacggtggctgatttgtcgctctgcgtccaattcttggaaaaggctccttgcatggatgatgggcttcttctggggcttgacccatggaggtctggcccaggctgtcaacgcccatccatatataggatcgggtggcagctgctggaaggggccttgtggatcaacggtctatgcctgaatacaacgtgctggatttgcaagcccaacacctatccaagcgcagtcatggccaattgctatgcaaaatcaagatgtagtagctattgcgaagactggatcaggcaaaactcttggttatctacttcctggatttatgcatatcaagcgcctgcagaacagcactaggaatggtccaacagtgctagttttggccccaacaagggaacttgcaacgcagattctggatgaagctatgaaatttggaagatcatctagaatttcttgcacgtgcctatacggtggtgctcctaaaggtcctcagttgagagatttagatagaggggttgatgttgttgttgcaacacctggaaggttaaatgacattttggagatgcgaagggtaagtcttaagcaagtgtcatatcttgttctggatgaggctgatcgcatgctggacatgggctttgagccacaaatacggaagatagtgaaagagatacctcaccgtcggcaaacccttatgtacaccgctacttggcccaaggaagtccggaggattgcagatgatcttcttgtccatcctttacagcatatagaagtcataacaccctcagaaaaacaacggcgcctggagcagatattacgatcccaggtttcaggttcaaagatattaatattttgtaccaccaagaggatgtgtgaccaacttgcaaggacactcaccaggcagtttggagcttcagccattcatggtgacaagtcccaaagtgaaagggagaaggtcctgaatcattttagatctgggcgctctcctattttagtggcaactgatgttgctgcgcgaggtttggacatcaaagatatcagggtagtgatcaactatgacttccccactggtgttgaagactatgttcacaggattggcaggacaggaagggctggtgccactggtgttgcatatacatttttctgtgatcaggactcaaaatatgctgctgacctaatcaaaattcttgaaggggcaaaccaacaggtgccccgtgatttagaggatatggcttctcgtggtggtgggcgaggtaagaagaggaaccgttgggcatcccgctctgaaaggggtggtccacgatctgaactggattcaaggtacagcggcagagatggattagcatcttccgggagatcagagagtggtcgtggcagtcatggaagggatgattatggtagccgtggcaggtatgactctggtgaaactgatgggcgatctcgtaggtctgctagaggtcgcagtagaagtcgtagcccaagccccaagaggtcacaccatcatgaagctaggcgtagccgaagcaggagcaggagccgaagctgtagaaactttcgtgctagccgcagcaagagtcacagccctgttgctagcagtaggcatgaaaaggctgctgttatttcaggatctactcaacctaacttggggtatgcagagcacaaaagccctccaagatctcactctggggatgaccatgtgaaccaccctgatcaaaaggatgaccacatgggagatgggaagatggaaagggttgatcttgatcgctcgcccagcccacaatatgataagtctgctccatatagtcctgcgtacaatggcaaagccagtgactcgatgagccctaatgttcagccaaaggcagatgccaaatatgtcaaaccttctgggaaacctgagcctgcatctccattgcgccacagcaaaggcagagatgatgatgaaggtatcatagacgacgatggagagattgctgagggtgagatgatgatgaaggtatcatagacgaggatggagagattgctgagcgtgatttgcgtgcaagtgcagctgtgtagagaatggtaataactgacggagaatggcctgcatcttctgtgacaacaagactgttatgcaaactgcagtcgttcccatctgcaagagtccagaatgtagaaatgcatttgtgccattaaatgtctcgtaggacctatgataatacatctgccatatatgaacaaaaactgttgatgtatgtcctgttgtttgttaaacttcaatgacttgtgttctggtgtcttactgctagttctgttaagtgatttatgataaaacatattgtcaggtctggaagtgataaatttatgatacttgtcaggtctggaagtagtttattatattggcagctccctggttggagattcctaggattgcaaaacctggcttgtttgagagcaagggcattggaggggattgatccccttactatcttatagcctgatttgttgtgttgttttt

SEQ ID NO: 77149 - DNA, 2669 bp, Zea Mays
gcatcgtcctcgtcgccgccacagagcccctcgtctcggccgcccttcgccgcctccgcggagcaggcatcgcaggagaccaaagatccggccagctctgatgtcaggagctagtggctcaaccgggcgcgcggccccgcggtacgccccggatgacctgacgttgctcaagccgtggcgcggcctcgtcgacggcaccaccggctacctgtactactggaacccggagacgaacgtcacgcagtacgagcggcctatgccccctgagaatcagctgcccccgcccccgcccccgttgcctcccccgcctccccggagccgcgaccggcgcgacaggtccagatcccgatcccgcacccctcccaggcgcgaccgccgcgaccgcgaccgtgacgacgagcatgcgtcctccaagacggcgtcttcccaccaccatccggctccgatagccgtcgccgactatccgtccaccgaggcataccgacgccgccatgagatcaccgtcacgggggataacgtgccggctccaataacttcatttgaggctggtggcttcccatcagaaattctgaaggagatacaacgtgctggatttgcaagcccaacacctatccaagcgcagtcatggccaattgctatgcaaaatcaagatgtagtagctattgcgaagactggatcaggcaaaactcttggttatctacttcctggatttatgcatatcaagcgcctgcagaacagcactaggaatggtccaacagtgctagttttggccccaacaagggaacttgcaacgcagattctggatgaagctatgaaatttggaagatcatctagaatttcttgcacgtgcctatacggtggtgctcctaaaggtcctcagttgagagatttagatagaggggttgatgttgttgttgcaacacctggaaggttaaatgacattttggagatgcgaagggtgacaattggaaatgttgatgaacttgttgctaatagtgctattactcagcatatagaagtcataacaccctcagaaaaacaacggcgcctggagcagatattacgatcccaggcagtttggagcttcagccattcatggtgacaagtcccaaagtgaaagggagaaggtcctgaatcattttagatctgggcgctctcctattttagtggcaactgatgttgctgcgcgaggtttggacatcaaagatatcagggtagtgatcaactatgacttccccactggtgttgaagactatgttcacaggattggcaggacaggaagggctggtgccactggtgttgcatatacatttttctgtgatcaggactcaaaatatgctgctgacctaatcaaaattcttgaaggggcaaaccaacaggtgccccgtgatttagaggatatggcttctcgtggtggtgggcgaggtaagaagaggaaccgttgggcatcccgctctgaaaggggtggtccacgatctgaactggattcaaggtacagcggcagagatggattagcatcttccgggagatcagagagtggtcgtggcagtcatggaagggatgattatggtagccgtggcaggtatgactctggtgaaactgatgggcgatctcgtaggtctgctagaggtcgcagtagaagtcgtagcccaagccccaagaggtcacaccatcatgaagctaggcgtagccgaagcaggagcaggagccgaagctgtagaaactttcgtgctagccgcagcaagagtcacagccctgttgctagcagtaggcatgaaaaggctgctgttatttcaggatctactcaacctaacttggggtatgcagagcacaaaagccctccaagatctcactctggggatgaccatgtgaaccaccctgatcaaaaggatgaccacatgggagatgggaagatggaaagggttgatcttgatcgctcgcccagcccacaatatgataagtctgctccatatagtcctgcgtacaatggcaaagccagtgactcgatgagccctaatgttcagccaaaggcagatgccaaatatgtcaaaccttctgggaaacctgagcctgcatctccattgcgccacagcaaaggcagagatgatgatgaaggtatcatagacgacgatggagagattgctgagggtgagatgatgatgaaggtatcatagacgaggatggagagattgctgagcgtgatttgcgtgcaagtgcagctgtgtagagaatggtaataactgacggagaatggcctgcatcttctgtgacaacaagactgttatgcaaactgcagtcgttcccatctgcaagagtccagaatgtagaaatgcatttgtgccattaaatgtctcgtaggacctatgataatacatctgccatatatgaacaaaaactgttgatgtatgtcctgttgtttgttaaacttcaatgacttgtgttctggtgtcttactgctagttctgttaagtgatttatgataaaacatattgtcaggtctggaagtgataaatttatgatacttgtcaggtctggaagtagtttattatattggcagctccctggttggagattcctaggattgcaaaacctggcttgtttgagagcaagggcattggaggggattgatccccttactatcttatagcctgatttgttgtgttgttttt

SEQ ID NO: 77150 - DNA, 3265 bp, Zea Mays
gcatcgtcctcgtcgccgccacagagcccctcgtctcggccgcccttcgccgcctccgcggagcaggcatcgcaggagaccaaagatccggccagctctgatgtcaggagctagtggctcaaccgggcgcgcggccccgcggtacgccccggatgacctgacgttgctcaagccgtggcgcggcctcgtcgacggcaccaccggctacctgtactactggaacccggagacgaacgtcacgcagtacgagcggcctatgccccctgagaatcagctgcccccgcccccgcccccgttgcctcccccgcctccccggagccgcgaccggcgcgacaggtccagatcccgatcccgcacccctcccaggcgcgaccgccgcgaccgcgaccgtgacgacgagcatgcgtcctccaagacggcgtcttcccaccaccatccggctccgatagccgtcgccgactatccgtccaccgaggcataccgacgccgccatgagatcaccgtcacgggggataacgtgccggctccaataacttcatttgaggctggtggcttcccatcagaaattctgaaggagttgcatgcgagggaccaaggtcttcaagtatggcgagggaaatggatcgtgcacatgtgctccagttgcctgcttgtttctctttatttgcttcattgtgctaaatcagcgctggctatgtgtaccgactgcttatctccatctgtggcagatgcgatatctgctccgagggggagctaatgtcgtatgctgcctcgcgcgcccttggccaatctataagtgagatgagctgagggcaggtcttgctgatggagctgccaaggtgggtgaacgctcgaggttgctcgcttcctccctggggggccgcccatggagcggaggagggccacccactcgtggcacccacggtggctgatttgtcgctctgcgtccaattcttggaaaaggctccttgcatggatgatgggcttcttctggggcttgacccatggaggtctggcccaggctgtcaacgcccatccatatataggatcgggtggcagctgctggaaggggccttgtggatcaacggtctatgcctgaatacaacgtgctggatttgcaagcccaacacctatccaagcgcagtcatggccaattgctatgcaaaatcaagatgtagtagctattgcgaagactggatcaggcaaaactcttggttatctacttcctggatttatgcatatcaagcgcctgcagaacagcactaggaatggtccaacagtgctagttttggccccaacaagggaacttgcaacgcagattctggatgaagctatgaaatttggaagatcatctagaatttcttgcacgtgcctatacggtggtgctcctaaaggtcctcagttgagagatttagatagaggggttgatgttgttgttgcaacacctggaaggttaaatgacattttggagatgcgaagggtgacaattggaaatgttgatgaacttgttgctaatagtgctattactcagcatatagaagtcataacaccctcagaaaaacaacggcgcctggagcagatattacgatcccaggtttcaggttcaaagatattaatattttgtaccaccaagaggatgtgtgaccaacttgcaaggacactcaccaggcagtttggagcttcagccattcatggtgacaagtcccaaagtgaaagggagaaggtcctgaatcattttagatctgggcgctctcctattttagtggcaactgatgttgctgcgcgaggtttggacatcaaagatatcagggtagtgatcaactatgacttccccactggtgttgaagactatgttcacaggattggcaggacaggaagggctggtgccactggtgttgcatatacatttttctgtgatcaggactcaaaatatgctgctgacctaatcaaaattcttgaaggggcaaaccaacaggtgccccgtgatttagaggatatggcttctcgtggtggtgggcgaggtaagaagaggaaccgttgggcatcccgctctgaaaggggtggtccacgatctgaactggattcaaggtacagcggcagagatggattagcatcttccgggagatcagagagtggtcgtggcagtcatggaagggatgattatggtagccgtggcaggtatgactctggtgaaactgatgggcgatctcgtaggtctgctagaggtcgcagtagaagtcgtagcccaagccccaagaggtcacaccatcatgaagctaggcgtagccgaagcaggagcaggagccgaagctgtagaaactttcgtgctagccgcagcaagagtcacagccctgttgctagcagtaggcatgaaaaggctgctgttatttcaggatctactcaacctaacttggggtatgcagagcacaaaagccctccaagatctcactctggggatgaccatgtgaaccaccctgatcaaaaggatgaccacatgggagatgggaagatggaaagggttgatcttgatcgctcgcccagcccacaatatgataagtctgctccatatagtcctgcgtacaatggcaaagccagtgactcgatgagccctaatgttcagccaaaggcagatgccaaatatgtcaaaccttctgggaaacctgagcctgcatctccattgcgccacagcaaaggcagagatgatgatgaaggtatcatagacgacgatggagagattgctgagggtgagatgatgatgaaggtatcatagacgaggatggagagattgctgagcgtgatttgcgtgcaagtgcagctgtgtagagaatggtaataactgacggagaatggcctgcatcttctgtgacaacaagactgttatgcaaactgcagtcgttcccatctgcaagagtccagaatgtagaaatgcatttgtgccattaaatgtctcgtaggacctatgataatacatctgccatatatgaacaaaaactgttgatgtatgtcctgttgtttgttaaacttcaatgacttgtgttctggtgtcttactgctagttctgttaagtgatttatgataaaacatattgtcaggtctggaagtgataaatttatgatacttgtcaggtctggaagtagtttattatattggcagctccctggttggagattcctaggattgcaaaacctggcttgtttgagagcaagggcattggaggggattgatccccttactatcttatagcctgatttgttgtgttgttttt

SEQ ID NO: 77151 - DNA, 3510 bp, Zea Mays
caagaccacaaatccaaacccccgcatcgtcctcgtcgccgccacagagcccctcgtctcggccgcccttcgccgcctccgcggagcaggcatcgcaggagaccaaagatccggccagctctgatgtcaggagctagtggctcaaccgggcgcgcggccccgcggtacgccccggatgacctgacgttgctcaagccgtggcgcggcctcgtcgacggcaccaccggctacctgtactactggaacccggagacgaacgtcacgcagtacgagcggcctatgccccctgagaatcagctgcccccgcccccgcccccgttgcctcccccgcctccccggagccgcgaccggcgcgacaggtccagatcccgatcccgcacccctcccaggcgcgaccgccgcgaccgcgaccgtgacgacgagcatgcgtcctccaagacggcgtcttcccaccaccatccggctccgatagccgtcgccgactatccgtccaccgaggcataccgacgccgccatgagatcaccgtcacgggggataacgtgccggctccaataacttcatttgaggctggtggcttcccatcagaaattctgaaggagatgcgatatctgctccgagggggagctaatgtcgtatgctgcctcgcgcgcccttggccaatctataagtgagatgagctgagggcaggtcttgctgatggagctgccaaggtgggtgaacgctcgaggttgctcgcttcctccctggggggccgcccatggagcggaggagggccacccactcgtggcacccacggtggctgatttgtcgctctgcgtccaattcttggaaaaggctccttgcatggatgatgggcttcttctggggcttgacccatggaggtctggcccaggctgtcaacgcccatccatatataggatcgggtggcagctgctggaaggggccttgtggatcaacggtctatgcctgagtgagcctccatggactctgttagagctttttctacttcgccttgtgtgcgcaagtctacacattgcgggaacattttatttgtatggccttaaattgtcctcatgcattgtctttatttgtgcaacaaagagttcaaaggggatatgtttaatcaaatttaaccacttatatgaattcttacattgtctttatttcccttgtttgttgctattcccccattttactttctgaagatacaacgtgctggatttgcaagcccaacacctatccaagcgcagtcatggccaattgctatgcaaaatcaagatgtagtagctattgcgaagactggatcaggcaaaactcttggttatctacttcctggatttatgcatatcaagcgcctgcagaacagcactaggaatggtccaacagtgctagttttggccccaacaagggaacttgcaacgcagattctggatgaagctatgaaatttggaagatcatctagaatttcttgcacgtgcctatacggtggtgctcctaaaggtcctcagttgagagatttagatagaggggttgatgttgttgttgcaacacctggaaggttaaatgacattttggagatgcgaagggtaagtcttaagcaagtgtcatatcttgttctggatgaggctgatcgcatgctggacatgggctttgagccacaaatacggaagatagtgaaagagatacctcaccgtcggcaaacccttatgtacaccgctacttggcccaaggaagtccggaggattgcagatgatcttcttgtccatcctttacagcatatagaagtcataacaccctcagaaaaacaacggcgcctggagcagatattacgatcccaggtttcaggttcaaagatattaatattttgtaccaccaagaggatgtgtgaccaacttgcaaggacactcaccaggcagtttggagcttcagccattcatggtgacaagtcccaaagtgaaagggagaaggtcctgaatcattttagatctgggcgctctcctattttagtggcaactgatgttgctgcgcgaggtttggacatcaaagatatcagggtagtgatcaactatgacttccccactggtgttgaagactatgttcacaggattggcaggacaggaagggctggtgccactggtgttgcatatacatttttctgtgatcaggactcaaaatatgctgctgacctaatcaaaattcttgaaggggcaaaccaacaggtgccccgtgatttagaggatatggcttctcgtggtggtgggcgaggtaagaagaggaaccgttgggcatcccgctctgaaaggggtggtccacgatctgaactggattcaaggtacagcggcagagatggattagcatcttccgggagatcagagagtggtcgtggcagtcatggaagggatgattatggtagccgtggcaggtatgactctggtgaaactgatgggcgatctcgtaggtctgctagaggtcgcagtagaagtcgtagcccaagccccaagaggtcacaccatcatgaagctaggcgtagccgaagcaggagcaggagccgaagctgtagaaactttcgtgctagccgcagcaagagtcacagccctgttgctagcagtaggcatgaaaaggctgctgttatttcaggatctactcaacctaacttggggtatgcagagcacaaaagccctccaagatctcactctggggatgaccatgtgaaccaccctgatcaaaaggatgaccacatgggagatgggaagatggaaagggttgatcttgatcgctcgcccagcccacaatatgataagtctgctccatatagtcctgcgtacaatggcaaagccagtgactcgatgagccctaatgttcagccaaaggcagatgccaaatatgtcaaaccttctgggaaacctgagcctgcatctccattgcgccacagcaaaggcagagatgatgatgaaggtatcatagacgacgatggagagattgctgagggtgagatgatgatgaaggtatcatagacgaggatggagagattgctgagcgtgatttgcgtgcaagtgcagctgtgtagagaatggtaataactgacggagaatggcctgcatcttctgtgacaacaagactgttatgcaaactgcagtcgttcccatctgcaagagtccagaatgtagaaatgcatttgtgccattaaatgtctcgtaggacctatgataatacatctgccatatatgaacaaaaactgttgatgtatgtcctgttgtttgttaaacttcaatgacttgtgttctggtgtcttactgctagttctgttaagtgatttatgataaaacatattgtcaggtctggaagtgataaatttatgatacttgtcaggtctggaagtagtttattatattggcagctccctggttggagattcctaggattgcaaaacctggcttgtttgagagcaagggcattggaggggattgatccccttactatcttatagcctgatttgttgtgttgttttt

SEQ ID NO: 77152 - DNA, 2504 bp, Zea Mays
aaacagggcaagaccacaaatccaaacccccgcatcgtcctcgtcgccgccacagagcccctcgtctcggccgcccttcgccgcctccgcggagcaggcatcgcaggagaccaaagatccggccagctctgatgtcaggagctagtggctcaaccgggcgcgcggccccgcggtacgccccggatgacctgacgttgctcaagccgtggcgcggcctcgtcgacggcaccaccggctacctgtactactggaacccggagacgaacgtcacgcagtacgagcggcctatgccccctgagaatcagctgcccccgcccccgcccccgttgcctcccccgcctccccggagccgcgaccggcgcgacaggtccagatcccgatcccgcacccctcccaggcgcgaccgccgcgaccgcgaccgtgacgacgagcatgcgtcctccaagacggcgtcttcccaccaccatccggctccgatagccgtcgccgactatccgtccaccgaggcataccgacgccgccatgagatcaccgtcacgggggataacgtgccggctccaataacttcatttgaggctggtggcttcccatcagaaattctgaaggagtgcctatacggtggtgctcctaaaggtcctcagttgagagatttagatagaggggttgatgttgttgttgcaacacctggaaggttaaatgacattttggagatgcgaagggtgacaattggaaatgttgatgaacttgttgctaatagtgctattactcagcatatagaagtcataacaccctcagaaaaacaacggcgcctggagcagatattacgatcccaggtttcaggttcaaagatattaatattttgtaccaccaagaggatgtgtgaccaacttgcaaggacactcaccaggcagtttggagcttcagccattcatggtgacaagtcccaaagtgaaagggagaaggtcctgaatcattttagatctgggcgctctcctattttagtggcaactgatgttgctgcgcgaggtttggacatcaaagatatcagggtagtgatcaactatgacttccccactggtgttgaagactatgttcacaggattggcaggacaggaagggctggtgccactggtgttgcatatacatttttctgtgatcaggactcaaaatatgctgctgacctaatcaaaattcttgaaggggcaaaccaacaggtgccccgtgatttagaggatatggcttctcgtggtggtgggcgaggtaagaagaggaaccgttgggcatcccgctctgaaaggggtggtccacgatctgaactggattcaaggtacagcggcagagatggattagcatcttccgggagatcagagagtggtcgtggcagtcatggaagggatgattatggtagccgtggcaggtatgactctggtgaaactgatgggcgatctcgtaggtctgctagaggtcgcagtagaagtcgtagcccaagccccaagaggtcacaccatcatgaagctaggcgtagccgaagcaggagcaggagccgaagctgtagaaactttcgtgctagccgcagcaagagtcacagccctgttgctagcagtaggcatgaaaaggctgctgttatttcaggatctactcaacctaacttggggtatgcagagcacaaaagccctccaagatctcactctggggatgaccatgtgaaccaccctgatcaaaaggatgaccacatgggagatgggaagatggaaagggttgatcttgatcgctcgcccagcccacaatatgataagtctgctccatatagtcctgcgtacaatggcaaagccagtgactcgatgagccctaatgttcagccaaaggcagatgccaaatatgtcaaaccttctgggaaacctgagcctgcatctccattgcgccacagcaaaggcagagatgatgatgaaggtatcatagacgacgatggagagattgctgagggtgagatgatgatgaaggtatcatagacgaggatggagagattgctgagcgtgatttgcgtgcaagtgcagctgtgtagagaatggtaataactgacggagaatggcctgcatcttctgtgacaacaagactgttatgcaaactgcagtcgttcccatctgcaagagtccagaatgtagaaatgcatttgtgccattaaatgtctcgtaggacctatgataatacatctgccatatatgaacaaaaactgttgatgtatgtcctgttgtttgttaaacttcaatgacttgtgttctggtgtcttactgctagttctgttaagtgatttatgataaaacatattgtcaggtctggaagtgataaatttatgatacttgtcaggtctggaagtagtttattatattggcagctccctggttggagattcctaggattgcaaaacctggcttgtttgagagcaagggcattggaggggattgatccccttactatcttatagcctgatttgttgtgttgttttt

SEQ ID NO: 77153 - DNA, 3618 bp, Zea Mays
aaacagggcaagaccacaaatccaaacccccgcatcgtcctcgtcgccgccacagagcccctcgtctcggccgcccttcgccgcctccgcggagcaggcatcgcaggagaccaaagatccggccagctctgatgtcaggagctagtggctcaaccgggcgcgcggccccgcggtacgccccggatgacctgacgttgctcaagccgtggcgcggcctcgtcgacggcaccaccggctacctgtactactggaacccggagacgaacgtcacgcagtacgagcggcctatgccccctgagaatcagctgcccccgcccccgcccccgttgcctcccccgcctccccggagccgcgaccggcgcgacaggtccagatcccgatcccgcacccctcccaggcgcgaccgccgcgaccgcgaccgtgacgacgagcatgcgtcctccaagacggcgtcttcccaccaccatccggctccgatagccgtcgccgactatccgtccaccgaggcataccgacgccgccatgagatcaccgtcacgggggataacgtgccggctccaataacttcatttgaggctggtggcttcccatcagaaattctgaaggagatgcgatatctgctccgagggggagctaatgtcgtatgctgcctcgcgcgcccttggccaatctataagtgagatgagctgagggcaggtcttgctgatggagctgccaaggtgggtgaacgctcgaggttgctcgcttcctccctggggggccgcccatggagcggaggagggccacccactcgtggcacccacggtggctgatttgtcgctctgcgtccaattcttggaaaaggctccttgcatggatgatgggcttcttctggggcttgacccatggaggtctggcccaggctgtcaacgcccatccatatataggatcgggtggcagctgctggaaggggccttgtggatcaacggtctatgcctgagtgagcctccatggactctgttagagctttttctacttcgccttgtgtgcgcaagtctacacattgcgggaacattttatttgtatggccttaaattgtcctcatgcattgtctttatttgtgcaacaaagagttcaaaggggatatgtttaatcaaatttaaccacttatatgaattcttacattgtctttatttcccttgtttgttgctattcccccattttactttctgaagatacaacgtgctggatttgcaagcccaacacctatccaagcgcagtcatggccaattgctatgcaaaatcaagatgtagtagctattgcgaagactggatcaggcaaaactcttggttatctacttcctggatttatgcatatcaagcgcctgcagaacagcactaggaatggtccaacagtgctagttttggccccaacaagggaacttgcaacgcagattctggatgaagctatgaaatttggaagatcatctagaatttcttgcacggtttgttctgtctgtatctattttaatatacaaatggtcacgattttatgttttaccaggttattaattcaaaaaaccttctgaggaatgtttaaactgttgaccatgtgttgaagttatattgtgaattattatattgtacttgttgatctgtgtgactgtctaatgtttgtctcactgtcatgatctctggtttatatattcattgtttaacctttggttcttgatctgcttgtagtgcctatacggtggtgctcctaaaggtcctcagttgagagatttagatagaggggttgatgttgttgttgcaacacctggaaggttaaatgacattttggagatgcgaagggtgacaattggaaatgttgatgaacttgttgctaatagtgctattactcagcatatagaagtcataacaccctcagaaaaacaacggcgcctggagcagatattacgatcccaggtttcaggttcaaagatattaatattttgtaccaccaagaggatgtgtgaccaacttgcaaggacactcaccaggcagtttggagcttcagccattcatggtgacaagtcccaaagtgaaagggagaaggtcctgaatcattttagatctgggcgctctcctattttagtggcaactgatgttgctgcgcgaggtttggacatcaaagatatcagggtagtgatcaactatgacttccccactggtgttgaagactatgttcacaggattggcaggacaggaagggctggtgccactggtgttgcatatacatttttctgtgatcaggactcaaaatatgctgctgacctaatcaaaattcttgaaggggcaaaccaacaggtgccccgtgatttagaggatatggcttctcgtggtggtgggcgaggtaagaagaggaaccgttgggcatcccgctctgaaaggggtggtccacgatctgaactggattcaaggtacagcggcagagatggattagcatcttccgggagatcagagagtggtcgtggcagtcatggaagggatgattatggtagccgtggcaggtatgactctggtgaaactgatgggcgatctcgtaggtctgctagaggtcgcagtagaagtcgtagcccaagccccaagaggtcacaccatcatgaagctaggcgtagccgaagcaggagcaggagccgaagctgtagaaactttcgtgctagccgcagcaagagtcacagccctgttgctagcagtaggcatgaaaaggctgctgttatttcaggatctactcaacctaacttggggtatgcagagcacaaaagccctccaagatctcactctggggatgaccatgtgaaccaccctgatcaaaaggatgaccacatgggagatgggaagatggaaagggttgatcttgatcgctcgcccagcccacaatatgataagtctgctccatatagtcctgcgtacaatggcaaagccagtgactcgatgagccctaatgttcagccaaaggcagatgccaaatatgtcaaaccttctgggaaacctgagcctgcatctccattgcgccacagcaaaggcagagatgatgatgaaggtatcatagacgacgatggagagattgctgagggtgagatgatgatgaaggtatcatagacgaggatggagagattgctgagcgtgatttgcgtgcaagtgcagctgtgtagagaatggtaataactgacggagaatggcctgcatcttctgtgacaacaagactgttatgcaaactgcagtcgttcccatctgcaagagtccagaatgtagaaatgcatttgtgccattaaatgtctcgtaggacctatgataatacatctgccatatatgaacaaaaactgttgatgtatgtcctgttgtttgttaaacttcaatgacttgtgttctggtgtcttactgctagttctgttaagtgatttatgataaaacatattgtcaggtctggaagtgataaatttatgatacttgtcaggtctggaagtagtttattatattggcagctccctggttggagattcctaggattgcaaaacctggcttgtttgagagcaagggcattggaggggattgatccccttactatcttatagcctgatttgttgtgttgttttt

SEQ ID NO: 77154 - DNA, 3159 bp, Zea Mays
aaacagggcaagaccacaaatccaaacccccgcatcgtcctcgtcgccgccacagagcccctcgtctcggccgcccttcgccgcctccgcggagcaggcatcgcaggagaccaaagatccggccagctctgatgtcaggagctagtggctcaaccgggcgcgcggccccgcggtacgccccggatgacctgacgttgctcaagccgtggcgcggcctcgtcgacggcaccaccggctacctgtactactggaacccggagacgaacgtcacgcagtacgagcggcctatgccccctgagaatcagctgcccccgcccccgcccccgttgcctcccccgcctccccggagccgcgaccggcgcgacaggtccagatcccgatcccgcacccctcccaggcgcgaccgccgcgaccgcgaccgtgacgacgagcatgcgtcctccaagacggcgtcttcccaccaccatccggctccgatagccgtcgccgactatccgtccaccgaggcataccgacgccgccatgagatcaccgtcacgggggataacgtgccggctccaataacttcatttgaggctggtggcttcccatcagaaattctgaaggaggtatggttccatagatgcgatatctgctccgagggggagctaatgtcgtatgctgcctcgcgcgcccttggccaatctataagtgagatgagctgagggcaggtcttgctgatggagctgccaaggtgggtgaacgctcgaggttgctcgcttcctccctggggggccgcccatggagcggaggagggccacccactcgtggcacccacggtggctgatttgtcgctctgcgtccaattcttggaaaaggctccttgcatggatgatgggcttcttctggggcttgacccatggaggtctggcccaggctgtcaacgcccatccatatataggatcgggtggcagctgctggaaggggccttgtggatcaacggtctatgcctgaatacaacgtgctggatttgcaagcccaacacctatccaagcgcagtcatggccaattgctatgcaaaatcaagatgtagtagctattgcgaagactggatcaggcaaaactcttggttatctacttcctggatttatgcatatcaagcgcctgcagaacagcactaggaatggtccaacagtgctagttttggccccaacaagggaacttgcaacgcagattctggatgaagctatgaaatttggaagatcatctagaatttcttgcacgtgcctatacggtggtgctcctaaaggtcctcagttgagagatttagatagaggggttgatgttgttgttgcaacacctggaaggttaaatgacattttggagatgcgaagggtgacaattggaaatgttgatgaacttgttgctaatagtgctattactcagcatatagaagtcataacaccctcagaaaaacaacggcgcctggagcagatattacgatcccaggtttcaggttcaaagatattaatattttgtaccaccaagaggatgtgtgaccaacttgcaaggacactcaccaggcagtttggagcttcagccattcatggtgacaagtcccaaagtgaaagggagaaggtcctgaatcattttagatctgggcgctctcctattttagtggcaactgatgttgctgcgcgaggtttggacatcaaagatatcagggtagtgatcaactatgacttccccactggtgttgaagactatgttcacaggattggcaggacaggaagggctggtgccactggtgttgcatatacatttttctgtgatcaggactcaaaatatgctgctgacctaatcaaaattcttgaaggggcaaaccaacaggtgccccgtgatttagaggatatggcttctcgtggtggtgggcgaggtaagaagaggaaccgttgggcatcccgctctgaaaggggtggtccacgatctgaactggattcaaggtacagcggcagagatggattagcatcttccgggagatcagagagtggtcgtggcagtcatggaagggatgattatggtagccgtggcaggtatgactctggtgaaactgatgggcgatctcgtaggtctgctagaggtcgcagtagaagtcgtagcccaagccccaagaggtcacaccatcatgaagctaggcgtagccgaagcaggagcaggagccgaagctgtagaaactttcgtgctagccgcagcaagagtcacagccctgttgctagcagtaggcatgaaaaggctgctgttatttcaggatctactcaacctaacttggggtatgcagagcacaaaagccctccaagatctcactctggggatgaccatgtgaaccaccctgatcaaaaggatgaccacatgggagatgggaagatggaaagggttgatcttgatcgctcgcccagcccacaatatgataagtctgctccatatagtcctgcgtacaatggcaaagccagtgactcgatgagccctaatgttcagccaaaggcagatgccaaatatgtcaaaccttctgggaaacctgagcctgcatctccattgcgccacagcaaaggcagagatgatgatgaaggtatcatagacgacgatggagagattgctgagggtgagatgatgatgaaggtatcatagacgaggatggagagattgctgagcgtgatttgcgtgcaagtgcagctgtgtagagaatggtaataactgacggagaatggcctgcatcttctgtgacaacaagactgttatgcaaactgcagtcgttcccatctgcaagagtccagaatgtagaaatgcatttgtgccattaaatgtctcgtaggacctatgataatacatctgccatatatgaacaaaaactgttgatgtatgtcctgttgtttgttaaacttcaatgacttgtgttctggtgtcttactgctagttctgttaagtgatttatgataaaacatattgtcaggtctggaagtgataaatttatgatacttgtcaggtctggaagtagtttattatattggcagctccctggttggagattcctaggattgcaaaacctggcttgtttgagagcaagggcattggaggggattgatccccttactatcttatagcctgatttgttgtgttgttttt

SEQ ID NO: 77155 - DNA, 3306 bp, Zea Mays
aaaaaaaacgcaagaaaacagggcaagaccacaaatccaaacccccgcatcgtcctcgtcgccgccacagagcccctcgtctcggccgcccttcgccgcctccgcggagcaggcatcgcaggagaccaaagatccggccagctctgatgtcaggagctagtggctcaaccgggcgcgcggccccgcggtacgccccggatgacctgacgttgctcaagccgtggcgcggcctcgtcgacggcaccaccggctacctgtactactggaacccggagacgaacgtcacgcagtacgagcggcctatgccccctgagaatcagctgcccccgcccccgcccccgttgcctcccccgcctccccggagccgcgaccggcgcgacaggtccagatcccgatcccgcacccctcccaggcgcgaccgccgcgaccgcgaccgtgacgacgagcatgcgtcctccaagacggcgtcttcccaccaccatccggctccgatagccgtcgccgactatccgtccaccgaggcataccgacgccgccatgagatcaccgtcacgggggataacgtgccggctccaataacttcatttgaggctggtggcttcccatcagaaattctgaaggagttgcatgcgagggaccaaggtcttcaagtatggcgagggaaatggatcgtgcacatgtgctccaatgcgatatctgctccgagggggagctaatgtcgtatgctgcctcgcgcgcccttggccaatctataagtgagatgagctgagggcaggtcttgctgatggagctgccaaggtgggtgaacgctcgaggttgctcgcttcctccctggggggccgcccatggagcggaggagggccacccactcgtggcacccacggtggctgatttgtcgctctgcgtccaattcttggaaaaggctccttgcatggatgatgggcttcttctggggcttgacccatggaggtctggcccaggctgtcaacgcccatccatatataggatcgggtggcagctgctggaaggggccttgtggatcaacggtctatgcctgagtgagcctccatggactctgttagagctttttctacttcgccttgtgtgcgcaagtctacacattgcgggaacattttatttatacaacgtgctggatttgcaagcccaacacctatccaagcgcagtcatggccaattgctatgcaaaatcaagatgtagtagctattgcgaagactggatcaggcaaaactcttggttatctacttcctggatttatgcatatcaagcgcctgcagaacagcactaggaatggtccaacagtgctagttttggccccaacaagggaacttgcaacgcagattctggatgaagctatgaaatttggaagatcatctagaatttcttgcacgtgcctatacggtggtgctcctaaaggtcctcagttgagagatttagatagaggggttgatgttgttgttgcaacacctggaaggttaaatgacattttggagatgcgaagggtgacaattggaaatgttgatgaacttgttgctaatagtgctattactcagcatatagaagtcataacaccctcagaaaaacaacggcgcctggagcagatattacgatcccaggtttcaggttcaaagatattaatattttgtaccaccaagaggatgtgtgaccaacttgcaaggacactcaccaggcagtttggagcttcagccattcatggtgacaagtcccaaagtgaaagggagaaggtcctgaatcattttagatctgggcgctctcctattttagtggcaactgatgttgctgcgcgaggtttggacatcaaagatatcagggtagtgatcaactatgacttccccactggtgttgaagactatgttcacaggattggcaggacaggaagggctggtgccactggtgttgcatatacatttttctgtgatcaggactcaaaatatgctgctgacctaatcaaaattcttgaaggggcaaaccaacaggtgccccgtgatttagaggatatggcttctcgtggtggtgggcgaggtaagaagaggaaccgttgggcatcccgctctgaaaggggtggtccacgatctgaactggattcaaggtacagcggcagagatggattagcatcttccgggagatcagagagtggtcgtggcagtcatggaagggatgattatggtagccgtggcaggtatgactctggtgaaactgatgggcgatctcgtaggtctgctagaggtcgcagtagaagtcgtagcccaagccccaagaggtcacaccatcatgaagctaggcgtagccgaagcaggagcaggagccgaagctgtagaaactttcgtgctagccgcagcaagagtcacagccctgttgctagcagtaggcatgaaaaggctgctgttatttcaggatctactcaacctaacttggggtatgcagagcacaaaagccctccaagatctcactctggggatgaccatgtgaaccaccctgatcaaaaggatgaccacatgggagatgggaagatggaaagggttgatcttgatcgctcgcccagcccacaatatgataagtctgctccatatagtcctgcgtacaatggcaaagccagtgactcgatgagccctaatgttcagccaaaggcagatgccaaatatgtcaaaccttctgggaaacctgagcctgcatctccattgcgccacagcaaaggcagagatgatgatgaaggtatcatagacgacgatggagagattgctgagggtgagatgatgatgaaggtatcatagacgaggatggagagattgctgagcgtgatttgcgtgcaagtgcagctgtgtagagaatggtaataactgacggagaatggcctgcatcttctgtgacaacaagactgttatgcaaactgcagtcgttcccatctgcaagagtccagaatgtagaaatgcatttgtgccattaaatgtctcgtaggacctatgataatacatctgccatatatgaacaaaaactgttgatgtatgtcctgttgtttgttaaacttcaatgacttgtgttctggtgtcttactgctagttctgttaagtgatttatgataaaacatattgtcaggtctggaagtgataaatttatgatacttgtcaggtctggaagtagtttattatattggcagctccctggttggagattcctaggattgcaaaacctggcttgtttgagagcaagggcattggaggggattgatccccttactatcttatagcctgatttgttgtgttgttttt

SEQ ID NO: 77156 - DNA, 3598 bp, Zea Mays
aaaaaaaacgcaagaaaacagggcaagaccacaaatccaaacccccgcatcgtcctcgtcgccgccacagagcccctcgtctcggccgcccttcgccgcctccgcggagcaggcatcgcaggagaccaaagatccggccagctctgatgtcaggagctagtggctcaaccgggcgcgcggccccgcggtacgccccggatgacctgacgttgctcaagccgtggcgcggcctcgtcgacggcaccaccggctacctgtactactggaacccggagacgaacgtcacgcagtacgagcggcctatgccccctgagaatcagctgcccccgcccccgcccccgttgcctcccccgcctccccggagccgcgaccggcgcgacaggtccagatcccgatcccgcacccctcccaggcgcgaccgccgcgaccgcgaccgtgacgacgagcatgcgtcctccaagacggcgtcttcccaccaccatccggctccgatagccgtcgccgactatccgtccaccgaggcataccgacgccgccatgagatcaccgtcacgggggataacgtgccggctccaataacttcatttgaggctggtggcttcccatcagaaattctgaaggaggtatggttccatagatgcgatatctgctccgagggggagctaatgtcgtatgctgcctcgcgcgcccttggccaatctataagtgagatgagctgagggcaggtcttgctgatggagctgccaaggtgggtgaacgctcgaggttgctcgcttcctccctggggggccgcccatggagcggaggagggccacccactcgtggcacccacggtggctgatttgtcgctctgcgtccaattcttggaaaaggctccttgcatggatgatgggcttcttctggggcttgacccatggaggtctggcccaggctgtcaacgcccatccatatataggatcgggtggcagctgctggaaggggccttgtggatcaacggtctatgcctgagtgagcctccatggactctgttagagctttttctacttcgccttgtgtgcgcaagtctacacattgcgggaacattttatttgtatggccttaaattgtcctcatgcattgtctttatttgtgcaacaaagagttcaaaggggatatgtttaatcaaatttaaccacttatatgaattcttacattgtctttatttcccttgtttgttgctattcccccattttactttctgaagatacaacgtgctggatttgcaagcccaacacctatccaagcgcagtcatggccaattgctatgcaaaatcaagatgtagtagctattgcgaagactggatcaggcaaaactcttggttatctacttcctggatttatgcatatcaagcgcctgcagaacagcactaggaatggtccaacagtgctagttttggccccaacaagggaacttgcaacgcagattctggatgaagctatgaaatttggaagatcatctagaatttcttgcacgtgcctatacggtggtgctcctaaaggtcctcagttgagagatttagatagaggggttgatgttgttgttgcaacacctggaaggttaaatgacattttggagatgcgaagggtaagtcttaagcaagtgtcatatcttgttctggatgaggctgatcgcatgctggacatgggctttgagccacaaatacggaagatagtgaaagagatacctcaccgtcggcaaacccttatgtacaccgctacttggcccaaggaagtccggaggattgcagatgatcttcttgtccatcctttacaggtgacaattggaaatgttgatgaacttgttgctaatagtgctattactcagcatatagaagtcataacaccctcagaaaaacaacggcgcctggagcagatattacgatcccaggtttcaggttcaaagatattaatattttgtaccaccaagaggatgtgtgaccaacttgcaaggacactcaccaggcagtttggagcttcagccattcatggtgacaagtcccaaagtgaaagggagaaggtcctgaatcattttagatctgggcgctctcctattttagtggcaactgatgttgctgcgcgaggtttggacatcaaagatatcagggtagtgatcaactatgacttccccactggtgttgaagactatgttcacaggattggcaggacaggaagggctggtgccactggtgttgcatatacatttttctgtgatcaggactcaaaatatgctgctgacctaatcaaaattcttgaaggggcaaaccaacaggtgccccgtgatttagaggatatggcttctcgtggtggtgggcgaggtaagaagaggaaccgttgggcatcccgctctgaaaggggtggtccacgatctgaactggattcaaggtacagcggcagagatggattagcatcttccgggagatcagagagtggtcgtggcagtcatggaagggatgattatggtagccgtggcaggtatgactctggtgaaactgatgggcgatctcgtaggtctgctagaggtcgcagtagaagtcgtagcccaagccccaagaggtcacaccatcatgaagctaggcgtagccgaagcaggagcaggagccgaagctgtagaaactttcgtgctagccgcagcaagagtcacagccctgttgctagcagtaggcatgaaaaggctgctgttatttcaggatctactcaacctaacttggggtatgcagagcacaaaagccctccaagatctcactctggggatgaccatgtgaaccaccctgatcaaaaggatgaccacatgggagatgggaagatggaaagggttgatcttgatcgctcgcccagcccacaatatgataagtctgctccatatagtcctgcgtacaatggcaaagccagtgactcgatgagccctaatgttcagccaaaggcagatgccaaatatgtcaaaccttctgggaaacctgagcctgcatctccattgcgccacagcaaaggcagagatgatgatgaaggtatcatagacgacgatggagagattgctgagggtgagatgatgatgaaggtatcatagacgaggatggagagattgctgagcgtgatttgcgtgcaagtgcagctgtgtagagaatggtaataactgacggagaatggcctgcatcttctgtgacaacaagactgttatgcaaactgcagtcgttcccatctgcaagagtccagaatgtagaaatgcatttgtgccattaaatgtctcgtaggacctatgataatacatctgccatatatgaacaaaaactgttgatgtatgtcctgttgtttgttaaacttcaatgacttgtgttctggtgtcttactgctagttctgttaagtgatttatgataaaacatattgtcaggtctggaagtgataaatttatgatacttgtcaggtctggaagtagtttattatattggcagctccctggttggagattcctaggattgcaaaacctggcttgtttgagagcaagggcattggaggggattgatccccttactatcttatagcctgatttgttgtgttgttttt

SEQ ID NO: 77157 - DNA, 3575 bp, Zea Mays
aaaaaaaacgcaagaaaacagggcaagaccacaaatccaaacccccgcatcgtcctcgtcgccgccacagagcccctcgtctcggccgcccttcgccgcctccgcggagcaggcatcgcaggagaccaaagatccggccagctctgatgtcaggagctagtggctcaaccgggcgcgcggccccgcggtacgccccggatgacctgacgttgctcaagccgtggcgcggcctcgtcgacggcaccaccggctacctgtactactggaacccggagacgaacgtcacgcagtacgagcggcctatgccccctgagaatcagctgcccccgcccccgcccccgttgcctcccccgcctccccggagccgcgaccggcgcgacaggtccagatcccgatcccgcacccctcccaggcgcgaccgccgcgaccgcgaccgtgacgacgagcatgcgtcctccaagacggcgtcttcccaccaccatccggctccgatagccgtcgccgactatccgtccaccgaggcataccgacgccgccatgagatcaccgtcacgggggataacgtgccggctccaataacttcatttgaggctggtggcttcccatcagaaattctgaaggagttgcatgcgagggaccaaggtcttcaagtatggcgagggaaatggatcgtgcacatgtgctccagttgcctgcttgtttctctttatttgcttcattgtgctaaatcagcgctggctatgtgtaccgactgcttatctccatctgtggcagatgcgatatctgctccgagggggagctaatgtcgtatgctgcctcgcgcgcccttggccaatctataagtgagatgagctgagggcaggtcttgctgatggagctgccaaggtgggtgaacgctcgaggttgctcgcttcctccctggggggccgcccatggagcggaggagggccacccactcgtggcacccacggtggctgatttgtcgctctgcgtccaattcttggaaaaggctccttgcatggatgatgggcttcttctggggcttgacccatggaggtctggcccaggctgtcaacgcccatccatatataggatcgggtggcagctgctggaaggggccttgtggatcaacggtctatgcctgagtgagcctccatggactctgttagagctttttctacttcgccttgtgtgcgcaagtctacacattgcgggaacattttatttatacaacgtgctggatttgcaagcccaacacctatccaagcgcagtcatggccaattgctatgcaaaatcaagatgtagtagctattgcgaagactggatcaggcaaaactcttggttatctacttcctggatttatgcatatcaagcgcctgcagaacagcactaggaatggtccaacagtgctagttttggccccaacaagggaacttgcaacgcagattctggatgaagctatgaaatttggaagatcatctagaatttcttgcacgtgcctatacggtggtgctcctaaaggtcctcagttgagagatttagatagaggggttgatgttgttgttgcaacacctggaaggttaaatgacattttggagatgcgaagggtaagtcttaagcaagtgtcatatcttgttctggatgaggctgatcgcatgctggacatgggctttgagccacaaatacggaagatagtgaaagagatacctcaccgtcggcaaacccttatgtacaccgctacttggcccaaggaagtccggaggattgcagatgatcttcttgtccatcctttacaggtgacaattggaaatgttgatgaacttgttgctaatagtgctattactcagaagtcataacaccctcagaaaaacaacggcgcctggagcagatattacgatcccaggtttcaggttcaaagatattaatattttgtaccaccaagaggatgtgtgaccaacttgcaaggacactcaccaggcagtttggagcttcagccattcatggtgacaagtcccaaagtgaaagggagaaggtcctgaatcattttagatctgggcgctctcctattttagtggcaactgatgttgctgcgcgaggtttggacatcaaagatatcagggtagtgatcaactatgacttccccactggtgttgaagactatgttcacaggattggcaggacaggaagggctggtgccactggtgttgcatatacatttttctgtgatcaggactcaaaatatgctgctgacctaatcaaaattcttgaaggggcaaaccaacaggtgccccgtgatttagaggatatggcttctcgtggtggtgggcgaggtaagaagaggaaccgttgggcatcccgctctgaaaggggtggtccacgatctgaactggattcaaggtacagcggcagagatggattagcatcttccgggagatcagagagtggtcgtggcagtcatggaagggatgattatggtagccgtggcaggtatgactctggtgaaactgatgggcgatctcgtaggtctgctagaggtcgcagtagaagtcgtagcccaagccccaagaggtcacaccatcatgaagctaggcgtagccgaagcaggagcaggagccgaagctgtagaaactttcgtgctagccgcagcaagagtcacagccctgttgctagcagtaggcatgaaaaggctgctgttatttcaggatctactcaacctaacttggggtatgcagagcacaaaagccctccaagatctcactctggggatgaccatgtgaaccaccctgatcaaaaggatgaccacatgggagatgggaagatggaaagggttgatcttgatcgctcgcccagcccacaatatgataagtctgctccatatagtcctgcgtacaatggcaaagccagtgactcgatgagccctaatgttcagccaaaggcagatgccaaatatgtcaaaccttctgggaaacctgagcctgcatctccattgcgccacagcaaaggcagagatgatgatgaaggtatcatagacgacgatggagagattgctgagggtgagatgatgatgaaggtatcatagacgaggatggagagattgctgagcgtgatttgcgtgcaagtgcagctgtgtagagaatggtaataactgacggagaatggcctgcatcttctgtgacaacaagactgttatgcaaactgcagtcgttcccatctgcaagagtccagaatgtagaaatgcatttgtgccattaaatgtctcgtaggacctatgataatacatctgccatatatgaacaaaaactgttgatgtatgtcctgttgtttgttaaacttcaatgacttgtgttctggtgtcttactgctagttctgttaagtgatttatgataaaacatattgtcaggtctggaagtgataaatttatgatacttgtcaggtctggaagtagtttattatattggcagctccctggttggagattcctaggattgcaaaacctggcttgtttgagagcaagggcattggaggggattgatccccttactatcttatagcctgatttgttgtgttgttttt

SEQ ID NO: 77158 - DNA, 3347 bp, Zea Mays
gtttaaggtctctcggacatgtcctaactcctcgagctaaaaaaaaaacgcaagaaaacagggcaagaccacaaatccaaacccccgcatcgtcctcgtcgccgccacagagcccctcgtctcggccgcccttcgccgcctccgcggagcaggcatcgcaggagaccaaagatccggccagctctgatgtcaggagctagtggctcaaccgggcgcgcggccccgcggtacgccccggatgacctgacgttgctcaagccgtggcgcggcctcgtcgacggcaccaccggctacctgtactactggaacccggagacgaacgtcacgcagtacgagcggcctatgccccctgagaatcagctgcccccgcccccgcccccgttgcctcccccgcctccccggagccgcgaccggcgcgacaggtccagatcccgatcccgcacccctcccaggcgcgaccgccgcgaccgcgaccgtgacgacgagcatgcgtcctccaagacggcgtcttcccaccaccatccggctccgatagccgtcgccgactatccgtccaccgaggcataccgacgccgccatgagatcaccgtcacgggggataacgtgccggctccaataacttcatttgaggctggtggcttcccatcagaaattctgaaggagatgcgatatctgctccgagggggagctaatgtcgtatgctgcctcgcgcgcccttggccaatctataagtgagatgagctgagggcaggtcttgctgatggagctgccaaggctccttgcatggatgatgggcttcttctggggcttgacccatggaggtctggcccaggctgtcaacgcccatccatatataggatcgggtggcagctgctggaaggggccttgtggatcaacggtctatgcctgagtgagcctccatggactctgttagagctttttctacttcgccttgtgtgcgcaagtctacacattgcgggaacattttatttatacaacgtgctggatttgcaagcccaacacctatccaagcgcagtcatggccaattgctatgcaaaatcaagatgtagtagctattgcgaagactggatcaggcaaaactcttggttatctacttcctggatttatgcatatcaagcgcctgcagaacagcactaggaatggtccaacagtgctagttttggccccaacaagggaacttgcaacgcagattctggatgaagctatgaaatttggaagatcatctagaatttcttgcacgtgcctatacggtggtgctcctaaaggtcctcagttgagagatttagatagaggggttgatgttgttgttgcaacacctggaaggttaaatgacattttggagatgcgaagggtaagtcttaagcaagtgtcatatcttgttctggatgaggctgatcgcatgctggacatgggctttgagccacaaatacggaagatagtgaaagagatacctcaccgtcggcaaacccttatgtacaccgctacttggcccaaggaagtccggaggattgcagatgatcttcttgtccatcctttacaggtgacaattggaaatgttgatgaacttgttgctaatagtgctattactcagcatatagaagtcataacaccctcagaaaaacaacggcgcctggagcagatattacgatcccaggtttcaggttcaaagatattaatattttgtaccaccaagaggatgtgtgaccaacttgcaaggacactcaccaggcagtttggagcttcagccattcatggtgacaagtcccaaagtgaaagggagaaggtcctgaatcattttagatctgggcgctctcctattttagtggcaactgatgttgctgcgcgaggtttggacatcaaagatatcagggtagtgatcaactatgacttccccactggtgttgaagactatgttcacaggattggcaggacaggaagggctggtgccactggtgttgcatatacatttttctgtgatcaggactcaaaatatgctgctgacctaatcaaaattcttgaaggggcaaaccaacaggtgccccgtgatttagaggatatggcttctcgtggtggtgggcgaggtaagaagaggaaccgttgggcatcccgctctgaaaggggtggtccacgatctgaactggattcaaggtacagcggcagagatggattagcatcttccgggagatcagagagtggtcgtggcagtcatggaagggatgattatggtagccgtggcaggtatgactctggtgaaactgatgggcgatctcgtaggtctgctagaggtcgcagtagaagtcgtagcccaagccccaagaggtcacaccatcatgaagctaggcgtagccgaagcaggagcaggagccgaagctgtagaaactttcgtgctagccgcagcaagagtcacagccctgttgctagcagtaggcatgaaaaggctgctgttatttcaggatctactcaacctaacttggggtatgcagagcacaaaagccctccaagatctcactctggggatgaccatgtgaaccaccctgatcaaaaggatgaccacatgggagatgggaagatggaaagggttgatcttgatcgctcgcccagcccacaatatgataagtctgctccatatagtcctgcgtacaatggcaaagccagtgactcgatgagccctaatgttcagccaaaggcagatgccaaatatgtcaaaccttctgggaaacctgagcctgcatctccattgcgccacagcaaaggcagagatgatgatgaaggtatcatagacgacgatggagagattgctgagggtgagatgatgatgaaggtatcatagacgaggatggagagattgctgagcgtgatttgcgtgcaagtgcagctgtgtagagaatggtaataactgacggagaatggcctgcatcttctgtgacaacaagactgttatgcaaactgcagtcgttcccatctgcaagagtccagaatgtagaaatgcatttgtgccattaaatgtctcgtaggacctatgataatacatctgccatatatgaacaaaaactgttgatgtatgtcctgttgtttgttaaacttcaatgacttgtgttctggtgtcttactgctagttctgttaagtgatttatgataaaacatattgtcaggtctggaagtgataaatttatgatacttgtcaggtctggaagtagtttattatattggcagctccctggttggagattcctaggattgcaaaacctggcttgtttgagagcaagggcattggaggggattgatccccttactatcttatagcctgatttgttgtgttgttttt

SEQ ID NO: 77159 - DNA, 2272 bp, Zea Mays
atattttctgtctgtagcactgaacatcatcagtctatcttacttgctgtgttggactttgccacagtgactggtataatcttgagaaatctaaacgtgtgaagtcatttcgttgtggagaatatgatgaatgtatagaaaaagccaaggctctagttcgccggcaaaagaagacacatactgaagggagatatgttcgcagagaggatgccattatgcatgcccttgaaatcgaaaggtctcattttccaaataactgtgatgatcttgaagaggacgcggacaatgatatatgtgcatcccagaatatatgttctgcaaagtctataaatataaatgggctcagcaaaaaatctcgtggtgcaaggagtttgtatgatatagaaataaattcagctcaagagttgtctcaaacattgacactgtataaacagccacaaaatttatcctcttcaagcactaggtatgcatcgtcaaaaaggaagaagtggaagggacataaagatcatgaggatgattcagttcatggattccagcgtatgagagatcttagggagattggaacaaaaaatgttttcaagcagaagtctggttcaggaattgtttcagatgtacctcttcttgaaagtggatcaagctttggctatgatttgtccagtgccgatgggataaaattgggtgagcagtcccagtcatccataaaaaagaaacggtccaatattgggcaatcctatgatagtttgagtaagaaagataagcatcaccctctatcactgttatgtgaagattcagaagtgtctggaacttattatcattgggacccttcaggccagtcttgtagtcaatacccaggaggccagatacccaatttggttgaatcaagtaggagggcaaaaactatttttccaactgatgtaaataactgttcctacagctcaggcacttcaagtttggatacattattagatacatcacacatcaatcataaacgttctctaaatgctgttactcccaagaatgctgacccatgcacagctagatttctcaatgatgactgccctgattgtgatggatttcttgatgctgttactttggaggaggatgttctagaggaaggccatttggatacttatggatcttgtgcatccataaaggatcaaatttcaaaactgggtaatcaaagtactggctgtggcataggtggcacatcttcaactcggcataatcgaaattctaagaaaaacataacggctgtcaattttttgatacctaaaggaagccacaagagggatacaaattcgctgctgcaacatgaagggattataaaatcggaaggtactgtctttaggcctgctgaacttgaggataatgcacatgtgactcctgagcatgacgagtcctctgaaactataagcaatctttcaaactatgagaagaacacaacatcattccccaattatgttccacttcaattactaccaccgcctggacagcggcctgatcctaaacctccaggatgccctgtaacgaatccaaccaggagagcacgtgcagattatagactatatgatgttgaggtgactgtccaaagaagctacaagggtcatcatgcgccccttatttccctcatgagtaaatggacaggtaaaccaattgtggggtaccctgtcaccctggaggttttgaaggatagccgtcacacaacaagtagagatgagcaccgcccggtgatgggcagtctggactccttactaaagagcagagtttcagagccacggcaagcaagatcttcacatgcatcacgatcaaaatttaaatccagtggacgtaaaaaggccacagagcatgatttggacaggtcttggtggccccataccaagaaaccagcatcttcgccgaggaaaatgcggaggctatcatctttcgccggcagccggagagagagtgcagaccaaaagcccgtagttgcaaaaactggcggaccagcagtcgcgtgcgtcccgcttcgtctcgttttcagtaggatcaatgaagcactaagctttcccttgagacaagaaaagaccacctgagggcttcatgcaactacttgcaactttgagctctactgtgtagatgcttgtctgctaattctgtgacatcaccggtgcagatttgtcacatcgcatcgaagcacgtggcacccagactttggaatgggagaggcatgtgggcactggacaggcattatgcaatttagtcagataatggtctagtacatgataggttcgct

SEQ ID NO: 77160 - DNA, 1337 bp, Zea Mays
cacacttccgttgcattttcagatattttctgtctgtagcactgaacatcatcagtctatcttacttgctgtgttggactttgccacagtgactggtataatcttgagaaatctaaacgtgtgaagtcatttcgttgtggagaatatgatgaatgtatagaaaaagccaaggctctagttcgccggcaaaagaagacacatactgaagggagatatgttcgcagagaggatgccattatgcatgcccttgaaatcgaaaggtctcattttccaaataactgtgatgatcttgaagaggacgcggacaatgatatatgtgcatcccagaatatatgttctgcaaagtctataaatataaatgggctcagcaaaaaatctcgtggtgcaaggagtttgtatgatatagaaataaattcagctcaagagttgtctcaaacattgacactgtataaacagccacaaaatttatcctcttcaagcactaggtatgcatcgtcaaaaaggaagaagtggaagggacataaagatcatgaggatgattcagttcatggattccagcgtatgagagatcttagggagattggaacaaaaaatgttttcaagcagaagtctggttcaggaattgtttcagatgtacctcttcttgaaagtggatcaagctttggctatgatttgtccagtgccgatgggataaaattgggtgagcagtcccagtcatccataaaaaagaaacggtccaatattgggcaatcctatgatagtttgagtaagaaagataagcatcaccctctatcactgttatgtgaagattcagaagtgtctggaacttattatcattgggacccttcaggccagtcttgtagtcaatacccaggaggccagatacccaatttggttgaatcaagtaggagggcaaaaactatttttccaactgatgtaaataactgttcctacagctcaggcacttcaagtttggatacattattagatacatcacacatcaatcataaacgttctctaaatgctgttactcccaagaatgctgacccatgcacagctagatttctcaatgatgactgccctgattgtgatggatttcttgatgctgttactttggaggaggatgttctagaggaagggcttcatgcaactacttgcaactttgagctctactgtgtagatgcttgtctgctaattctgtgacatcaccggtgcagatttgtcacatcgcatcgaagcacgtggcacccagactttggaatgggagaggcatgtgggcactggacaggcattatgcaatttagtcagataatggtctagtacatgataggttcgct

SEQ ID NO: 77161 - DNA, 1157 bp, Zea Mays
atgggagcgaccaaggatgtcctgtccctctacgccgtgaaccatctgtgcgccgtggcccaacttttctccacgtccgctggagcggaggcccaggcaagcgacaaactgtccaaccctaaacaactgggcccgtttgtagcggagacaaagcaaccaccacctccggagacgcgggtggcgtggccttcgtggttcgtggcgttgctgtcctggccggctggaccgggctggcaggcaaagcgactacctcttcaagctgctcctcatcggggactccggtgttgggaagtcttgcctgctgctgaggtttgcggatgattcatatctggagagctatatcagtactattggagttgattttaaaatccgcaccgttgagcaagatgggaagacaataaagctacagatttgggatactgctggccaagaacgctttaggaccatcacaagcagctactaccgtggagctcatggcattattgttgtgtatgatgtaactgaccaggagagctttaacaatgtcaagcagtggctgaatgaaattgataggtatgccagtgaaaatgtgaacaagcttttggtggggaacaagtgtgacctggctgagaacagagtagtttcttacgaggctggcaaggcccttgctgatgacatcggaataccattccttgagactagtgccaaggatgcaacaaatgtggagaaggcattcatgaccatggcaggggagataaagaacaggatggcaagtcaaccagctgcaagtggtgctagtaggcctgcaactgtgcaaatgcggggtcagcctgtttctcagcaaagcagctgctgctcttgatcgtctgtctagatcacagtagtgtgattgtgcagcaagcgaaacttaaattggttgctccgtgtacattaagcctattactgtcccaaagaactcgatgttatctatcggatactggaagtctgtctatcgactgcaacgcttaagcagatatggcctgttttatctgcctgttcttattccagtgctaatgtgatgttggatcaaatcgtttgtcagttcagcagtacgctaatgatgcgtgtgcgctggagtcaggaggatattattttgatgatgagcactcgttaaactgtctatgttgtctcaacgtagc

SEQ ID NO: 77162 - DNA, 3040 bp, Zea Mays
ccgcggtgcccccggcctccctctcactgcgcgttcgcattcgccaattccgccgcctcctcctcctcctcccctgtgtccgagatctcgcatccgctccatctatggaaggccaccacacgccgtgcccagccatcctcggattccgccaccccatcctcggattccaagcgtcgtccaccccacgtgcccctgcccgacgaccccgttcctcgcggcgcttggcttcagcgccgcgaccgccgcgccatccccacccagcacccatccgcaaacccactcccatgactgcccccgcctgaagaccccgttccccgcgacttcggtgccgcgaccatcgcgccatccccacccatccgcaaccccgctcccccgccgcgccatccccacccattcacaaccccatcccctgccgcccctcacgtgatcacccattcgcgacctgccccctcccctcccccgatgggacagggagcagcaaggtcaccaccggagacgacctcgatgggtggcggcgccgaggacggaggtggtgtcacagtctatgggaggaaggagatcatgatgggggagcagtgccagtcgatggacttctctggggtcatctactacgacgctgaaggccaccacgtcgcacaaccgccgccgcggcgctagcctgatgcccgcctccgtgacctcgccgccaatgcccacaccgcgctcgtcttcagtgggctggacagtgataccccgcgacggtggtgtagtgggagtgggacggcgaggaggttaagggcggcgacggcgaggtgcagagctcctacgggctccgccatcaacactatggatacactccaagaggccccttcaggaggatgaacagatttccagcaccctgttttcaacaccgaggaggatgaacattctacgaaatcaaaaggaccccttaagttctacaactcggagatccacacgacatcattctgtttgtcctcttttgcaaagagggtaattgagtcaaaggcagtgtaccgaggcacctcccattggaatggcgagtgctgatctgaatgggagatatttctattactgagattcagactccaatacaatatagcttctgctcaacgccaagtagatgtattggtgggcctgcttcttcaacatcatcatctcctcacccgatgctgcttacctctcctcagtcctcaccactcccctcatggtgaatgacccttctggcagttttcccaaatcaagtctgaatcgagcacttcagttgagagtagtcactctggagtagagcaatggagaattcatttgcacctctacatatttttcagtggcacacatttctcttaatgtcaacaaatcacaaagaaggggatcttgtttatgttagtggtaaggtgggtgtaccaatttacttagaaggaacaaaagctatggaagaggcaaaaatcaagaatattgaaagctgactgtaccagaaggttctttttgcaacctcaatttgagatttaaggtcggattaccaccagaggcagtatacaatatcataatcgaggcgggcaacaagggcttgtggatgctggacatcctcaagaagttgctgatggcccccaacatcgccaccaaggtcgtgcgcaccctcgtggcaagcgggcttctcaaagaggtcagcgacgtgcgccaccgcagcaggaagatcttcatggccaccgacttccagtccttcgccgagatcaccgggggcacctggtaccacgacggtcgcctagacaccgacgccgtaagcaccgcgcgccgctgctgccaggcgcaggtcgagaggctcggcgccgcgaccgcgcagatgatccaccacgacattctcaaggaagaccccagggccgggtacactatcgacaaggtcaaggatatcatcaagaccatggtgctcgaagaggtcaagagcaccggcacgcgggattttagcgccgttatggccggcacaatgtgctatcggctggtgactggggctccgcagggagggatgatggagggaatccattgtgggatttgccccaggactcatgagtgctcgccggaggggatcatctcacccagcacctgcgtttactacaagaagtggttgcagatggacttctaggcggtgacgatgagccctcttctgtccatcgcgatggggtgttggattgtgatactcatattaataatcatctctatagttatttctacttagtccttttagcttggtataatcattcatatgtatttattccaccaagtttagatgtctttactgagtaccatatcaacttcctaaatatttaggtaatcggcaaacctttcagctcttctatctactgaagtcatgtattgagcatgtgaacccaaagtgtttctgttcgactacagccaaagggccaacaaagatgcgccttctactactctatgaacataacatgaagcagagacaatgcttatatgaccatgtctataacttcatcctgtgctactggtacatagttggtgagtgtttcatgttctactagaaaatgaacataacatgaagcagacagttcagttttattttcttagagttaattaccggttcaccatgaagttattgttatttatatattccaattttattttcttcttggagcgaattaccagtttgtctggaagttactattatctataaccatgctctcatccgtgttttcactttctatataccctctatcccaatgtgctccatattctatcaaaccaaaacaacagtatgatattatatcccttgcaacgatccaagatctctatgatatatgaccatgctctcatttttatttgcattttgtaattatctatttcagctttatggacaaccagcgctcgcatcatcgtgctcggatccgcctccgaacggggccaatctcaaggacaccgtcgcagttgaggtggcgcgggccaagggcctctggatggtggggaggcagcggtggcgacggtggggtgcagctcactaacaagctcgagatcttcaagatcg

SEQ ID NO: 77163 - DNA, 3128 bp, Zea Mays
aggaagaaaaacgcatccttgctgcttctcgcgacaacttggacagactgtaccgagattccagcaactcgctgaccatcttggagaggagccaccgttttacgatggaggagcttgacaaccagcgccgtcaactgcaagaatcctcggatgaagtggcccgccttacacagttgctatcggcaaaggatgccaccatcaagggactccgagcttctaagaaatccattgctcaggagttagaaactgctcagcaggctgttaaagttgctgaagaagctgctgtcactttcaaagctcaacgcgataaggccctggacaaagccattcgggcgggacgaatcttgatgagaagacccggcgtggttgtccctgaagatataaaagccgatgtgaatgctgcccctgattcctcgaatcgcccctcttcatcagtcgttcctgaaagagacattggaaaataaagaaacagttcgcgtgctctgagcgcgcagttggcatgatcaagtactcgttagaggttatcggcttatcattcgagtaacgtgattactcccttattgtatcagaatttattagtttgcaagtttgtggtaacgctgcacgatgattatgaaatttgtttgtgggatatggagatcatcccttgaactgcataagcgcgagtctgctatctctactataccttaagggtacaacgagggcgtccacaggcaccgtgcccccgccgcggtgcccccggcctccctctcactgcgcgttcgcattcgccaattccgccgcctcctcctcctcctcccctgtgtccgagatctcgcatccgctccatctatggaaggccaccacacgccgtgcccagccatcctcggattccgccaccccatcctcggattccaagcgtcgtccaccccacgtgcccctgcccgacgaccccgttcctcgcggcgcttggcttcagcgccgcgaccgccgcgccatccccacccagcacccatccgcaaacccactcccatgactgcccccgcctgaagaccccgttccccgcgacttcggtgccgcgaccatcgcgccatccccacccatccgcaaccccgctcccccgccgcgccatccccacccattcacaaccccatcccctgccgcccctcacgtgatcacccattcgcgacctgccccctcccctcccccgatgggacagggagcagcaaggtcaccaccggagacgacctcgatgggtggcggcgccgaggacggaggtggtgtcacagtctatgggaggaaggagatcatgatgggggagcagtgccagtcgatggacttctctggggtcatctactacgacgctgaaggccaccacgtcgcacaaccgccgccgcggcgctagcctgatgcccgcctccgtgacctcgccgccaatgcccacaccgcgctcgtcttcagtgggctggacagtgataccccgcgacggtggtgtagtgggagtgggacggcgaggaggttaagggcggcgacggcgaggtgcagagctcctacgggctccgccatcaacactatggatacactccaagaggccccttcaggaggatgaacagatttccagcaccctgttttcaacaccgaggaggatgaacattctacgaaatcaaaaggaccccttaagttctacaactcggagatccacacgacatcattctgtttgtcctcttttgcaaagagggtaattgagtcaaaggcagtgtaccgaggcacctcccattggaatggcgagtgctgatctgaatgggagatatttctattactgagattcagactccaatacaatataggtgggtgtaccaatttacttagaaggaacaaaagctatggaagaggcaaaaatcaagaatattgaaagctgactgtaccagaaggttctttttgcaacctcaatttgagatttaaggtcggattaccaccagaggcagtatacaatatcataatcgaggcgggcaacaagggcttgtggatgctggacatcctcaagaagttgctgatggcccccaacatcgccaccaaggtcgtgcgcaccctcgtggcaagcgggcttctcaaagaggtcagcgacgtgcgccaccgcagcaggaagatcttcatggccaccgacttccagtccttcgccgagatcaccgggggcacctggtaccacgacggtcgcctagacaccgacgccgtaagcaccgcgcgccgctgctgccaggcgcaggtcgagaggctcggcgccgcgaccgcgcagatgatccaccacgacattctcaaggaagaccccagggccgggtacactatcgacaaggtcaaggatatcatcaagaccatggtgctcgaagaggtcaagagcaccggcacgcgggattttagcgccgttatggccggcacaatgtgctatcggctggtgactggggctccgcagggagggatgatggagggaatccattgtgggatttgccccaggactcatgagtgctcgccggaggggatcatctcacccagcacctgcgtttactacaagaagtggttgcagatggacttctaggcggtgacgatgagccctcttctgtccatcgcgatggggtgttggattgtgatactcatattaataatcatctctatagttatttctacttagtccttttagcttggtataatcattcatatgtatttattccaccaagtttagatgtctttactgagtaccatatcaacttcctaaatatttaggtaatcggcaaacctttcagctcttctatctactgaagtcatgtattgagcatgtgaacccaaagtgtttctgttcgactacagccaaagggccaacaaagatgcgccttctactactctatgaacataacatgaagcagagacaatgcttatatgaccatgtctataacttcatcctgtgctactggtacatagttgctttatggacaaccagcgctcgcatcatcgtgctcggatccgcctccgaacggggccaatctcaaggacaccgtcgcagttgaggtggcgcgggccaagggcctctggatggtggggaggcagcggtggcgacggtggggtgcagctcactaacaagctcgagatcttcaagatcg

SEQ ID NO: 77164 - DNA, 1202 bp, Zea Mays
gcccccggcctccctctcactgcgcgttcgcattcgccaattccgccgcctcctcctcctcctcccctgtgtccgagatctcgcatccgctccatctatggaaggccaccacacgccgtgcccagccatcctcggattccgccaccccatcctcggattccaagcgtcgtccaccccacgtgcccctgcccgacgaccccgttcctcgcggcgcttggcttcagcgccgcgaccgccgcgccatccccacccagcacccatccgcaaacccactcccatgactgcccccgcctgaagaccccgttccccgcgacttcggtgccgcgaccatcgcgccatccccacccatccgcaaccccgctcccccgccgcgccatccccacccattcacaaccccatcccctgccgcccctcacgtgatcacccattcgcgacctgccccctcccctcccccgatgggacagggagcagcaaggtcaccaccggagacgacctcgatgggtggcggcgccgaggacggaggtggtgtcacagtctatgggaggaaggagatcatgatgggggagcagtgccagtcgatggacttctctggggtcatctactacgacgctgaaggccaccacgtcgcacaaccgccgccgcggcgctagcctgatgcccgcctccgtgacctcgccgccaatgcccacaccgcgctcgtcttcagtgggctggacagtgataccccgcgacggtggtgtagtgggagtgggacggcgaggaggttaagggcggcgacggcgaggtgcagagctcctacgggctccgccatcaacactatggatacactccaagaggccccttcagctccattggaggctacagctgccctctacactatacagtttacagtatatttcttcttctcggaggaggatgaacagatttccagcaccctgttttcaacaccgaggaggatgaacattctacgaaatcaaaaggaccccttaagttctacaactcggagatccacacgacatcattctgtttgtcctcttttgcaaagagggtaattgagtcaaaggcagtgtaccgaggcacctcccattggaatggcgagtgctgatctgaatgggagatatttctattactgagattcagactccaatacaatatagtggcacacatttctcttaatgtcaacaaatcacaaagaaggggat

SEQ ID NO: 77165 - DNA, 1176 bp, Zea Mays
cccggcctccctctcactgcgcgttcgcattcgccaattccgccgcctcctcctcctcctcccctgtgtccgagatctcgcatccgctccatctatggaaggccaccacacgccgtgcccagccatcctcggattccgccaccccatcctcggattccaagcgtcgtccaccccacgtgcccctgcccgacgaccccgttcctcgcggcgcttggcttcagcgccgcgaccgccgcgccatccccacccagcacccatccgcaaacccactcccatgactgcccccgcctgaagaccccgttccccgcgacttcggtgccgcgaccatcgcgccatccccacccatccgcaaccccgctcccccgccgcgccatccccacccattcacaaccccatcccctgccgcccctcacgtgatcacccattcgcgacctgccccctcccctcccccgatgggacagggagcagcaaggtcaccaccggagacgacctcgatgggtggcggcgccgaggacggaggtggtgtcacagtctatgggaggaaggagatcatgatgggggagcagtgccagtcgatggacttctctggggtcatctactacgacgctgaaggccaccacgtcgcacaaccgccgccgcggcgctagcctgatgcccgcctccgtgacctcgccgccaatgcccacaccgcgctcgtcttcagtgggctggacagtgataccccgcgacggtggtgtagtgggagtgggacggcgaggaggttaagggcggcgacggcgaggtgcagagctcctacgggctccgccatcaacactatggatacactccaagaggccccttcagctccattggaggctacagctgccctctacactatacagtttacagtatatttcttcttctcggaggaggatgaacagatttccagcaccctgttttcaacaccgaggaggatgaacattctacgaaatcaaaaggaccccttaagttctacaactcggagatccacacgacatcattctgtttgtcctcttttgcaaagagggtaattgagtcaaaggcagtgtaccgaggcacctcccattggaatggcgagtgctgatctgaatgggagatatttctattactgagattcagactccaatacaatatagttttcccaaatcaagtctgaat

SEQ ID NO: 77166 - DNA, 1654 bp, Zea Mays
tcgcaacatatccgaacgtctcccgtctccgtgagaatccaccccacttccacagcgcacctgttactgctgcacttgctgctttgcacacgcactactgcactgcactagccgcgcctcgcaggtcgcgtcaagcaagcgcaggtgcagtcctcatcgcgaaggggccagatatgctgctctctgcgtttctcggcgattgcttgttcagctacccgccgccgcctcttctacccgcaacaacggctgccccgagaccgagcacgcgtctcccggttccctttcctgctcgcctcaggcccgcgtccctcgtcgcccgacggctgacggcggaggcgggggaggcgctgagcgcgttatccgccgcggagggcgacgacgaatacgaagcggagctccaggaggaagggtttccgagctgggcgggcggcggcgaggaggaggactacgaccacgaccccgaaatcggagacattatgggggactacttcgacgaccccaagaagggccaaacccgcatggaggataggataagaaagaaacgccacaagatcgtgcaaaccaagaccggctctccaaaccccatgaaggtcgtcttcaacaaatttgacttctccaattcctatatatggttcgagttctacaatgttttgttgccaaaagatgttacgttgatttctgattctctgcgatcatggcatatagttggccgtcttggtggctgcaattctatgaatatgcagtggatgagacgatactagtcaggttatcgcaattgcctttagattgtaaaaggctgacttatgatgctcttgaaggagctaacgtcactccgacgtccttttacaacattggtgatcttgagattcaagataatctagcacgagtatgggtagacattggtattcatgagccattgcttctggacatcctgcttaatgccttaacaacaataagttcagatcatgttggtattaagcaagtacagtttggagggtcagagtttttgaactggagtgaggacttgaagacagaagaagttggatatagtgtgtgcaaaatctaaatagcacaatcccgagatttgcagaagcagctacctttttagctaaacgcaaatgcaacatctggttcgaagttagggttttaaccaccttggtcctgcaaacgagaagaagaaaatggtgacaacacgatgaaaaattgacgtccaaacatattaacttctgcttgaaaagaggttgccgtccttacaggactctgctagctacacatcaacacatcattggtaatccttctgcatacatgtaataatataatataactagattgtctgatgtccaacgtgtattgactctacttagggctgaacataatacttatggctacttatggctcgttagttcgcttggctcgacttagtttattttaattttgttacgagccgagttagtattttagctcggtttgttaacgagccatctcgttagctcgaacgagctatcatttatcaacaaaataaagccttcacttatgttggatgaactaataagtgattagttatattaatttggtgttgaattcatgtggtatgttacaattatgagtattattactcttttctagtgctaaatgggtctagaattaattagca

SEQ ID NO: 77167 - DNA, 1552 bp, Zea Mays
tcgcaacatatccgaacgtctcccgtctccgtgagaatccaccccacttccacagcgcacctgttactgctgcacttgctgctttgcacacgcactactgcactgcactagccgcgcctcgcaggtcgcgtcaagcaagcgcaggtgcagtcctcatcgcgaaggggccagatatgctgctctctgcgtttctcggcgattgcttgttcagctacccgccgccgcctcttctacccgcaacaacggctgccccgagaccgagcacgcgtctcccggttccctttcctgctcgcctcaggcccgcgtccctcgtcgcccgacggctgacggcggaggcgggggaggcgctgagcgcgttatccgccgcggagggcgacgacgaatacgaagcggagctccaggaggaagggtttccgagctgggcgggcggcggcgaggaggaggactacgaccacgaccccgaaatcggagacattatgggggactacttcgacgaccccaagaagggccaaacccgcatggaggataggataagaaagaaacgccacaagatcgtgcaaaccaagaccggctctccaaaccccatgaaggtcgtcttcaacaatctctgcgatcatggcatatagttggccgtcttggtggctgcaattctatgaatatgcagttatcgcaattgcctttagattgtaaaaggctgacttatgatgctcttgaaggagctaacgtcactccgacgtccttttacaacattggtgatcttgagattcaagataatctagcacgagtatgggtagacattggtattcatgagccattgcttctggacatcctgcttaatgccttaacaacaataagttcagatcatgttggtattaagcaagtacagtttggagggtcagagtttttgaactggagtgaggacttgaagacagaagaagttggatatagtgtgtgcaaaatctaaatagcacaatcccgagatttgcagaagcagctacctttttagctaaacgcaaatgcaacatctggttcgaagttagggttttaaccaccttggtcctgcaaacgagaagaagaaaatggtgacaacacgatgaaaaattgacgtccaaacatattaacttctgcttgaaaagaggttgccgtccttacaggactctgctagctacacatcaacacatcattggtaatccttctgcatacatgtaataatataatataactagattgtctgatgtccaacgtgtattgactctacttagggctgaacataatacttatggctacttatggctcgttagttcgcttggctcgacttagtttattttaattttgttacgagccgagttagtattttagctcggtttgttaacgagccatctcgttagctcgaacgagctatcatttatcaacaaaataaagccttcacttatgttggatgaactaataagtgattagttatattaatttggtgttgaattcatgtggtatgttacaattatgagtattattactcttttctagtgctaaatgggtctagaattaattagca

SEQ ID NO: 77168 - DNA, 1579 bp, Zea Mays
tcgcaacatatccgaacgtctcccgtctccgtgagaatccaccccacttccacagcgcacctgttactgctgcacttgctgctttgcacacgcactactgcactgcactagccgcgcctcgcaggtcgcgtcaagcaagcgcaggtgcagtcctcatcgcgaaggggccagatatgctgctctctgcgtttctcggcgattgcttgttcagctacccgccgccgcctcttctacccgcaacaacggctgccccgagaccgagcacgcgtctcccggttccctttcctgctcgcctcaggcccgcgtccctcgtcgcccgacggctgacggcggaggcgggggaggcgctgagcgcgttatccgccgcggagggcgacgacgaatacgaagcggagctccaggaggaagggtttccgagctgggcgggcggcggcgaggaggaggactacgaccacgaccccgaaatcggagacattatgggggactacttcgacgaccccaagaagggccaaacccgcatggaggataggataagaaagaaacgccacaagatcgtgcaaaccaagaccggctctccaaaccccatgaaggtcgtcttcaacaaatttgacttctccaattcctatatatggttcgagttctacaatgttttgttgccaaaagatgttacgttgatttctgattctctgcgatcatggcatatagttggccgtcttggtggctgcaattctatgaatatgcaggagctaacgtcactccgacgtccttttacaacattggtgatcttgagattcaagataatctagcacgagtatgggtagacattggtattcatgagccattgcttctggacatcctgcttaatgccttaacaacaataagttcagatcatgttggtattaagcaagtacagtttggagggtcagagtttttgaactggagtgaggacttgaagacagaagaagttggatatagtgtgtgcaaaatctaaatagcacaatcccgagatttgcagaagcagctacctttttagctaaacgcaaatgcaacatctggttcgaagttagggttttaaccaccttggtcctgcaaacgagaagaagaaaatggtgacaacacgatgaaaaattgacgtccaaacatattaacttctgcttgaaaagaggttgccgtccttacaggactctgctagctacacatcaacacatcattggtaatccttctgcatacatgtaataatataatataactagattgtctgatgtccaacgtgtattgactctacttagggctgaacataatacttatggctacttatggctcgttagttcgcttggctcgacttagtttattttaattttgttacgagccgagttagtattttagctcggtttgttaacgagccatctcgttagctcgaacgagctatcatttatcaacaaaataaagccttcacttatgttggatgaactaataagtgattagttatattaatttggtgttgaattcatgtggtatgttacaattatgagtattattactcttttctagtgctaaatgggtctagaattaattagca

SEQ ID NO: 77169 - DNA, 1723 bp, Zea Mays
tcgcaacatatccgaacgtctcccgtctccgtgagaatccaccccacttccacagcgcacctgttactgctgcacttgctgctttgcacacgcactactgcactgcactagccgcgcctcgcaggtcgcgtcaagcaagcgcaggtgcagtcctcatcgcgaaggggccagatatgctgctctctgcgtttctcggcgattgcttgttcagctacccgccgccgcctcttctacccgcaacaacggctgccccgagaccgagcacgcgtctcccggttccctttcctgctcgcctcaggcccgcgtccctcgtcgcccgacggctgacggcggaggcgggggaggcgctgagcgcgttatccgccgcggagggcgacgacgaatacgaagcggagctccaggaggaagggtttccgagctgggcgggcggcggcgaggaggaggactacgaccacgaccccgaaatcggagacattatgggggactacttcgacgaccccaagaagggccaaacccgcgtgggaatgaatggctttcctcgtctccgttctgacgaatgaatggctttcctcgtcttattcccttgcttcactcacgccctctgcgctcgtgcagatggaggataggataagaaagaaacgccacaagatcgtgcaaaccaagaccggctctccaaaccccatgaaggtcgtcttcaacaaatttgacttctccaattcctatatatggttcgagttctacaatgttttgttgccaaaagatgttacgttgatttctgattctctgcgatcatggcatatagttggccgtcttggtggctgcaattctatgaatatgcagttatcgcaattgcctttagattgtaaaaggctgacttatgatgctcttgaaggagctaacgtcactccgacgtccttttacaacattggtgatcttgagattcaagataatctagcacgagtatgacattggtattcatgagccattgcttctggacatcctgcttaatgccttaacaacaataagttcagatcatgttggtattaagcaagtacagtttggagggtcagagtttttgaactggagtgaggacttgaagacagaagaagttggatatagtgtgtgcaaaatctaaatagcacaatcccgagatttgcagaagcagctacctttttagctaaacgcaaatgcaacatctggttcgaagttagggttttaaccaccttggtcctgcaaacgagaagaagaaaatggtgacaacacgatgaaaaattgacgtccaaacatattaacttctgcttgaaaagaggttgccgtccttacaggactctgctagctacacatcaacacatcattggtaatccttctgcatacatgtaataatataatataactagattgtctgatgtccaacgtgtattgactctacttagggctgaacataatacttatggctacttatggctcgttagttcgcttggctcgacttagtttattttaattttgttacgagccgagttagtattttagctcggtttgttaacgagccatctcgttagctcgaacgagctatcatttatcaacaaaataaagccttcacttatgttggatgaactaataagtgattagttatattaatttggtgttgaattcatgtggtatgttacaattatgagtattattactcttttctagtgctaaatgggtctagaattaattagca

SEQ ID NO: 77170 - DNA, 1570 bp, Zea Mays
tcgcaacatatccgaacgtctcccgtctccgtgagaatccaccccacttccacagcgcacctgttactgctgcacttgctgctttgcacacgcactactgcactgcactagccgcgcctcgcaggtcgcgtcaagcaagcgcaggtgcagtcctcatcgcgaaggggccagatatgctgctctctgcgtttctcggcgattgcttgttcagctacccgccgccgcctcttctacccgcaacaacggctgccccgagaccgagcacgcgtctcccggttccctttcctgctcgcctcaggcccgcgtccctcgtcgcccgacggctgacggcggaggcgggggaggcgctgagcgcgttatccgccgcggagggcgacgacgaatacgaagcggagctccaggaggaagggtttccgagctgggcgggcggcggcgaggaggaggactacgaccacgaccccgaaatcggagacattatgggggactacttcgacgaccccaagaagggccaaacccgcatggaggataggataagaaagaaacgccacaagatcgtgcaaaccaagaccggctctccaaaccccatgaaggtcgtcttcaacaatctctgcgatcatggcatatagttggccgtcttggtggctgcaattctatgaatatgcagtggatgagacgatactagtcaggttatcgcaattgcctttagattgtaaaaggctgacttatgatgctcttgaaggagctaacgtcactccgacgtccttttacaacattggtgatcttgagattcaagataatctagcacgaggtagacattggtattcatgagccattgcttctggacatcctgcttaatgccttaacaacaataagttcagatcatgttggtattaagcaagtacagtttggagggtcagagtttttgaactggagtgaggacttgaagacagaagaagttggatatagtgtgtgcaaaatctaaatagcacaatcccgagatttgcagaagcagctacctttttagctaaacgcaaatgcaacatctggttcgaagttagggttttaaccaccttggtcctgcaaacgagaagaagaaaatggtgacaacacgatgaaaaattgacgtccaaacatattaacttctgcttgaaaagaggttgccgtccttacaggactctgctagctacacatcaacacatcattggtaatccttctgcatacatgtaataatataatataactagattgtctgatgtccaacgtgtattgactctacttagggctgaacataatacttatggctacttatggctcgttagttcgcttggctcgacttagtttattttaattttgttacgagccgagttagtattttagctcggtttgttaacgagccatctcgttagctcgaacgagctatcatttatcaacaaaataaagccttcacttatgttggatgaactaataagtgattagttatattaatttggtgttgaattcatgtggtatgttacaattatgagtattattactcttttctagtgctaaatgggtctagaattaattagca

SEQ ID NO: 77171 - DNA, 1844 bp, Zea Mays
tcgcaacatatccgaacgtctcccgtctccgtgagaatccaccccacttccacagcgcacctgttactgctgcacttgctgctttgcacacgcactactgcactgcactagccgcgcctcgcaggtcgcgtcaagcaagcgcaggtgcagtcctcatcgcgaaggggccagatatgctgctctctgcgtttctcggcgattgcttgttcagctacccgccgccgcctcttctacccgcaacaacggctgccccgagaccgagcacgcgtctcccggttccctttcctgctcgcctcaggcccgcgtccctcgtcgcccgacggctgacggcggaggcgggggaggcgctgagcgcgttatccgccgcggagggcgacgacgaatacgaagcggagctccaggaggaagggtttccgagctgggcgggcggcggcgaggaggaggactacgaccacgaccccgaaatcggagacattatgggggactacttcgacgaccccaagaagggccaaacccgcatggaggataggataagaaagaaacgccacaagatcgtgcaaaccaagaccggctctccaaaccccatgaaggtcgtcttcaacaaatttgacttctccaattcctatatatggttcgagttctacaatgttttgttgccaaaagatgttacgttgatttctgattctctgcgatcatggcatatagttggccgtcttggtggctgcaattctatgaatatgcaggtataatggtcagaccacatttacacttcttgaatgtcatttttgacatttttgtattttattttcatatccttagtggatgagacgatactagtcagggtaagatataatccttctggcctccatccttttcatcaaaatgttggtaacatgaaggattccatcaaacttctatgttttgcactaaaggacttcaaaagtacttgtttattttgcagttatcgcaattgcctttagattgtaaaaggctgacttatgatgctcttgaaggagctaacgtcactccgacgtccttttacaacattggtgatcttgagattcaagataatctagcacgaggtagacattggtattcatgagccattgcttctggacatcctgcttaatgccttaacaacaataagttcagatcatgttggtattaagcaagtacagtttggagggtcagagtttttgaactggagtgaggacttgaagacagaagaagttggatatagtgtgtgcaaaatctaaatagcacaatcccgagatttgcagaagcagctacctttttagctaaacgcaaatgcaacatctggttcgaagttagggttttaaccaccttggtcctgcaaacgagaagaagaaaatggtgacaacacgatgaaaaattgacgtccaaacatattaacttctgcttgaaaagaggttgccgtccttacaggactctgctagctacacatcaacacatcattggtaatccttctgcatacatgtaataatataatataactagattgtctgatgtccaacgtgtattgactctacttagggctgaacataatacttatggctacttatggctcgttagttcgcttggctcgacttagtttattttaattttgttacgagccgagttagtattttagctcggtttgttaacgagccatctcgttagctcgaacgagctatcatttatcaacaaaataaagccttcacttatgttggatgaactaataagtgattagttatattaatttggtgttgaattcatgtggtatgttacaattatgagtattattactcttttctagtgctaaatgggtctagaattaattagca

SEQ ID NO: 77172 - DNA, 1862 bp, Zea Mays
tcgcaacatatccgaacgtctcccgtctccgtgagaatccaccccacttccacagcgcacctgttactgctgcacttgctgctttgcacacgcactactgcactgcactagccgcgcctcgcaggtcgcgtcaagcaagcgcaggtgcagtcctcatcgcgaaggggccagatatgctgctctctgcgtttctcggcgattgcttgttcagctacccgccgccgcctcttctacccgcaacaacggctgccccgagaccgagcacgcgtctcccggttccctttcctgctcgcctcaggcccgcgtccctcgtcgcccgacggctgacggcggaggcgggggaggcgctgagcgcgttatccgccgcggagggcgacgacgaatacgaagcggagctccaggaggaagggtttccgagctgggcgggcggcggcgaggaggaggactacgaccacgaccccgaaatcggagacattatgggggactacttcgacgaccccaagaagggccaaacccgcgtgggaatgaatggctttcctcgtctccgttctgacgaatgaatggctttcctcgtcttattcccttgcttcactcacgccctctgcgctcgtgcagatggaggataggataagaaagaaacgccacaagatcgtgcaaaccaagaccggctctccaaaccccatgaaggtcgtcttcaacaatctctgcgatcatggcatatagttggccgtcttggtggctgcaattctatgaatatgcaggtataatggtcagaccacatttacacttcttgaatgtcatttttgacatttttgtattttattttcatatccttagtggatgagacgatactagtcagggtaagatataatccttctggcctccatccttttcatcaaaatgttggtaacatgaaggattccatcaaacttctatgttttgcactaaaggacttcaaaagtacttgtttattttgcagttatcgcaattgcctttagattgtaaaaggctgacttatgatgctcttgaaggagctaacgtcactccgacgtccttttacaacattggtgatcttgagattcaagataatctagcacgagtatgacattggtattcatgagccattgcttctggacatcctgcttaatgccttaacaacaataagttcagatcatgttggtattaagcaagtacagtttggagggtcagagtttttgaactggagtgaggacttgaagacagaagaagttggatatagtgtgtgcaaaatctaaatagcacaatcccgagatttgcagaagcagctacctttttagctaaacgcaaatgcaacatctggttcgaagttagggttttaaccaccttggtcctgcaaacgagaagaagaaaatggtgacaacacgatgaaaaattgacgtccaaacatattaacttctgcttgaaaagaggttgccgtccttacaggactctgctagctacacatcaacacatcattggtaatccttctgcatacatgtaataatataatataactagattgtctgatgtccaacgtgtattgactctacttagggctgaacataatacttatggctacttatggctcgttagttcgcttggctcgacttagtttattttaattttgttacgagccgagttagtattttagctcggtttgttaacgagccatctcgttagctcgaacgagctatcatttatcaacaaaataaagccttcacttatgttggatgaactaataagtgattagttatattaatttggtgttgaattcatgtggtatgttacaattatgagtattattactcttttctagtgctaaatgggtctagaattaattagca

SEQ ID NO: 77173 - DNA, 1780 bp, Zea Mays
gttccttccatcgcaacatatccgaacgtctcccgtctccgtgagaatccaccccacttccacagcgcacctgttactgctgcacttgctgctttgcacacgcactactgcactgcactagccgcgcctcgcaggtcgcgtcaagcaagcgcaggtgcagtcctcatcgcgaaggggccagatatgctgctctctgcgtttctcggcgattgcttgttcagctacccgccgccgcctcttctacccgcaacaacggctgccccgagaccgagcacgcgtctcccggttccctttcctgctcgcctcaggcccgcgtccctcgtcgcccgacggctgacggcggaggcgggggaggcgctgagcgcgttatccgccgcggagggcgacgacgaatacgaagcggagctccaggaggaagggtttccgagctgggcgggcggcggcgaggaggaggactacgaccacgaccccgaaatcggagacattatgggggactacttcgacgaccccaagaagggccaaacccgcatggaggataggataagaaagaaacgccacaagatcgtgcaaaccaagaccggctctccaaaccccatgaaggtcgtcttcaacaatctctgcgatcatggcatatagttggccgtcttggtggctgcaattctatgaatatgcaggtataatggtcagaccacatttacacttcttgaatgtcatttttgacatttttgtattttattttcatatccttagtggatgagacgatactagtcagggtaagatataatccttctggcctccatccttttcatcaaaatgttggtaacatgaaggattccatcaaacttctatgttttgcactaaaggacttcaaaagtacttgtttattttgcagttatcgcaattgcctttagattgtaaaaggctgacttatgatgctcttgaaggagctaacgtcactccgacgtccttttacaacattggtgatcttgagattcaagataatctagcacgagtatgggtagacattggtattcatgagccattgcttctggacatcctgcttaatgccttaacaacaataagttcagatcatgttggtattaagcaagtacagtttggagggtcagagtttttgaactggagtgaggacttgaagacagaagaagttggatatagtgtgtgcaaaatctaaatagcacaatcccgagatttgcagaagcagctacctttttagctaaacgcaaatgcaacatctggttcgaagttagggttttaaccaccttggtcctgcaaacgagaagaagaaaatggtgacaacacgatgaaaaattgacgtccaaacatattaacttctgcttgaaaagaggttgccgtccttacaggactctgctagctacacatcaacacatcattggtaatccttctgcatacatgtaataatataatataactagattgtctgatgtccaacgtgtattgactctacttagggctgaacataatacttatggctacttatggctcgttagttcgcttggctcgacttagtttattttaattttgttacgagccgagttagtattttagctcggtttgttaacgagccatctcgttagctcgaacgagctatcatttatcaacaaaataaagccttcacttatgttggatgaactaataagtgattagttatattaatttggtgttgaattcatgtggtatgttacaattatgagtattattactcttttctagtgctaaatgggtctagaattaattagca

SEQ ID NO: 77174 - DNA, 629 bp, Zea Mays
tcgcaacatatccgaacgtctcccgtctccgtgagaatccaccccacttccacagcgcacctgttactgctgcacttgctgctttgcacacgcactactgcactgcactagccgcgcctcgcaggtcgcgtcaagcaagcgcaggtgcagtcctcatcgcgaaggggccagatatgctgctctctgcgtttctcggcgattgcttgttcagctacccgccgccgcctcttctacccgcaacaacggctgccccgagaccgagcacgcgtctcccggttccctttcctgctcgcctcaggcccgcgtccctcgtcgcccgacggctgacggcggaggcgggggaggcgctgagcgcgttatccgccgcggagggcgacgacgaatacgaagcggagctccaggaggaagggtttccgagctgggcgggcggcggcgaggaggaggactacgaccacgaccccgaaatcggagacattatgggggactacttcgacgaccccaagaagggccaaacccgcatggaggataggataagaaagaaacgccacaagatcgtgcaaaccaagaccggctctccaaaccccatgaaggtcgtcttcaacaagaagtatttaccaaacttagaaaaa

SEQ ID NO: 77175 - DNA, 270 bp, Zea Mays
atgaaatcagatgtccacctaaaacgaaacagacgaggatataaaaaggaaaacttagctcaaccaaaaaggatcattttcggaaaagaaacgaacctgaagcctaggaaaaagaaaaaaaacaaaattggagagcacaaacaagagaacacgaacctttcagtagaagggtggaatcctaaaaaaagaaaaatgaagtttgcagatcttccaaaccattttatccaaaaaaaggcagtgacatattcacatgttgtagggaaaacctaa

SEQ ID NO: 77176 - DNA, 1897 bp, Zea Mays
ctattctccattgaataaggcacgattggcgcaagcgcgtgcgtatgggtacccctaaagagaattaaacaatccggcaagctctgtagaaagcaggtaaaaaatagagttaattaaaatatgggtattattgtccatgagcataaggggaagagagcataaatattaggtatacggtaacttttacatgatctgaaagagtaaaataaaaatcatagcatgtgtgtattatcgttcaggaagtcagataatttgtaaagaaactctttgtatgtgccaccatatgaatcattgtatttatatgaatcaatgtatttagcatctagttaaacatcataagaaacgattatagtagaagcatttgaatggaaaatgtcaatagaatgataaatcatggggggggctctttctttggttccacaagtggatacacaacaacatatgtggttcttgtctgtatgattttttcaaaaatgtatgtataaaagtaaagggtattgcatgtaggactatttttgacagggacaaacacttatatgaataatgtccataacattttctagttagtatgaaccaaaaggaaaaaagattaccacatatagttctgttcatgactgaccacaataatgccaaacaccccatcattgtagaaaatatagaaaatagtctgtatcataagataagatttgtggaatttcatatgattcctttcatggcctgactacaatgatgtcaaacattccatccttgtagaaactacggaattagtgtgtatcataagctaagattttggaaatattgtatccattgtatagtttgttttggttgggttttgtgttgatacaaggggataattatatttgatgtcagttttgcatactgcataaatatcattaatgtcagcaaatcaccagattaaaaaaataaaaaattatgtaaaacgtacagcagggagcagggaactcgtgttagtattattggcagtgatcctaactatatatagctactccaatgctgataccttgggttcagatatatagcaagagccaagagctaaaaagatatcatatcatcagcagtaacaatacaaacatcttcctcctagagtagcaaaccaggatcgctctatactgtgaattgtaagaaagagaaagccaagaagaacatcaaacttgtgatccaatacgatgcctccctaattggccttatcacttgtggttactactattatacgtttggttaaaaaaagcttttctttttatagttctagaaacaaaaaaaatgaattgaaacaccattctgatgctgggaaaattgtaaatataaaatacttattaggtgagcaacgggaaaaaaagtcaaggttcattgtttgtttggtacacaatcacaccaagaagctgcttgtttggtttcttatgtagaacacatgagcccgacgagacattttcagaatttgtaaatataaaaaagttaaaaataaaagtttgtgcagaattctatggagacatgccactggaacttcaatagtaaaagatgaaggaaattgtaaagaagcgacgtggataggctgaatgcggccgttttgaaccagctttaagtgccaattacctcgttagcgaagtctctaacgatctgaggtcctcttcaacatgtttcaacgaaagaacaggaataaacataaactgaagcatagacaacatataagttcagtgcggaaaatgaaattgtaaccatcacagaccatttagcataacggtagtatgaatgaagaacatgtttaagtatgtgacaattacctttgtagtaaaatctctaaggtaggacatattgtaccttgtgcccagatcaaattctgcctgaatgtttggaaataagtttagaacatagaattgac

SEQ ID NO: 77177 - DNA, 359 bp, Zea Mays
aaaagcttttgactgcattggaacgtctggtaacctttcttacattcattgctcaggaaacagttaactgcatgttcaagaggcacacaatcaacaaaatttaatctgtactagtgtattgccgcgcgccctgcgcacggtgttaaattcgtccgtgagatcttaatttgtacataaataagaaataaagaacatactctctactcattacttcttccagcgcgttatcatcgtccgaccatcgataaagctcgagctttatcatgtgccttcagagtgatgctagaagtcagaaaatatcaaataccagtgccaaatccatttcacaattactatgacaacataccttaaggtcttcc

SEQ ID NO: 77178 - DNA, 948 bp, Zea Mays
ttggttaattgttttacaacttatgaaatgtattgcagcattataggcgggagatacttcatagttatggctttgagcacatgcacttattatacaatctggagaaggctggccttcttaagaggcaggaatcaagaagcaattgggttggtattacaagagcactgcagcttatagttgacgtaaatgatacagcaaaccctactgatatatcctacatcttttctggatacgcacctcttagtattcgccttgttcagcatgcagtgagatctggatggcggtctattgaagaactgttgaaactattgccaggcccacatctggatttgaaaagaggtggtttgacaattaattcatcaccggaggtacatccaggtttaggggctcaacagagtattgacagggttggtcatcgctctctggttttggttgtattcattggtggtgtcacatttgctgagattgctgcccttcgcttccttagtgcacaggaaggaatgggctacgactttcttgttgcaacaacaaaggttgtcaatggaaacacaatactcagacccattatagcaaatagcaaagaggggatgatgtaattttattccttttctgtgcatgtgttttttgtaattgcaattgcagacaaacccaagcttgtgggttttcttgtttggctgtgagttcgtgtttggtcagcaactggacgataaggctaaccacgcttgttgatagatggaatccaacagtcccattttttgttctgttctgttctgtagtacatccgctaaactgtaaatcctgggtttcatgtgttcgtctgtctttttattcaataattgcttccttgaaggccgtttatgttgtttgtggaccaatattgtgaaaaaagaaagaatgtatggaacctgttgcaaatctgcatattcttattcctcttttttactgaag

SEQ ID NO: 77179 - DNA, 1359 bp, Zea Mays
gtttattcatgtgaaggggctttgtggttttacgtcaaaaagcaacatctattcagcaagattatgcagaagtgaaatccaccaacactcagtctgtttcggagctcaaggattttgtgaggaggttgcactcgctaccggagatagctaggcatgttcatttggcacaacacttgcaatcgttcacggggaaaccctcctttcatgcccgactagacatagaacaaacaatactggaggttcagaactttgaaatatgctttgagtacattgaggagatgatacataagcaggaagttattgaaaacgtccttcgccttttggtgttactttctcttacaaatgccgggcttccaaagaagaattttgattacatgaggcgggagatacttcatagttatggctttgagcacatgcacttattatacaatctggagaaggctggccttcttaagaggcaggaatcaagaagcaattgggttggtattacaagagcactgcagcttatagttgacgtaaatgatacagcaaaccctactgatatatcctacatcttttctggatacgcacctcttagtattcgccttgttcagcatgcagtgagatctggatggcggtctattgaagaactgttgaaactattgccaggcccacatctggatttgaaaagagtgagtagagttcgttgaattgactttgtgttttagggaagcaaaaaaaaatccttacagattttctcacttatatagggtggtttgacaattaattcatcaccggaggtacatccaggtttaggggctcaacagagtattgacagggttggtcatcgctctctggttttggttgtattcattggtggtgtcacatttgctgagattgctgcccttcgcttccttagtgcacaggaaggaatgggctacgactttcttgttgcaacaacaaaggttgtcaatggaaacacaatactcagacccattatagcaaatagcaaagaggggatgatgtaattttattccttttctgtgcatgtgttttttgtaattgcaattgcagacaaacccaagcttgtgggttttcttgtttggctgtgagttcgtgtttggtcagcaactggacgataaggctaaccacgcttgttgatagatggaatccaacagtcccattttttgttctgttctgttctgtagtacatccgctaaactgtaaatcctgggtttcatgtgttcgtctgtctttttattcaataattgcttccttgaaggccgtttatgttgtttgtggaccaatattgtgaaaaaagaaagaatgtatggaacctgttgcaaatctgcatattcttattcctcttttttactgaag

SEQ ID NO: 77180 - DNA, 1425 bp, Zea Mays
acctccatcaccaaggcaaaaagatgctacaaattaataatggttcagtggaagttgatgcaagcatcattggagctcaacaagatgggaaaaaggttaaggttccactgaattcaagcgataagttgtacaaggagattcgagacctcaattttgaagttgtagttcaggttttacgtcaaaaagcaacatctattcagcaagattatgcagaagtgaaatccaccaacactcagtctgtttcggagctcaaggattttgtgaggaggttgcactcgctaccggagatagctaggcatgttcatttggcacaacacttgcaatcgttcacggggaaaccctcctttcatgcccgactagacatagaacaaacaatactggaggttcagaactttgaaatatgctttgagtacattgaggagatgatacataagcaggaagttattgaaaacgtccttcgccttttggtgttactttctcttacaaatgccgggcttccaaagaagaattttgattacatgaggcgggagatacttcatagttatggctttgagcacatgcacttattatacaatctggagaaggctggccttcttaagaggcaggaatcaagaagcaattgggttggtattacaagagcactgcagcttatagttgacgtaaatgatacagcaaaccctactgatatatcctacatcttttctggatacgcacctcttagtattcgccttgttcagcatgcagtgagatctggatggcggtctattgaagaactgttgaaactattgccaggcccacatctggatttgaaaagaggtggtttgacaattaattcatcaccggaggtacatccaggtttaggggctcaacagagtattgacagggttggtcatcgctctctggttttggttgtattcattggtggtgtcacatttgctgagattgctgcccttcgcttccttagtgcacaggaaggaatgggctacgactttcttgttgcaacaacaaaggttgtcaatggaaacacaatactcagacccattatagcaaatagcaaagaggggatgatgtaattttattccttttctgtgcatgtgttttttgtaattgcaattgcagacaaacccaagcttgtgggttttcttgtttggctgtgagttcgtgtttggtcagcaactggacgataaggctaaccacgcttgttgatagatggaatccaacagtcccattttttgttctgttctgttctgtagtacatccgctaaactgtaaatcctgggtttcatgtgttcgtctgtctttttattcaataattgcttccttgaaggccgtttatgttgtttgtggaccaatattgtgaaaaaagaaagaatgtatggaacctgttgcaaatctgcatattcttattcctcttttttactgaag

SEQ ID NO: 77181 - DNA, 2491 bp, Zea Mays
ctaaattaaaaaagacggacagcccagcccatctcgtcttgtctcggcgataccggctaccgccggcgaccttccgtctatccaactcgcagcgtcccacgccggtgaccccgctgggcggcagaaggagacgtcgggtgccgcggagcgccgcggagcgccgccgccgtccaagctgcctccctcggctggtggactgtatcactgctcctcagacacccgctgttctgtccggcaacgtgcctccgccgcaaacccgctcgatcagcctgaggcatcgcacgatttctgactcatactttatcgccaattggctggggtggagcacatctctacccggacttgatagattccaatccttcccaactcaacgttgggcagatggcgcagatccccaatcttgacaacgcgccgctcaaccttgcggccctcagggagcagtcgcagaaggacttgttcggcatcctaaaaaatataaggggaaagaagtgcttggttatagatcccaagctcgctgggactctctcattggtcgtgcagacatcgctgctaaaggagtatggcgcggaagtgcggattctctctcccgaacccctgcagacggaatgccccaaaattgtatatcttgtgcgctctcagctgaggttcatgaagttcatcgcaagtcaaatcaagaacgatgaacctaaagggctccagagggaatacttcctttactttgtacctcgccgcactgttgcttgtgagaagatcctggaggaagagaaagttcatcagaaactgacattcggagaatatcccttatatctagttccattggatgatgatgtcttgtctcttgaacttgaccattctttgcaggaatgccttattgaaggagatacaagttctatctggcatgttgctaaagcgatccataaattagagtttgcctttggagttatcccgaatgttagggccaagggtgtggcgtcaaccaaagctgcagagttgttgaatagtatgcaactagaggatccagtcaacatggatgatatggggattccagagataaacactgttattctgttagacagagaggtggacatggtaacaccaatgtgctctcagttgacgtatgaaggcttgttggatgagatttcagcatgtcttctgggattacacattacaccatcacttttttcagtgccaatgcaatgctacaaattaataatggttcagtggaagttgatgcaagcatcattggagctcaacaagatgggaaaaaggttaaggttccactgaattcaagcgataagttgtacaaggagattcgagacctcaattttgaagttgtagttcaggttttacgtcaaaaagcaacatctattcagcaagattatgcagaagtgaaatccaccaacactcagtctgtttcggagctcaaggattttgtgaggaggttgcactcgctaccggagatagctatgctttgagtacattgaggagatgatacataagcaggaagttattgaaaacgtccttcgccttttggtgttactttctcttacaaatgccgggcttccaaagaagaattttgattacatgaggcgggagatacttcatagttatggctttgagcacatgcacttattatacaatctggagaaggctggccttcttaagaggcaggaatcaagaagcaattgggttggtattacaagagcactgcagcttatagttgacgtaaatgatacagcaaaccctactgatatatcctacatcttttctggatacgcacctcttagtattcgccttgttcagcatgcagtgagatctggatggcggtctattgaagaactgttgaaactattgccaggcccacatctggatttgaaaagaggtggtttgacaattaattcatcaccggaggtacatccaggtttaggggctcaacagagtattgacagggttggtcatcgctctctggttttggttgtattcattggtggtgtcacatttgctgagattgctgcccttcgcttccttagtgcacaggaaggaatgggctacgactttcttgttgcaacaacaaaggttgtcaatggaaacacaatactcagacccattatagcaaatagcaaagaggggatgatgtaattttattccttttctgtgcatgtgttttttgtaattgcaattgcagacaaacccaagcttgtgggttttcttgtttggctgtgagttcgtgtttggtcagcaactggacgataaggctaaccacgcttgttgatagatggaatccaacagtcccattttttgttctgttctgttctgtagtacatccgctaaactgtaaatcctgggtttcatgtgttcgtctgtctttttattcaataattgcttccttgaaggccgtttatgttgtttgtggaccaatattgtgaaaaaagaaagaatgtatggaacctgttgcaaatctgcatattcttattcctcttttttactgaag

SEQ ID NO: 77182 - DNA, 2598 bp, Zea Mays
ctaaattaaaaaagacggacagcccagcccatctcgtcttgtctcggcgataccggctaccgccggcgaccttccgtctatccaactcgcagcgtcccacgccggtgaccccgctgggcggcagaaggagacgtcgggtgccgcggagcgccgcggagcgccgccgccgtccaagctgcctccctcggctggtggactgtatcactgctcctcagacacccgctgttctgtccggcaacgtgcctccgccgcaaacccgctcgatcagcctgaggcatcgcacgatttctgactcatactttatcgccaattggctggggtggagcacatctctacccggacttgatagattccaatccttcccaactcaacgttgggcagatggcgcagatccccaatcttgacaacgcgccgctcaaccttgcggccctcagggagcagtcgcagaaggacttgttcggcatcctaaaaaatataaggggaaagaagtgcttggttatagatcccaagctcgctgggactctctcattggtcgtgcagacatcgctgctaaaggagtatggcgcggaagtgcggattctctctcccgaacccctgcagacggaatgccccaaaattgtatatcttgtgcgctctcagctgaggttcatgaagttcatcgcaagtcaaatcaagaacgatgaacctaaagggctccagagggaatacttcctttactttgtacctcgccgcactgttgcttgtgagaagatcctggaggaagagaaagttcatcagaaactgacattcggagaatatcccttatatctagttccattggatgatgatgtcttgtctcttgaacttgaccattctttgcaggaatgccttattgaaggagatacaagttctatctggcatgttgctaaagcgatccataaattagagtttgcctttggagttatcccgaatgttagggccaagggtgtggcgtcaaccaaagctgcagagttgttgaatagtatgcaactagaggatccagtcaacatggatgatatggggattccagagataaacactgttattctgttagacagagaggtggacatggtaacaccaatgtgctctcagttgacgtatgaaggcttgttggatgagatttcagcatgtcttctgggattacacattacaccatcacttttttcagtgccaatgcaatgctacaaattaataatggttcagtggaagttgatgcaagcatcattggagctcaacaagatgggaaaaaggttaaggttccactgaattcaagcgataagttgtacaaggagattcgagacctcaattttgaagttgtagttcaggttttacgtcaaaaagcaacatctattcagcaagattatgcagaagtgaaatccaccaacactcagtctgtttcggagctcaaggattttgtgaggaggttgcactcgctaccggagatagctaggcatgttcatttggcacaacacttgcaatcgttcacggggaaaccctcctttcatgcccgactagacatagaacaaacaatactggaggttcagaactttgaaatatgctttgagtacattgaggagatgatacataagcaggaagttattgaaaacgtccttcgccttttggtgttactttctcttacaaatgccgggcttccaaagaagaattttgattacatgaggcgggagatacttcatagttatggctttgagcacatgcacttattatacaatctggagaaggctggccttcttaagaggcaggaatcaagaagcaattgggttggtattacaagagcactgcagcttatagttgacgtaaatgatacagcaaaccctactgatatatcctacatcttttctggatacgcacctcttagtattcgccttgttcagcatgcagtgagatctggatggcggtctattgaagaactgttgaaactattgccaggcccacatctggatttgaaaagaggtggtttgacaattaattcatcaccggaggtacatccaggtttaggggctcaacagagtattgacagggttggtcatcgctctctggttttggttgtattcattggtggtgtcacatttgctgagattgctgcccttcgcttccttagtgcacaggaaggaatgggctacgactttcttgttgcaacaacaaaggttgtcaatggaaacacaatactcagacccattatagcaaatagcaaagaggggatgatgtaattttattccttttctgtgcatgtgttttttgtaattgcaattgcagacaaacccaagcttgtgggttttcttgtttggctgtgagttcgtgtttggtcagcaactggacgataaggctaaccacgcttgttgatagatggaatccaacagtcccattttttgttctgttctgttctgtagtacatccgctaaactgtaaatcctgggtttcatgtgttcgtctgtctttttattcaataattgcttccttgaaggccgtttatgttgtttgtggaccaatattgtgaaaaaagaaagaatgtatggaacctgttgcaaatctgcatattcttattcctcttttttactgaag

SEQ ID NO: 77183 - DNA, 2430 bp, Zea Mays
ctaaattaaaaaagacggacagcccagcccatctcgtcttgtctcggcgataccggctaccgccggcgaccttccgtctatccaactcgcagcgtcccacgccggtgaccccgctgggcggcagaaggagacgtcgggtgccgcggagcgccgcggagcgccgccgccgtccaagctgcctccctcggctggtggactgtatcactgctcctcagacacccgctgttctgtccggcaacgtgcctccgccgcaaacccgctcgatcagcctgaggcatcgcacgatttctgactcatactttatcgccaattggctggggtggagcacatctctacccggacttgatagattccaatccttcccaactcaacgttgggcagatggcgcagatccccaatcttgacaacgcgccgctcaaccttgcggccctcagggagcagtcgcagaaggacttgttcggcatcctaaaaaatataaggggaaagaagtgcttggttatagatcccaagctcgctgggactctctcattggtcgtgcagacatcgctgctaaaggagtatggcgcggaagtgcggattctctctcccgaacccctgcagacggaatgccccaaaattgtatatcttgtgcgctctcagctgaggttcatgaagttcatcgcaagtcaaatcaagaacgatgaacctaaagggctccagagggaatacttcctttactttgtacctcgccgcactgttgcttgtgagaagatcctggaggaagagaaagttcatcagaaactgacattcggagaatatcccttatatctagttccattggatgatgatgtcttgtctcttgaacttgaccattctttgcaggaatgccttattgaaggagatacaagttctatctggcatgttgctaaagcgatccataaattagagtttgcctttggagttatcccgaatgttagggccaagggtgtggcgtcaaccaaagctgcagagttgttgaatagtatgcaactagaggatccagtcaacatggatgatatggggattccagagataaacactgttattctgttagacagagaggtggacatggtaacaccaatgtgctctcagttgacgtatgaaggcttgttggatgagatgctacaaattaataatggttcagtggaagttgatgcaagcatcattggagctcaacaagatgggaaaaaggttaaggttccactgaattcaagcgataagttgtacaaggagattcgagacctcaattttgaagttgtagttcaggttttacgtcaaaaagcaacatctattcagcaagattatgcagaagtgaaatccaccaacactcagtctgtttcggagctcaaggattttgtgaggaggttgcactcgctaccggagatagctaggcatgttcatttggcacaacacttgcaatcgttcacggggaaaccctcctttcatgcccgactagacatagaacaaacaatactggaggttcagaactttgaaatatgctttgagtacattgaggagatgatacataagcaggaagttattgaaaacgtccttcgccttttggtgttactttctcttacaaatgccgggcttccaaagaagaattttgattacatgaggcgggagatacttcatagttatggctttgagcacatgcacttattatacaatctggagaaggctggccttcttaagaggcaggaatcaagaagcaattgggttggtattacaagagcactgcagcttatagttgacgtaaatgatacagcaaaccctactgatatatcctacatcttttctggatacgcacctcttagtattcgccttgttcagcatgcagtgagatctggatggcggtctattgaagaactgttgaaactattgccaggcccacatctggatttgaaaagaggtggtttgacaattaattcatcaccggaggtacatccaggtttaggggctcaacagagtattgacagggttggtcatcgctctctggttttggttgtattcattggtggtgtcacatttgctgagattgctgcccttcgcttccttagtgcacaggaaggaatgggctacgactttcttgttgcaacaacaaagacaaacccaagcttgtgggttttcttgtttggctgtgagttcgtgtttggtcagcaactggacgataaggctaaccacgcttgttgatagatggaatccaacagtcccattttttgttctgttctgttctgtagtacatccgctaaactgtaaatcctgggtttcatgtgttcgtctgtctttttattcaataattgcttccttgaaggccgtttatgttgtttgtggaccaatattgtgaaaaaagaaagaatgtatggaacctgttgcaaatctgcatattcttattcctcttttttactgaag

SEQ ID NO: 77184 - DNA, 2432 bp, Zea Mays
ctaaattaaaaaagacggacagcccagcccatctcgtcttgtctcggcgataccggctaccgccggcgaccttccgtctatccaactcgcagcgtcccacgccggtgaccccgctgggcggcagaaggagacgtcgggtgccgcggagcgccgcggagcgccgccgccgtccaagctgcctccctcggctggtggactgtatcactgctcctcagacacccgctgttctgtccggcaacgtgcctccgccgcaaacccgctcgatcagcctgaggcatcgcacgatttctgactcatactttatcgccaattggctggggtggagcacatctctacccggacttgatagattccaatccttcccaactcaacgttgggcagatggcgcagatccccaatcttgacaacgcgccgctcaaccttgcggccctcagggagcagtcgcagaaggacttgttcggcatcctaaaaaatataaggggaaagaagtgcttggttatagatcccaagctcgctgggactctctcattggtcgtgcagacatcgctgctaaaggagtatggcgcggaagtgcggattctctctcccgaacccctgcagacggaatgccccaaaattgtatatcttgtgcgctctcagctgaggttcatgaagttcatcgcaagtcaaatcaagaacgatgaacctaaagggctccagagggaatacttcctttactttgtacctcgccgcactgttgcttgtgagaagatcctggaggaagagaaagttcatcagaaactgacattcggagaatatcccttatatctagttccattggatgatgatgtcttgtctcttgaacttgaccattctttgcaggaatgccttattgaaggagatacaagttctatctggcatgttgctaaagcgatccataaattagagtttgcctttggagttatcccgaatgttagggccaagggtgtggcgtcaaccaaagctgcagagttgttgaatagtatgcaactagaggatccagtcaacatggatgatatggggattccagagataaacactgttattctgttagacagagaggtggacatggtaacaccaatgtgctctcagttgacgtatgaaggcttgttggatgagatgctacaaattaataatggttcagtggaagttgatgcaagcatcattggagctcaacaagatgggaaaaaggttaaggttccactgaattcaagcgataagttgtacaaggagattcgagacctcaattttgaagttgtagttcaggttttacgtcaaaaagcaacatctattcagcaagattatgcagaagtgaaatccaccaacactcagtctgtttcggagctcaaggattttgtgaggaggttgcactcgctaccggagatagctatgctttgagtacattgaggagatgatacataagcaggaagttattgaaaacgtccttcgccttttggtgttactttctcttacaaatgccgggcttccaaagaagaattttgattacatgaggcgggagatacttcatagttatggctttgagcacatgcacttattatacaatctggagaaggctggccttcttaagaggcaggaatcaagaagcaattgggttggtattacaagagcactgcagcttatagttgacgtaaatgatacagcaaaccctactgatatatcctacatcttttctggatacgcacctcttagtattcgccttgttcagcatgcagtgagatctggatggcggtctattgaagaactgttgaaactattgccaggcccacatctggatttgaaaagaggtggtttgacaattaattcatcaccggaggtacatccaggtttaggggctcaacagagtattgacagggttggtcatcgctctctggttttggttgtattcattggtggtgtcacatttgctgagattgctgcccttcgcttccttagtgcacaggaaggaatgggctacgactttcttgttgcaacaacaaaggttgtcaatggaaacacaatactcagacccattatagcaaatagcaaagaggggatgatgtaattttattccttttctgtgcatgtgttttttgtaattgcaattgcagacaaacccaagcttgtgggttttcttgtttggctgtgagttcgtgtttggtcagcaactggacgataaggctaaccacgcttgttgatagatggaatccaacagtcccattttttgttctgttctgttctgtagtacatccgctaaactgtaaatcctgggtttcatgtgttcgtctgtctttttattcaataattgcttccttgaaggccgtttatgttgtttgtggaccaatattgtgaaaaaagaaagaatgtatggaacctgttgcaaatctgcatattcttattcctcttttttactgaag

SEQ ID NO: 77185 - DNA, 2068 bp, Zea Mays
ctaaattaaaaaagacggacagcccagcccatctcgtcttgtctcggcgataccggctaccgccggcgaccttccgtctatccaactcgcagcgtcccacgccggtgaccccgctgggcggcagaaggagacgtcgggtgccgcggagcgccgcggagcgccgccgccgtccaagctgcctccctcggctggtggactgtatcactgctcctcagacacccgctgttctgtccggcaacgtgcctccgccgcaaacccgctcgatcagcctgaggcatcgcacgatttctgactcatactttatcgccaattggctggggtggagcacatctctacccggacttgatagattccaatccttcccaactcaacgttgggcagatggcgcagatccccaatcttgacaacgcgccgctcaaccttgcggccctcagggagcagtcgcagaaggacttgttcggcatcctaaaaaatataaggggaaagaagtgcttggttatagatcccaagctcgctgggactctctcattggtcgtgcagacatcgctgctaaaggagtatggcgcggaagtgcggattctctctcccgaacccctgcagacggaatgccccaaaattgtatatcttgtgcgctctcagctgaggttcatgaagttcatcgcaagtcaaatcaagaacgatgaacctaaagggctccagagggaatacttcctttactttgtacctcgccgcactgttgcttgtgagaagatcctggaggaagagaaagttcatcagaaactgacattcggagaatatcccttatatctagttccattggatgatgatgtcttgtctcttgaacttgaccattctttgcaggaatgccttattgaaggagatacaagttctatctggcatgttgctaaagcgatccataaattagagtttgcctttggagttatcccgaatgttagggccaagggtgtggcgtcaaccaaagctgcagagttgttgaatagtatgcaactagaggatccagtcaacatggatgatatggggattccagagataaacactgttattctgttagacagagaggtggacatggtaacaccaatgtgctctcagttgacgtatgaaggcttgttggatgagatgctacaaattaataatggttcagtggaagttgatgcaagcatcattggagctcaacaagatgggaaaaaggttaaggttccactgaattcaagcgataagttgtacaaggagattcgagacctcaattttgaagttgtagttcaggttttacgtcaaaaagcaacatctattcagcaagattatgcagaagtgaaatccaccaacactcagtctgtttcggagctcaaggattttgtgaggaggttgcactcgctaccggagatagctaggcatgttcatttggcacaacacttgcaatcgttcacggggaaaccctcctttcatgcccgactagacatagaacaaacaatactggaggttcagaactttgaaatatgctttgagtacattgaggagatgatacataagcaggaagttattgaaaacgtccttcgccttttggtgttactttctcttacaaatgccgggcttccaaagaagaattttgattacatgaggcgggagatacttcatagttatggctttgagcacatgcacttattatacaatctggagaaggctggccttcttaagaggcaggaatcaagaagcaattgggttggtattacaagagcactgcagcttatagttgacgtaaatgatacagcaaaccctactgatatatcctacatcttttctggatacgcacctcttagtattcgccttgttcagcatgcagtgagatctggatggcggtctattgaagaactgttgaaactattgccaggcccacatctggatttgaaaagaggtggtttgacaattaattcatcaccggaggtacatccaggtttaggggctcaacagagtattgacagattggagatgactccaaaatatccttccgaggcagcgcttgggcagggggaatgagaccgaaggacttgac

SEQ ID NO: 77186 - DNA, 1134 bp, Zea Mays
gagcgctgcggagtattttgcccagctggaggagcgatctaaataatcaaaaacccgaaggttcggactgaatgaagcgaaagccgaaatcccattccccttccccctcttcgtctccgtcggcggcgtcggaccgaacccgagcccggagccctaactaaccctaggaggcaggcggcggcggggatggtgtactacgcgctgttggtgggcgcggagctggatggcctcaccaacctgcagccccgccacggctgcgacgaccccaacttcccctactacctcaagctcaagtgcgagaactgcggggaggtcaccgccaagtccacctacgtcaccctcagcgagcaagtcgacctgcccaaaggacacggcgccgctcacctcgtccagaaggtgcatgggactccttttgaaattgactgctctgaaggtgaattttctgagtatgatgagaagggagaatgccccgttgagctaggcaagctgcagtcaacattcaaagtggtgaagaagcatgagaggggtgggaagactagatttgtctagatcgagtgacttggaatctgacagatattggagttggcggtgtataaatggtagatttgggctgaaggtcatgcgtgatccgacctcctttttcttctatctgttgattctgtggatgccgtgaaccatgcgaagctttcggtgatagtgtccacaggagcattaccctgtaccgaaactcatctttataacttaccaccaatgctcgaacatgttgctggttgctggtatttttagcactgttctctctggctaatgggtctgaagacatctcaaggggatatgtggtgcaatctgagttctttaaagggcatcgtcacttgtggatgttgattgtggggcaaccttggcttgctataatttttagataccgtttagttgactagcattagcacgctcaaatgcacgcttgtgtgtgtacccggtgctatcgccgtgacaaaggctctcgtcaactttgtgctttgttttagcgcacgcatggagatccaagaatatcttggccaaagctgcatgtttcttttcatttgttccgcaaaattctcttccgtacttatgatcaatgctggctgtcagttgtcacaa

SEQ ID NO: 77187 - DNA, 431 bp, Zea Mays
gagcgctgcggagtattttgcccagctggaggagcgatctaaataatcaaaaacccgaaggttcggactgaatgaagcgaaagccgaaatcccattccccttccccctcttcgtctccgtcggcggcgtcggaccgaacccgagcccggagccctaactaaccctaggaggcaggcggcggcggggatggtgtactacgcgctgttggtgggcgcggagctggatggcctcaccaacctgcagccccgccacggctgcgacgaccccaacttcccctactacctcaagctcaagtgcgagaactgcggggaggtcaccgccaagtccacctacgtcaccctcagcgagcaagtcgacctgcccaaaggacacggcgccgctcacctcgtccagaagaagtctagtgtcaccggtgaaccattcgaaacaag

SEQ ID NO: 77188 - DNA, 374 bp, Zea Mays
ctttgctaaattgttgatccagccttgtttgaataacgaagtggtgttcatcattggaccagagaaggaggtcaggaaagctgaggccatctttcgaggccgaatgctggagttctagagatgttaccctttgcgatacaggtttcaactgctttatattttgaacgtaaaaaggggaatatccaaaaggtgtatgcgggaccgtggatcccttgaccgtctgtgaatcatgaaaacaaaataaaggatttcaacttggcacttcgcgtttctggcctgttttcctcaacgcgtcaggatgcagaagcatgtttagatttcactctagcctccacctgtgcactaacatggtaacgatcgttgtaattgcggcg

SEQ ID NO: 77189 - DNA, 542 bp, Zea Mays
aatcatgtttggcggagccaccagcggccattttagggatgacattgaggctgatgtttatgttcctgaagccgatatcctgtcagtcttagatgtgcctcctgggaaaatgggacgagttattggcagaaaggggtcaacgataatggctgtgaaagaatgttgcaaggttgaaatacatattggtggtgctaaggggcctccagacagggtgttcatcattggaccagagaaggaggtcaggaaagctgaggccatctttcgaggccgaatgctggagttctagagatgttaccctttgcgatacaggtttcaactgctttatattttgaacgtaaaaaggggaatatccaaaaggtgtatgcgggaccgtggatcccttgaccgtctgtgaatcatgaaaacaaaataaaggatttcaacttggcacttcgcgtttctggcctgttttcctcaacgcgtcaggatgcagaagcatgtttagatttcactctagcctccacctgtgcactaacatggtaacgatcgttgtaattgcggcg

SEQ ID NO: 77190 - DNA, 790 bp, Zea Mays
ctggtttaatatcctgaaaacggcatactatatcctgaaaaggaagaagtccgtacccttctaaggcaggaccctaacttttggacaattaggcccttgtctgatatgatggttcgagctgccacagatgatgtccgcttccttctcagtatatatgcgaaaatgatggaaaagttaagcaaagtatctttatggcgtctggcagttcgcagtgagctgtactgtaggtgcttttgcttaagcgacaaccagtttgcagattggtcacctcttcctcctgtccctgatgacattgaggctgatgtttatgttcctgaagccgatatcctgtcagtcttagatgtgcctcctgggaaaatgggacgagttattggcagaaaggggtcaacgataatggctgtgaaagaatgttgcaaggttgaaatacatattggtggtgctaaggggcctccagacagggtgttcatcattggaccagagaaggaggtcaggaaagctgaggccatctttcgaggccgaatgctggagttctagagatgttaccctttgcgatacaggtttcaactgctttatattttgaacgtaaaaaggggaatatccaaaaggtgtatgcgggaccgtggatcccttgaccgtctgtgaatcatgaaaacaaaataaaggatttcaacttggcacttcgcgtttctggcctgttttcctcaacgcgtcaggatgcagaagcatgtttagatttcactctagcctccacctgtgcactaacatggtaacgatcgttgtaattgcggcg

SEQ ID NO: 77191 - DNA, 1410 bp, Zea Mays
gctagcggtaaccgtcgcctcacttccgcagcaccggcgcggcgactattagctatagccgagtaggcgcagccgcgcacggcgcacccctcgtgttcccttttcgtccttgttcctcaacgtcgccggtgcgcccgcctcctgcctctctccccctgcgagcgatcgtgaggggatcgggatggcctcccaccattccgagcccctcgaccccgccgacgctgacgacccctcagataacaacccagaattaccatgcccctcctatcatatcgttaccaaacctggtcaactcccagtcgagtttcttgaaccctcagctgcccagaagttggtaattggatttgactgtgaaggtgttgatctctgccgcaatggtgctctctgtattatgcagcttgcattccctgatgctgtttacctagttgatgctattgagggtggaaaagaacttattcaagcttgtaagcccgcacttgagtctgatcatatcaccaaagttattcatgattgtaaaagggacagtgaggctttgtattttcagtttggcataaaactgcataatgtgatggatacacagattgcttattctctgatagaagagcaggagcaggaaggaaaaaagatgacatctgatgattacaattacatatcttttgtcagccttcttgctgataaacgatactgtggaccctaacttttggacaattaggcccttgtctgatatgatggttcgagctgccacagatgatgtccgcttccttctcagtatatatgcgaaaatgatggaaaagttaagcaaagtatctttatggcgtctggcagttcgcagtgagctgtactgtaggtgcttttgcttaagcgacaaccagtttgcagattggtcacctcttcctcctgtccctgatgacattgaggctgatgtttatgttcctgaagccgatatcctgtcagtcttagatgtgcctcctgggaaaatgggacgagttattggcagaaaggggtcaacgataatggctgtgaaagaatgttgcaaggttgaaatacatattggtggtgctaaggggcctccagacagggtgttcatcattggaccagagaaggaggtcaggaaagctgaggccatctttcgaggccgaatgctggagttctagagatgttaccctttgcgatacaggtttcaactgctttatattttgaacgtaaaaaggggaatatccaaaaggtgtatgcgggaccgtggatcccttgaccgtctgtgaatcatgaaaacaaaataaaggatttcaacttggcacttcgcgtttctggcctgttttcctcaacgcgtcaggatgcagaagcatgtttagatttcactctagcctccacctgtgcactaacatggtaacgatcgttgtaattgcggcg

SEQ ID NO: 77192 - DNA, 1100 bp, Zea Mays
gctagcggtaaccgtcgcctcacttccgcagcaccggcgcggcgactattagctatagccgagtaggcgcagccgcgcacggcgcacccctcgtgttcccttttcgtccttgttcctcaacgtcgccggtgcgcccgcctcctgcctctctccccctgcgagcgatcgtgaggggatcgggatggcctcccaccattccgagcccctcgaccccgccgacgctgacgacccctcagataacaacccagaattaccatgcccctcctatcatatcgttaccaaacctggtcaactcccagtcgagtttcttgaaccctcagctgcccagaagttggtaattggatttgactgtgaaggtgttgatctctgccgcaatggtgctctctgtattatgcagcttgcattccctgatgctgtttacctagttgatgctattgagggtggaaaagaacttattcaagcttgctttgtattttcagtttggcataaaactgcataatgtgatggatacacagattgcttattctctgatagaagagcaggagcaggaaggaaaaaagatgacatctgatgattacaattacatatcttttgtcagccttcttgctgataaacgatactgtggcatactatatcctgaaaaggaagaagtccgtacccttctaaggcaggaccctaacttttggacaattaggcccttgtctgatatgatggttcgagctgccacagatgatgtccgcttccttctcagtatatatgcgaaaatgatggaaaagttaagcaaagtatctttatggcgtctggcagttcgcagtgagctgtactgtaggtgcttttgcttaagcgacaaccagtttgcagattggtcacctcttcctcctgtccctgatgacattgaggctgatgtttatgttcctgaagccgatatcctgtcagtcttagatgtgcctcctgggaaaatgggacgagttattggcagaaaggggtcaacgataatggctgtgaaagaatgttgcaaggttgaaatacatattggtggtgctaaggggcctccagacaggccacatgtcagaaatgttgatggcatattaggaatcgag

SEQ ID NO: 77193 - DNA, 1253 bp, Zea Mays
ccacaggatgtgccatatgtgtactgcctgttctatgtcatattcgttccgctccgctggatttactaccgctacaagaaatggcattactatctcctggacttctgctactatgccaacacctttctccttgtaatgattctcttctatccgaaagatgaaaaacttttcatggtttgcttctcgtttgcagagggtccacttgcttgggcattaattgtgtggcgttgcagcttagtttttggttcatttgacaaacttgttagtgtcctgatacatctcttacctgggattgttctattcactatccggtggtgggatccacaaacatttgctgccatgcacccggaaggaagagatgccagagtcacatggccatatgtggaggacaaatcatatatgtggacatggcttttttttgttccactagctgcttacaccctgtggcaacttatgtatttcctcatagttaatgtcctgcgccggcagaggttgttaagggatcctgaagtcatgacatcctacagagagctctcaaagaaagcacagaaagcaaacaacatctggtggaggctgagcggactgctgggtgaccggaaccggcaggtcatgtacatactgctccaggcgctgttcacagtggcaacaatggccctgacggtccctatattcctgtcctaccggatgcacgtggtgttcctgatactcaaggtgtgcgcctcgacatggaacggtggcagcttcatcttggaggtgatgcctcgacaagtagaacggaagcagcagaagaaactgggcatgaagcccatcgaacaggggagctggacacaaggggcgccggctgatggtacgtacattgggtaaccaccaccaagcacacatctgaggagaaaatccaggagtgaggaaatcgaagctggatgtaacaatagattttactgtttgcaaatgcaacctttgttttttttttctgggtgttcttcgtgttggaggtttttttagctctgccctagttgtgagttgtgacatctttagttttaggctgaagtctgaacgatatggggtgagagatcatgcgtgcccatggttgtcttgggattggacatgcataagttgagatgttctccttttctgtaggagttttcttttcgatgtgaccgttgtgaattgcgtgaagcttttttttcattgttcgtttaattttttttagagagaggccccggggcctattcaagcccgcgacattatattaa

SEQ ID NO: 77194 - DNA, 1402 bp, Zea Mays
cggagagggatcaggctaaggcgattttgtccaagcaggccgtcaagatcgccaccaaggccgagcagcacgagcgcttcatctttaaggtcacacacttgctgggtgttcttggatttgggggattttgctatctcttgggtgccagaccacaggatgtgccatatgtgtactgcctgttctatgtcatattcgttccgctccgctggatttactaccgctacaagaaatggcattactatctcctggacttctgctactatgccaacacctttctccttgtaatgattctcttctatccgaaagatgaaaaacttttcatggtttgcttctcgtttgcagagggtccacttgcttgggcattaattgtgtggcgttgcagcttagtttttggttcatttgacaaacttgttagtgtcctgatacatctcttacctgggattgttctattcactatccggtggtgggatccacaaacatttgctgccatgcacccggaaggaagagatgccagagtcacatggccatatgtggaggacaaatcatatatgtggacatggcttttttttgttccactagctgcttacaccctgtggcaacttatgtatttcctcatagttaatgtcctgcgccggcagaggttgttaagggatcctgaagtcatgacatcctacagagagctctcaaagaaagcacagaaagcaaacaacatctggtggaggctgagcggactgctgggtgaccggaaccggcaggtcatgtacatactgctccaggcgctgttcacagtggcaacaatggccctgacggtccctatattcctgtcctaccggatgcacgtggtgttcctgatactcaaggtgtgcgcctcgacatggaacggtggcagcttcatcttggaggtgatgcctcgacaagtagaacggaagcagcagaagaaactgggcatgaagcccatcgaacaggggagctggacacaaggggcgccggctgatggtacgtacattgggtaaccaccaccaagcacacatctgaggagaaaatccaggagtgaggaaatcgaagctggatgtaacaatagattttactgtttgcaaatgcaacctttgttttttttttctgggtgttcttcgtgttggaggtttttttagctctgccctagttgtgagttgtgacatctttagttttaggctgaagtctgaacgatatggggtgagagatcatgcgtgcccatggttgtcttgggattggacatgcataagttgagatgttctccttttctgtaggagttttcttttcgatgtgaccgttgtgaattgcgtgaagcttttttttcattgttcgtttaattttttttagagagaggccccggggcctattcaagcccgcgacattatattaa

SEQ ID NO: 77195 - DNA, 1453 bp, Zea Mays
agttttggcttcccctccgccactctcgagagggccacacacaaaaaccccaatgcgagcgcccctggcttgtcggcgtcgcctccttcagccaaaaccctagcttgcatacgcgcccgaacaaagcttcgtctgcgaggggcgtcctcctgccgccagaagctttcaggagcatcagcgatggtgtggttccaatgcgaggactgtggcgagaacctcaagaagcccaaacttgccggccacttccgctcctgctccgcgtacaagctgtcatgcatcgattgcggcgagttattcagccacgacaccgtgcaggggcacacccagtgcatctccgaggccgagaagtacggtcctaagggacagaccaaaccatccaatggtgcacagggtaaggcagataagccaaagccaaatgcagatgtcgatatcaatgttgggctgtcgacacggcctccttggttctgtagcctatgcaagaccactaccacaagtaagcaaactctcttactacatgctgatgggaagaagcatagggcaaaggcgaaagccttccatgtgtctcagaaacaaaaagatggtgcagaacaaactccagatgtgaaggaagctggagttgtacccacaaaagaatctgctcaagtaaatggtggcgtgagtggtgatcatgaaagaaatgaagataaagatgctgggaaaaggaaacgaatggatgacatgaccatagagccaggtaacacaaaaagacagttgacacagtctggagatgagaagtcagaaaacaaagcgaagagtaaggccgatgaactagcaagtggtaccgactgcaaaagtgttcaaaagcaaaagatcaaatggaagaagattattactaaaacattgaaggcgaacgcagatggagttatgaagctaaagaagctacaaaagctagtctccaaggagcttcaggaatgtggtgtctccaaagacaaggaggagctccgtgctaccttgatggataaacttcaagttccagattttatgttgatggcaagaatgttagactggtggccaagaatgaagaagaatcttagaaagaggttgtcagtcatttttttggcattgttgctggtttcattctttggtgtcaactttcagatggcttatagccaagtgttggttaaattgagtccatgaaccatcaattatatccatgacgtgtagacggtatgggaatttagcatctgaattttctcgacaaccgttcaaaagtgaaatgtttactctttatgctgtcaagcaatggcaatgatggttgatagtggcggcgtagtcgcaggggagagatgagagatgatacaaataatgttcattggatttgagtaagggagaagatgttatgtagtgctctgaaccatcgattttgatggtgtgataattctgggtgcaattcgtttggtggatttagtagata

SEQ ID NO: 77196 - DNA, 1364 bp, Zea Mays
agttttggcttcccctccgccactctcgagagggccacacacaaaaaccccaatgcgagcgcccctggcttgtcggcgtcgcctccttcagccaaaaccctagcttgcatacgcgcccgaacaaagcttcgtctgcgaggggcgtcctcctgccgccagaagctttcaggagcatcagcgatggtgtggttccaatgcgaggactgtggcgagaacctcaagaagcccaaacttgccggccacttccgctcctgctccgcgtacaagctgtcatgcatcgattgcggcgagttattcagccacgacaccgtgcaggggcacacccagtgcatctccgaggccgagaagtacggtcctaagggacagaccaaaccatccaatggtgcacagggtaaggcagataagccaaagccaaatgcagatgtcgatatcaatgttgggctgtcgacacggcctccttggttctgtagcctatgcaagaccactaccacaaaacaaactccagatgtgaaggaagctggagttgtacccacaaaagaatctgctcaagtaaatggtggcgtgagtggtgatcatgaaagaaatgaagataaagatgctgggaaaaggaaacgaatggatgacatgaccatagagccaggtaacacaaaaagacagttgacacagtctggagatgagaagtcagaaaacaaagcgaagagtaaggccgatgaactagcaagtggtaccgactgcaaaagtgttcaaaagcaaaagatcaaatggaagaagattattactaaaacattgaaggcgaacgcagatggagttatgaagctaaagaagctacaaaagctagtctccaaggagcttcaggaatgtggtgtctccaaagacaaggaggagctccgtgctaccttgatggataaaatagcttcaagttccagattttatgttgatggcaagaatgttagactggtggccaagaatgaagaagaatcttagaaagaggttgtcagtcatttttttggcattgttgctggtttcattctttggtgtcaactttcagatggcttatagccaagtgttggttaaattgagtccatgaaccatcaattatatccatgacgtgtagacggtatgggaatttagcatctgaattttctcgacaaccgttcaaaagtgaaatgtttactctttatgctgtcaagcaatggcaatgatggttgatagtggcggcgtagtcgcaggggagagatgagagatgatacaaataatgttcattggatttgagtaagggagaagatgttatgtagtgctctgaaccatcgattttgatggtgtgataattctgggtgcaattcgtttggtggatttagtagata

SEQ ID NO: 77197 - DNA, 2519 bp, Zea Mays
cgcgtgcccaagtggctcacgcgctcccgcaccctagttgtgccctcgccacaccctcgcccacgccaacccctgcctccctcccctcgtgcccgcgtttcggatctgccacctcccgctgcaccctgcctccctctcctaaccttgccagcaggaccaccgtcagtgatgcctccctcccgccgcaccttgcctcctcatcccacctctccaccaggcctgtgtccccgtcgttgctcgtgttgggcccgtgccagactcgtccacgccgctgctgtagagcgcgcgtcaggcgagggggtcgagtgcgcgaccgagatagaggctacgacaacctcctcggccaccttgccatctccattgtcctcagggccaatgctggtagaggcactttggttcctggatgagctgcgaaggaatgggagatggtgggtaagcgtggggtgtagatccgtccaggctcagatcgatttcttcgttcgctgctcgacaagtgcagttaatactagcatgcttgttgttagcacctaaaaacagtgaagcagctgcattctgggtgccatcctcgatcatggaaaacaacattctctatcaaattatatctcctcatgtaagcaaatgtagcctcttcttctgtaatatgattagtttgaacattgatactgaattatatgcacaaacatgcagtaggctattattctcttttgtgcaggatggtgctcaaattttgaaaatagatgtaggtgatccaattagattttactaccatggttcattgagcggcttgcttgtggacattccttttgtggtattttttctatatattgctattgactcatgtcataaatcagttagttatattttgctttgttgatggaactccatggggtgacaatataatgttttatttgcaaatttaggtgaaagtgaaggttgtttgcccctcaaaatgttccatgaaatcgaataacagtcaaactgttagttgtgagttatataggatctgtttatttttcctattttcatttctctgattttactacacaactttttccccacccattcaaggagcattccttaatgcatttggataatttgttctaaatgcgcctgttggaatcagtaagttacattcagaaagaatttgaccttccattgttagttggcatatgatgtagcagcggtaaaactagatctctatgaaagtcattgacatgtgcaactaattgttagaaaagtgtattgattcaaagtatgtttagctatagtttttatctttctaccttctcttttagatagagttagattgcatcagatatcttctctcttgtattcccaaatgcaaagtaatattggttccatctttgttgggtaatagaaagaatatatgttgatcggtttgtgccatatcctaataaaacaaaatatatgtgagttgtggtggatgctctgtagtcaatgtagtaatgccccaaatcagtgttgttcctttaaagtttaaactatattttgctttgtgattaaatttgcagatcactttgcactgagatgattaattctgccatctgtatcatacctaaattaagaaaaataacattgtgttgattaactacaagagttattacctcatcttattcttagagttgtcacatattgacatgcccttcataaaggttgagtgtcctaattctgggtgttcatgattggaaggtttgttgggttgattttctcagggactacacaatcactaggctagaaacgagcttatacttgcacgagctcaccttgtcatttgtggaagcattcactgtctcctgataagggtgagcttcacatcttcagaacagacacgttgaaggaaatgagtatccgagtaccaagtatgaaagaagagcttttggatataaatggcctctacaagtaatgtagctattctgccattttgaatgaattatgtatgatgccatccttttgttttcaaaaagggcttggtctcagtttgttcctttctttgatttttctccaacgtttcttgtcgcggtctcatggtgattgctataactcaacctccagttcttagtagggttgaacaaagtattcttaaggggtaggttgactcttctcacttgaaacgaaatttgcaggggttatgttgtgtaatggtagtatagtgtcacatcaaaccattatccctgacttagttcgtgctattcatgtgtggcatgtgtccagactttagagatcatatactatatggggcttgttttggctggtcacatccccctcttttctttttctgatcatatcattgcatttatgtgtcaatctaaattgtcttttttaaaagatccaatatgttctggtatctaaacaagatttgtcagattgcaagcatctgttgcgaggttatttaggcctcaaatagaatttttcgggcttatttcgttgatggagggaataaggcacatcttaatatatgattgtattgttgatttcggtttcgtgagagtagagatttt

SEQ ID NO: 77198 - DNA, 538 bp, Zea Mays
gaccagggctctctccttgccgtcgctgtagcggatctggcggccatcctctcgccggatcgcaacaaccctgccaaattcttaacaaactccgcggatttccagctgcatccacttgaccggatccctgaaatatatctatggtcggacgccgcctctcccatcgtacccagaatttctaatcgcccttcctgcggacgccgtgaggataaatcgagggagaattgccggcgaggtcgcgctcgtgctgtcgtggagccttggttggtgaaacggtgcggccgctgggtcgcttgcactcgtgtggatgcgtggctgcgcgcggggtgctcggtgagcaaggaatcgttcacccgaatacggcattaccgcggctccacgccacgaaggggacagactccatcacgacgctgctgtggcggtgaggacacgtgtcatctgaagagcaagttggtacatggaatctcaagtcccaggcaagttgtgcccttgatcactttttacccaataatgttctttaatatcatttatccatgca

SEQ ID NO: 77199 - DNA, 2548 bp, Zea Mays
tggaaggaactgatggaagagagaggggagaggatgatacagcatttgagaagcaaagtgcattgtttgctttggccgtttcggacattgtgttgattaatatgtggtgtcatgacattggcagagaacaggctgcaaacaagcctcttttgaagactgttttccaggcaacatttgaggtcatgatgaggttgttcagtcctcgcaaaacaacattgttgtttgttatacgtgacaaatcaaggacacccctagaaaatcttgagccaattctaagggaagacattcagaagatatgggatgctgttccgaaaccccatgcccataaagaaactccaattagtgaatttttcgatgttcaagttgtcgcactgtcgagttatgaagaaaaagaagagttattcaaacagcaggtttctgatttaagagataggtttcagcattcaattgcccctggtggacttgctggggatcgtcgtggtgttgtcccagcttcaggtttctcatttagttcccagcaattttggaaagtcatcaaggagaacaaagatcttgatttgcctgctcataaagttatggtggctactgtacgttgtgaggaaattggtaatgagaaagttaccagctttatagctgatgaggaatggcaacaatttgaggaggctgtccaacatgactttgttactgggtttgggaagaagctcagcagccttctggatagatgtttatcagagtatgacatggaggctatttattttgatgaaggtgtcagaagctcgaaaagacaacaacttgagtctaaactgttacagcttgtcaatcctgcctatcaatctcttctaggtcacttacacactagaactttagaagcatttaaggagtactttggcaaggccctagaaaaggagggatttgctgttgcagcttgcaattgtactgaaactttcttggagaagtttgatagaggatctgaagatgctgctattcaacaagtgaattgggacacctcaaaagtgagggataagcttagacgtgacattgaggctcatgtagcttcagttcgggctgctaaattgtctgaactttgtgcgaaatatgaggcacaacttaccaaagctctggtggaaccagttgaatctcttctagattcagccagtgaagacacgtggccagctattagaaagcttcttcaacgcgagacaaaaactgctgttttaggtcttgaatctgctgtgtcagcttttgaactcgatgaagcaactgagaaagaactgcttgcgaagctggagaagcatggaaggagtgttgttgagtcaaaggcaaaagaagaagctggaagggttttgattcgcatgaaggacagtctgtgaagttgctttctacaatggctgcaattcggttggaggaggatggtgataacattgagaacactctttcccttgctcttgttgacacttcaagacatgggactacagataggagtatccaattgtccgatccactagcctccagctcatgggaaagggttgctgaggagaagactttaattacccctgtgcagtgcaaaaatttgtggaggcaattcaaagctgaaactgaatatacagtcactcaagccatagctgctcaggaagcaaataagaggaacaacaactggctcccacctccatgggcacttgctgcaatggctatccttggattcaacgagtttatgacattactgaggaatccgctttacctgtttgccatatttgtgatttatcttgttggaaaagccctttgggtgcaatcagaaattggcagggaattccaacatggatttcttcctgccatcctttcactgtcgacgaaatttgttcccactgtaatgaacatcctgaagagattagctgacgcgggtcaagaacctgcagcagcccccgagaggcaaagagagatggagctccaaccaaaatccaccaggaacggttccttatacagcaatgtgacatcggcagggtcatctagcgtaaccacttcggagattggacctgaatattcaagcccggttgtgcaatgattttgctgatctttagctttttggctggaaacatactctagcagttgagaaaaacagggtgcctcaagaacgtacgaagattttggtgccttgcagtttttgtaagcttgcccttcccagactgattcaaggtggcactgcccctcgttgttattcaaggaattttggggctggcggggttgtttgtaagagcattgtaaaataacttgtttcattttttggtttctgtaacatgaatacatgacatgtgatagttgtatataagatctgtggactgggggcgtatcagcgcattctacacagctaagggttgcatagttgcgagaactgaagcatgtaaatgtctttaaactgccatctgattgagatgcagtagtactgctgttctggaataagacatgtctgcttttggggaaaatgattcaaaaaatgtttcgtttgaactcagcgtctgctgaaaatgaatttggttcccgacccctgttctgg

SEQ ID NO: 77200 - DNA, 2596 bp, Zea Mays
tggatttggaaggaactgatggaagagagaggggagaggatgatacagcatttgagaagcaaagtgcattgtttgctttggccgtttcggacattgtgttgattaatatgtggtgtcatgacattggcagagaacaggctgcaaacaagcctcttttgaagactgttttccaggcaacatttgaggtcatgatgaggttgttcagtcctcgcaaaacaacattgttgtttgttatacgtgacaaatcaaggacacccctagaaaatcttgagccaattctaagggaagacattcagaagatatgggatgctgttccgaaaccccatgcccataaagaaactccaattagtgaatttttcgatgttcaagttgtcgcactgtcgagttatgaagaaaaagaagagttattcaaacagcaggtttctgatttaagagataggtttcagcattcaattgcccctggtggacttgctggggatcgtcgtggtgttgtcccagcttcaggtttctcatttagttcccagcaattttggaaagtcatcaaggagaacaaagatcttgatttgcctgctcataaagttatggtggctactgtacgttgtgaggaaattggtaatgagaaagttaccagctttatagctgatgaggaatggcaacaatttgaggaggctgtccaacatgactttgttactgggtttgggaagaagctcagcagccttctggatagatgtttatcagagtatgacatggaggctatttattttgatgaaggtgtcagaagctcgaaaagacaacaacttgagtctaaactgttacagcttgtcaatcctgcctatcaatctcttctaggtcacttacacactagaactttagaagcatttaaggagtactttggcaaggccctagaaaaggagggatttgctgttgcagcttgcaattgtactgaaactttcttggagaagtttgatagaggatctgaagatgctgctattcaacaagtgaattgggacacctcaaaagtgagggataagcttagacgtgacattgaggctcatgtagcttcagttcgggctgctaaattgtctgaactttgtgcgaaatatgaggcacaacttaccaaagctctggtggaaccagttgaatctcttctagattcagccagtgaagacacgtggccagctattagaaagcttcttcaacgcgagacaaaaactgctgttttaggtcttgaatctgctgtgtcagcttttgaactcgatgaagcaactgagaaagaactgcttgcgaagctggagaagcatggaaggagtgttgttgagtcaaaggcaaaagaagaagctggaagggttttgattcgcatgaaggacaggttctcaacattgttcagccgagatgctgactctatgcccagtctgtgaagttgctttctacaatggctgcaattcggttggaggaggatggtgataacattgagaacactctttcccttgctcttgttgacacttcaagacatgggactacagataggagtatccaattgtccgatccactagcctccagctcatgggaaagggttgctgaggagaagactttaattacccctgtgcagtgcaaaaatttgtggaggcaattcaaagctgaaactgaatatacagtcactcaagccatagctgctcaggaagcaaataagaggaacaacaactggctcccacctccatgggcacttgctgcaatggctatccttggattcaacgagtttatgacattactgaggaatccgctttacctgtttgccatatttgtgatttatcttgttggaaaagccctttgggtgcaatcagaaattggcagggaattccaacatggatttcttcctgccatcctttcactgtcgacgaaatttgttcccactgtaatgaacatcctgaagagattagctgacgcgggtcaagaacctgcagcagcccccgagaggcaaagagagatggagctccaaccaaaatccaccaggaacggttccttatacagcaatgtgacatcggcagggtcatctagcgtaaccacttcggagattggacctgaatattcaagcccggttgtgcaatgattttgctgatctttagctttttggctggaaacatactctagcagttgagaaaaacagggtgcctcaagaacgtacgaagattttggtgccttgcagtttttgtaagcttgcccttcccagactgattcaaggtggcactgcccctcgttgttattcaaggaattttggggctggcggggttgtttgtaagagcattgtaaaataacttgtttcattttttggtttctgtaacatgaatacatgacatgtgatagttgtatataagatctgtggactgggggcgtatcagcgcattctacacagctaagggttgcatagttgcgagaactgaagcatgtaaatgtctttaaactgccatctgattgagatgcagtagtactgctgttctggaataagacatgtctgcttttggggaaaatgattcaaaaaatgtttcgtttgaactcagcgtctgctgaaaatgaatttggttcccgacccctgttctgg

SEQ ID NO: 77201 - DNA, 2642 bp, Zea Mays
tatggctagcgaaggcccagaatattgaaccgtgcacccttgtaatggatttggaaggaactgatggaagagagaggggagaggatgatacagcatttgagaagcaaagtgcattgtttgctttggccgtttcggacattgtgttgattaatatgtggtgtcatgacattggcagagaacaggctgcaaacaagcctcttttgaagactgttttccaggcaacatttgaggtcatgatgaggttgttcagtcctcgcaaaacaacattgttgtttgttatacgtgacaaatcaaggacacccctagaaaatcttgagccaattctaagggaagacattcagaagatatgggatgctgttccgaaaccccatgcccataaagaaactccaattagtgaatttttcgatgttcaagttgtcgcactgtcgagttatgaagaaaaagaagagttattcaaacagcaggtttctgatttaagagataggtttcagcattcaattgcccctggtggacttgctggggatcgtcgtggtgttgtcccagcttcaggtttctcatttagttcccagcaattttggaaagtcatcaaggagaacaaagatcttgatttgcctgctcataaagttatggtggctactgtacgttgtgaggaaattggtaatgagaaagttaccagctttatagctgatgaggaatggcaacaatttgaggaggctgtccaacatgactttgttactgggtttgggaagaagctcagcagccttctggatagatgtttatcagagtatgacatggaggctatttattttgatgaaggtgtcagaagctcgaaaagacaacaacttgagtctaaactgttacagcttgtcaatcctgcctatcaatctcttctaggtcacttacacactagaactttagaagcatttaaggagtactttggcaaggccctagaaaaggagggatttgctgttgcagcttgcaattgtactgaaactttcttggagaagtttgatagaggatctgaagatgctgctattcaacaagtgaattgggacacctcaaaagtgagggataagcttagacgtgacattgaggctcatgtagcttcagttcgggctgctaaattgtctgaactttgtgcgaaatatgaggcacaacttaccaaagctctggtggaaccagttgaatctcttctagattcagccagtgaagacacgtggccagctattagaaagcttcttcaacgcgagacaaaaactgctgttttaggtcttgaatctgctgtgtcagcttttgaactcgatgaagcaactgagaaagaactgcttgcgaagctggagaagcatggaaggagtgttgttgagtcaaaggcaaaagaagaagctggaagggttttgattcgcatgaaggacaggttctcaacattgttcagccgagatgctgactctatgcccaggtctgtgaagttgctttctacaatggctgcaattcggttggaggaggatggtgataacattgagaacactctttcccttgctcttgttgacacttcaagacatgggactacagataggagtatccaattgtccgatccactagcctccagctcatgggaaagggttgctgaggagaagactttaattacccctgtgcagtgcaaaaatttgtggaggcaattcaaagctgaaactgaatatacagtcactcaagccatagctgctcaggaagcaaataagaggaacaacaactggctcccacctccatgggcacttgctgcaatggctatccttggattcaacgagtttatgacattactgaggaatccgctttacctgtttgccatatttgtgatttatcttgttggaaaagccctttgggtgcaatcagaaattggcagggaattccaacatggatttcttcctgccatcctttcactgtcgacgaaatttgttcccactgtaatgaacatcctgaagagattagctgacgcgggtcaagaacctgcagcagcccccgagaggcaaagagagatggagctccaaccaaaatccaccaggaacggttccttatacagcaatgtgacatcggcagggtcatctagcgtaaccacttcggagattggacctgaatattcaagcccggttgtgcaatgattttgctgatctttagctttttggctggaaacatactctagcagttgagaaaaacagggtgcctcaagaacgtacgaagattttggtgccttgcagtttttgtaagcttgcccttcccagactgattcaaggtggcactgcccctcgttgttattcaaggaattttggggctggcggggttgtttgtaagagcattgtaaaataacttgtttcattttttggtttctgtaacatgaatacatgacatgtgatagttgtatataagatctgtggactgggggcgtatcagcgcattctacacagctaagggttgcatagttgcgagaactgaagcatgtaaatgtctttaaactgccatctgattgagatgcagtagtactgctgttctggaataagacatgtctgcttttggggaaaatgattcaaaaaatgtttcgtttgaactcagcgtctgctgaaaatgaatttggttcccgacccctgttctgg

SEQ ID NO: 77202 - DNA, 2736 bp, Zea Mays
atggatgccttcagaggaaggtcacagactaccaaaggtatatggctagcgaaggcccagaatattgaaccgtgcacccttgtaatggatttggaaggaactgatggaagagagaggggagaggatgatacagcatttgagaagcaaagtgcattgtttgctttggccgtttcggacattgtgttgattaatatgtggtgtcatgacattggcagagaacaggctgcaaacaagcctcttttgaagactgttttccaggcaacatttgaggtcatgatgaggttgttcagtcctcgcaaaacaacattgttgtttgttatacgtgacaaatcaaggacacccctagaaaatcttgagccaattctaagggaagacattcagaagatatgggatgctgttccgaaaccccatgcccataaagaaactccaattagtgaatttttcgatgttcaagttgtcgcactgtcgagttatgaagaaaaagaagagttattcaaacagcaggtttctgatttaagagataggtttcagcattcaattgcccctggtggacttgctggggatcgtcgtggtgttgtcccagcttcaggtttctcatttagttcccagcaattttggaaagtcatcaaggagaacaaagatcttgatttgcctgctcataaagttatggtggctactgtacgttgtgaggaaattggtaatgagaaagttaccagctttatagctgatgaggaatggcaacaatttgaggaggctgtccaacatgactttgttactgggtttgggaagaagctcagcagccttctggatagatgtttatcagagtatgacatggaggctatttattttgatgaaggtgtcagaagctcgaaaagacaacaacttgagtctaaactgttacagcttgtcaatcctgcctatcaatctcttctaggtcacttacacactagaactttagaagcatttaaggagtactttggcaaggccctagaaaaggagggatttgctgttgcagcttgcaattgtactgaaactttcttggagaagtttgatagaggatctgaagatgctgctattcaacaagtgaattgggacacctcaaaagtgagggataagcttagacgtgacattgaggctcatgtagcttcagttcgggctgctaaattgtctgaactttgtgcgaaatatgaggcacaacttaccaaagctctggtggaaccagttgaatctcttctagattcagccagtgaagacacgtggccagctattagaaagcttcttcaacgcgagacaaaaactgctgttttaggtcttgaatctgctgtgtcagcttttgaactcgatgaagcaactgagaaagaactgcttgcgaagctggagaagcatggaaggagtgttgttgagtcaaaggcaaaagaagaagctggaagggttttgattcgcatgaaggacaggttctcaacattgttcagccgagatgctgactctatgcccagggtgtggacaggaaaggaggacataaaagctataactaaaaccgctcgctcagcttctgtgaagttgctttctacaatggctgcaattcggttggaggaggatggtgataacattgagaacactctttcccttgctcttgttgacacttcaagacatgggactacagataggagtatccaattgtccgatccactagcctccagctcatgggaaagggttgctgaggagaagactttaattacccctgtgcagtgcaaaaatttgtggaggcaattcaaagctgaaactgaatatacagtcactcaagccatagctgctcaggaagcaaataagaggaacaacaactggctcccacctccatgggcacttgctgcaatggctatccttggattcaacgagtttatgacattactgaggaatccgctttacctgtttgccatatttgtgatttatcttgttggaaaagccctttgggtgcaatcagaaattggcagggaattccaacatggatttcttcctgccatcctttcactgtcgacgaaatttgttcccactgtaatgaacatcctgaagagattagctgacgcgggtcaagaacctgcagcagcccccgagaggcaaagagagatggagctccaaccaaaatccaccaggaacggttccttatacagcaatgtgacatcggcagggtcatctagcgtaaccacttcggagattggacctgaatattcaagcccggttgtgcaatgattttgctgatctttagctttttggctggaaacatactctagcagttgagaaaaacagggtgcctcaagaacgtacgaagattttggtgccttgcagtttttgtaagcttgcccttcccagactgattcaaggtggcactgcccctcgttgttattcaaggaattttggggctggcggggttgtttgtaagagcattgtaaaataacttgtttcattttttggtttctgtaacatgaatacatgacatgtgatagttgtatataagatctgtggactgggggcgtatcagcgcattctacacagctaagggttgcatagttgcgagaactgaagcatgtaaatgtctttaaactgccatctgattgagatgcagtagtactgctgttctggaataagacatgtctgcttttggggaaaatgattcaaaaaatgtttcgtttgaactcagcgtctgctgaaaatgaatttggttcccgacccctgttctgg

SEQ ID NO: 77203 - DNA, 2710 bp, Zea Mays
aaagtacacttttgaatcatctttttggcaccaattttagggagatggatgccttcagaggaaggtcacagactaccaaaggtatatggctagcgaaggcccagaatattgaaccgtgcacccttgtaatggatttggaaggaactgatggaagagagaggggagaggatgatacagcatttgagaagcaaagtgcattgtttgctttggccgtttcggacattgtgttgattaatatgtggtgtcatgacattggcagagaacaggctgcaaacaagcctcttttgaagactgttttccaggtcatgatgaggttgttcagtcctcgcaaaacaacattgttgtttgttatacgtgacaaatcaaggacacccctagaaaatcttgagccaattctaagggaagacattcagaagatatgggatgctgttccgaaaccccatgcccataaagaaactccaattagtgaatttttcgatgttcaagttgtcgcactgtcgagttatgaagaaaaagaagagttattcaaacagcaggtttctgatttaagagataggtttcagcattcaattgcccctggtggacttgctggggatcgtcgtggtgttgtcccagcttcaggtttctcatttagttcccagcaattttggaaagtcatcaaggagaacaaagatcttgatttgcctgctcataaagttatggtggctactgtacgttgtgaggaaattggtaatgagaaagttaccagctttatagctgatgaggaatggcaacaatttgaggaggctgtccaacatgactttgttactgggtttgggaagaagctcagcagccttctggatagatgtttatcagagtatgacatggaggctatttattttgatgaaggtgtcagaagctcgaaaagacaacaacttgagtctaaactgttacagcttgtcaatcctgcctatcaatctcttctaggtcacttacacactagaactttagaagcatttaaggagtactttggcaaggccctagaaaaggagggatttgctgttgcagcttgcaattgtactgaaactttcttggagaagtttgatagaggatctgaagatgctgctattcaacaagtgaattgggacacctcaaaagtgagggataagcttagacgtgacattgaggctcatgtagcttcagttcgggctgctaaattgtctgaactttgtgcgaaatatgaggcacaacttaccaaagctctggtggaaccagttgaatctcttctagattcagccagtgaagacacgtggccagctattagaaagcttcttcaacgcgagacaaaaactgctgttttaggtcttgaatctgctgtgtcagcttttgaactcgatgaagcaactgagaaagaactgcttgcgaagctggagaagcatggaaggagtgttgttgagtcaaaggcaaaagaagaagctggaagggttttgattcgcatgaaggacaggttctcaacattgttcagccgagatgctgactctatgcccaggtctgtgaagttgctttctacaatggctgcaattcggttggaggaggatggtgataacattgagaacactctttcccttgctcttgttgacacttcaagacatgggactacagataggagtatccaattgtccgatccactagcctccagctcatgggaaagggttgctgaggagaagactttaattacccctgtgcagtgcaaaaatttgtggaggcaattcaaagctgaaactgaatatacagtcactcaagccatagctgctcagcaaataagaggaacaacaactggctcccacctccatgggcacttgctgcaatggctatccttggattcaacgagtttatgacattactgaggaatccgctttacctgtttgccatatttgtgatttatcttgttggaaaagccctttgggtgcaatcagaaattggcagggaattccaacatggatttcttcctgccatcctttcactgtcgacgaaatttgttcccactgtaatgaacatcctgaagagattagctgacgcgggtcaagaacctgcagcagcccccgagaggcaaagagagatggagctccaaccaaaatccaccaggaacggttccttatacagcaatgtgacatcggcagggtcatctagcgtaaccacttcggagattggacctgaatattcaagcccggttgtgcaatgattttgctgatctttagctttttggctggaaacatactctagcagttgagaaaaacagggtgcctcaagaacgtacgaagattttggtgccttgcagtttttgtaagcttgcccttcccagactgattcaaggtggcactgcccctcgttgttattcaaggaattttggggctggcggggttgtttgtaagagcattgtaaaataacttgtttcattttttggtttctgtaacatgaatacatgacatgtgatagttgtatataagatctgtggactgggggcgtatcagcgcattctacacagctaagggttgcatagttgcgagaactgaagcatgtaaatgtctttaaactgccatctgattgagatgcagtagtactgctgttctggaataagacatgtctgcttttggggaaaatgattcaaaaaatgtttcgtttgaactcagcgtctgctgaaaatgaatttggttcccgacccctgttctgg

SEQ ID NO: 77204 - DNA, 2706 bp, Zea Mays
atgggtgatgcgtgtttctcaacacagctaattgatggagatgggatcttcaacgtctccggattggagaacttcatgaaggatgtcagattgggtgaatgcgggctgtcctatgctgttgtatcaataatgggcccgcaaagtagtggtcacagactaccaaaggatgatacagcatttgagaagcaaagtgcattgtttgctttggccgtttcggacattgtgttgattaatatgtggtgtcatgacattggcagagaacaggctgcaaacaagcctcttttgaagactgttttccaggcaacatttgaggtcatgatgaggttgttcagtcctcgcaaaacaacattgttgtttgttatacgtgacaaatcaaggacacccctagaaaatcttgagccaattctaagggaagacattcagaagatatgggatgctgttccgaaaccccatgcccataaagaaactccaattagtgaatttttcgatgttcaagttgtcgcactgtcgagttatgaagaaaaagaagagttattcaaacagcaggtttctgatttaagagataggtttcagcattcaattgcccctggtggacttgctggggatcgtcgtggtgttgtcccagcttcaggtttctcatttagttcccagcaattttggaaagtcatcaaggagaacaaagatcttgatttgcctgctcataaagttatggtggctactgtacgttgtgaggaaattggtaatgagaaagttaccagctttatagctgatgaggaatggcaacaatttgaggaggctgtccaacatgactttgttactgggtttgggaagaagctcagcagccttctggatagatgtttatcagagtatgacatggaggctatttattttgatgaaggtgtcagaagctcgaaaagacaacaacttgagtctaaactgttacagcttgtcaatcctgcctatcaatctcttctaggtcacttacacactagaactttagaagcatttaaggagtactttggcaaggccctagaaaaggagggatttgctgttgcagcttgcaattgtactgaaactttcttggagaagtttgatagaggatctgaagatgctgctattcaacaagtgaattgggacacctcaaaagtgagggataagcttagacgtgacattgaggctcatgtagcttcagttcgggctgctaaattgtctgaactttgtgcgaaatatgaggcacaacttaccaaagctctggtggaaccagttgaatctcttctagattcagccagtgaagacacgtggccagctattagaaagcttcttcaacgcgagacaaaaactgctgttttaggtcttgaatctgctgtgtcagcttttgaactcgatgaagcaactgagaaagaactgcttgcgaagctggagaagcatggaaggagtgttgttgagtcaaaggcaaaagaagaagctggaagggttttgattcgcatgaaggacagccgagatgctgactctatgcccaggtctgtgaagttgctttctacaatggctgcaattcggttggaggaggatggtgataacattgagaacactctttcccttgctcttgttgacacttcaagacatgggactacagataggagtatccaattgtccgatccactagcctccagctcatgggaaagggttgctgaggagaagactttaattacccctgtgcagtgcaaaaatttgtggaggcaattcaaagctgaaactgaatatacagtcactcaagccatagctgctcaggaagcaaataagaggaacaacaactggctcccacctccatgggcacttgctgcaatggctatccttggattcaacgagtttatgacattactgaggaatccgctttacctgtttgccatatttgtgatttatcttgttggaaaagccctttgggtgcaatcagaaattggcagggaattccaacatggatttcttcctgccatcctttcactgtcgacgaaatttgttcccactgtaatgaacatcctgaagagattagctgacgcgggtcaagaacctgcagcagcccccgagaggcaaagagagatggagctccaaccaaaatccaccaggaacggttccttatacagcaatgtgacatcggcagggtcatctagcgtaaccacttcggagattggacctgaatattcaagcccggttgtgcaatgattttgctgatctttagctttttggctggaaacatactctagcagttgagaaaaacagggtgcctcaagaacgtacgaagattttggtgccttgcagtttttgtaagcttgcccttcccagactgattcaaggtggcactgcccctcgttgttattcaaggaattttggggctggcggggttgtttgtaagagcattgtaaaataacttgtttcattttttggtttctgtaacatgaatacatgacatgtgatagttgtatataagatctgtggactgggggcgtatcagcgcattctacacagctaagggttgcatagttgcgagaactgaagcatgtaaatgtctttaaactgccatctgattgagatgcagtagtactgctgttctggaataagacatgtctgcttttggggaaaatgattcaaaaaatgtttcgtttgaactcagcgtctgctgaaaatgaatttggttcccgacccctgttctgg

SEQ ID NO: 77205 - DNA, 3015 bp, Zea Mays
gccttcgtgcacctccccggtctctccccctttcctctcccttcccccttcccccgcctccgccatcgccgacgccgacccccacaccggccgacgcgcgagccccggcaccatcttcacacgctaattgatggagatgggatcttcaacgtctccggattggagaacttcatgaaggatgtcagattgggtgaatgcgggctgtcctatgctgttgtatcaataatgggcccgcaaagtagtgggaaaagtacacttttgaatcatctttttggcaccaattttagggagatggatgccttcagaggaaggtcacagactaccaaaggtatatggctagcgaaggcccagaatattgaaccgtgcacccttgtaatggatttggaaggaactgatggaagagagaggggagaggatgatacagcatttgagaagcaaagtgcattgtttgctttggccgtttcggacattgtgttgattaatatgtggtgtcatgacattggcagagaacaggctgcaaacaagcctcttttgaagactgttttccaggtcatgatgaggttgttcagtcctcgcaaaacaacattgttgtttgttatacgtgacaaatcaaggacacccctagaaaatcttgagccaattctaagggaagacattcagaagatatgggatgctgttccgaaaccccatgcccataaagaaactccaattagtgaatttttcgatgttcaagttgtcgcactgtcgagttatgaagaaaaagaagagttattcaaacagcaggtttctgatttaagagataggtttcagcattcaattgcccctggtggacttgctggggatcgtcgtggtgttgtcccagcttcaggtttctcatttagttcccagcaattttggaaagtcatcaaggagaacaaagatcttgatttgcctgctcataaagttatggtggctactgtacgttgtgaggaaattggtaatgagaaagttaccagctttatagctgatgaggaatggcaacaatttgaggaggctgtccaacatgactttgttactgggtttgggaagaagctcagcagccttctggatagatgtttatcagagtatgacatggaggctatttattttgatgaaggtgtcagaagctcgaaaagacaacaacttgagtctaaactgttacagcttgtcaatcctgcctatcaatctcttctaggtcacttacacactagaactttagaagcatttaaggagtactttggcaaggccctagaaaaggagggatttgctgttgcagcttgcaattgtactgaaactttcttggagaagtttgatagaggatctgaagatgctgctattcaacaagtgaattgggacacctcaaaagtgagggataagcttagacgtgacattgaggctcatgtagcttcagttcgggctgctaaattgtctgaactttgtgcgaaatatgaggcacaacttaccaaagctctggtggaaccagttgaatctcttctagattcagccagtgaagacacgtggccagctattagaaagcttcttcaacgcgagacaaaaactgctgttttaggtcttgaatctgctgtgtcagcttttgaactcgatgaagcaactgagaaagaactgcttgcgaagctggagaagcatggaaggagtgttgttgagtcaaaggcaaaagaagaagctggaagggttttgattcgcatgaaggacaggttctcaacattgttcagccgagatgctgactctatgcccagggtgtggacaggaaaggaggacataaaagctataactaaaaccgctcgctcagcttctgtgaagttgctttctacaatggctgcaattcggttggaggaggatggtgataacattgagaacactctttcccttgctcttgttgacacttcaagacatgggactacagataggagtatccaattgtccgatccactagcctccagctcatgggaaagggttgctgaggagaagactttaattacccctgtgcagtgcaaaaatttgtggaggcaattcaaagctgaaactgaatatacagtcactcaagccatagctgctcaggaagcaaataagaggaacaacaactggctcccacctccatgggcacttgctgcaatggctatccttggattcaacgagtttatgacattactgaggaatccgctttacctgtttgccatatttgtgatttatcttgttggaaaagccctttgggtgcaatcagaaattggcagggaattccaacatggatttcttcctgccatcctttcactgtcgacgaaatttgttcccactgtaatgaacatcctgaagagattagctgacgcgggtcaagaacctgcagcagcccccgagaggcaaagagagatggagctccaaccaaaatccaccaggaacggttccttatacagcaatgtgacatcggcagggtcatctagcgtaaccacttcggagattggacctgaatattcaagcccggttgtgcaatgattttgctgatctttagctttttggctggaaacatactctagcagttgagaaaaacagggtgcctcaagaacgtacgaagattttggtgccttgcagtttttgtaagcttgcccttcccagactgattcaaggtggcactgcccctcgttgttattcaaggaattttggggctggcggggttgtttgtaagagcattgtaaaataacttgtttcattttttggtttctgtaacatgaatacatgacatgtgatagttgtatataagatctgtggactgggggcgtatcagcgcattctacacagctaagggttgcatagttgcgagaactgaagcatgtaaatgtctttaaactgccatctgattgagatgcagtagtactgctgttctggaataagacatgtctgcttttggggaaaatgattcaaaaaatgtttcgtttgaactcagcgtctgctgaaaatgaatttggttcccgacccctgttctgg

SEQ ID NO: 77206 - DNA, 2820 bp, Zea Mays
gccttcgtgcacctccccggtctctccccctttcctctcccttcccccttcccccgcctccgccatcgccgacgccgacccccacaccggccgacgcgcgagccccggcaccatcttcacacgctaattgatggagatgggatcttcaacgtctccggattggagaacttcatgaaggatgtcagattgggtgaatgcgggctgtcctatgctgttgtatcaataatgggcccgcaaagtagtggtcacagactaccaaaggatgatacagcatttgagaagcaaagtgcattgtttgctttggccgtttcggacattgtgttgattaatatgtggtgtcatgacattggcagagaacaggctgcaaacaagcctcttttgaagactgttttccaggcaacatttgaggtcatgatgaggttgttcagtcctcgcaaaacaacattgttgtttgttatacgtgacaaatcaaggacacccctagaaaatcttgagccaattctaagggaagacattcagaagatatgggatgctgttccgaaaccccatgcccataaagaaactccaattagtgaatttttcgatgttcaagttgtcgcactgtcgagttatgaagaaaaagaagagttattcaaacagcaggtttctgatttaagagataggtttcagcattcaattgcccctggtggacttgctggggatcgtcgtggtgttgtcccagcttcaggtttctcatttagttcccagcaattttggaaagtcatcaaggagaacaaagatcttgatttgcctgctcataaagttatggtggctactgtacgttgtgaggaaattggtaatgagaaagttaccagctttatagctgatgaggaatggcaacaatttgaggaggctgtccaacatgactttgttactgggtttgggaagaagctcagcagccttctggatagatgtttatcagagtatgacatggaggctatttattttgatgaaggtgtcagaagctcgaaaagacaacaacttgagtctaaactgttacagcttgtcaatcctgcctatcaatctcttctaggtcacttacacactagaactttagaagcatttaaggagtactttggcaaggccctagaaaaggagggatttgctgttgcagcttgcaattgtactgaaactttcttggagaagtttgatagaggatctgaagatgctgctattcaacaagtgaattgggacacctcaaaagtgagggataagcttagacgtgacattgaggctcatgtagcttcagttcgggctgctaaattgtctgaactttgtgcgaaatatgaggcacaacttaccaaagctctggtggaaccagttgaatctcttctagattcagccagtgaagacacgtggccagctattagaaagcttcttcaacgcgagacaaaaactgctgttttaggtcttgaatctgctgtgtcagcttttgaactcgatgaagcaactgagaaagaactgcttgcgaagctggagaagcatggaaggagtgttgttgagtcaaaggcaaaagaagaagctggaagggttttgattcgcatgaaggacaggttctcaacattgttcagccgagatgctgactctatgcccaggtctgtgaagttgctttctacaatggctgcaattcggttggaggaggatggtgataacattgagaacactctttcccttgctcttgttgacacttcaagacatgggactacagataggagtatccaattgtccgatccactagcctccagctcatgggaaagggttgctgaggagaagactttaattacccctgtgcagtgcaaaaatttgtggaggcaattcaaagctgaaactgaatatacagtcactcaagccatagctgctcaggaagcaaataagaggaacaacaactggctcccacctccatgggcacttgctgcaatggctatccttggattcaacgagtttatgacattactgaggaatccgctttacctgtttgccatatttgtgatttatcttgttggaaaagccctttgggtgcaatcagaaattggcagggaattccaacatggatttcttcctgccatcctttcactgtcgacgaaatttgttcccactgtaatgaacatcctgaagagattagctgacgcgggtcaagaacctgcagcagcccccgagaggcaaagagagatggagctccaaccaaaatccaccaggaacggttccttatacagcaatgtgacatcggcagggtcatctagcgtaaccacttcggagattggacctgaatattcaagcccggttgtgcaatgattttgctgatctttagctttttggctggaaacatactctagcagttgagaaaaacagggtgcctcaagaacgtacgaagattttggtgccttgcagtttttgtaagcttgcccttcccagactgattcaaggtggcactgcccctcgttgttattcaaggaattttggggctggcggggttgtttgtaagagcattgtaaaataacttgtttcattttttggtttctgtaacatgaatacatgacatgtgatagttgtatataagatctgtggactgggggcgtatcagcgcattctacacagctaagggttgcatagttgcgagaactgaagcatgtaaatgtctttaaactgccatctgattgagatgcagtagtactgctgttctggaataagacatgtctgcttttggggaaaatgattcaaaaaatgtttcgtttgaactcagcgtctgctgaaaatgaatttggttcccgacccctgttctgg

SEQ ID NO: 77207 - DNA, 2995 bp, Zea Mays
gccttcgtgcacctccccggtctctccccctttcctctcccttcccccttcccccgcctccgccatcgccgacgccgacccccacaccggccgacgcgcgagccccggcaccatcttcacacgagcataaatgggtgatgcgtgtttctcaacacagctaattgatggagatgggatcttcaacgtctccggattggagaacttcatgaaggatgtcagattgggtgaatgcgggctgtcctatgctgttgtatcaataatgggcccgcaaagtagtgggaaaagtacacttttgaatcatctttttggcaccaattttagggagatggatgccttcagaggaaggtcacagactaccaaaggtatatggctagcgaaggcccagaatattgaaccgtgcacccttgtaatggatttggaaggaactgatggaagagagaggggagaggatgatacagcatttgagaagcaaagtgcattgtttgctttggccgtttcggacattgtgttgattaatatgtggtgtcatgacattggcagagaacaggctgcaaacaagcctcttttgaagactgttttccaggtcatgatgaggttgttcagtcctcgcaaaacaacattgttgtttgttatacgtgacaaatcaaggacacccctagaaaatcttgagccaattctaagggaagacattcagaagatatgggatgctgttccgaaaccccatgcccataaagaaactccaattagtgaatttttcgatgttcaagttgtcgcactgtcgagttatgaagaaaaagaagagttattcaaacagcaggtttctgatttaagagataggtttcagcattcaattgcccctggtggacttgctggggatcgtcgtggtgttgtcccagcttcaggtttctcatttagttcccagcaattttggaaagtcatcaaggagaacaaagatcttgatttgcctgctcataaagttatggtggctactgtacgttgtgaggaaattggtaatgagaaagttaccagctttatagctgatgaggaatggcaacaatttgaggaggctgtccaacatgactttgttactgggtttgggaagaagctcagcagccttctggatagatgtttatcagagtatgacatggaggctatttattttgatgaaggtgtcagaagctcgaaaagacaacaacttgagtctaaactgttacagcttgtcaatcctgcctatcaatctcttctaggtcacttacacactagaactttagaagcatttaaggagtactttggcaaggccctagaaaaggagggatttgctgttgcagcttgcaattgtactgaaactttcttggagaagtttgatagaggatctgaagatgctgctattcaacaagtgaattgggacacctcaaaagtgagggataagcttagacgtgacattgaggctcatgtagcttcagttcgggctgctaaattgtctgaactttgtgcgaaatatgaggcacaacttaccaaagctctggtggaaccagttgaatctcttctagattcagccagtgaagacacgtggccagctattagaaagcttcttcaacgcgagacaaaaactgctgttttaggtcttgaatctgctgtgtcagcttttgaactcgatgaagcaactgagaaagaactgcttgcgaagctggagaagcatggaaggagtgttgttgagtcaaaggcaaaagaagaagctggaagggttttgattcgcatgaaggacaggttctcaacattgttcagccgagatgctgactctatgcccaggtctgtgaagttgctttctacaatggctgcaattcggttggaggaggatggtgataacattgagaacactctttcccttgctcttgttgacacttcaagacatgggactacagataggagtatccaattgtccgatccactagcctccagctcatgggaaagggttgctgaggagaagactttaattacccctgtgcagtgcaaaaatttgtggaggcaattcaaagctgaaactgaatatacagtcactcaagccatagctgctcaggaagcaaataagaggaacaacaactggctcccacctccatgggcacttgctgcaatggctatccttggattcaacgagtttatgacattactgaggaatccgctttacctgtttgccatatttgtgatttatcttgttggaaaagccctttgggtgcaatcagaaattggcagggaattccaacatggatttcttcctgccatcctttcactgtcgacgaaatttgttcccactgtaatgaacatcctgaagagattagctgacgcgggtcaagaacctgcagcagcccccgagaggcaaagagagatggagctccaaccaaaatccaccaggaacggttccttatacagcaatgtgacatcggcagggtcatctagcgtaaccacttcggagattggacctgaatattcaagcccggttgtgcaatgattttgctgatctttagctttttggctggaaacatactctagcagttgagaaaaacagggtgcctcaagaacgtacgaagattttggtgccttgcagtttttgtaagcttgcccttcccagactgattcaaggtggcactgcccctcgttgttattcaaggaattttggggctggcggggttgtttgtaagagcattgtaaaataacttgtttcattttttggtttctgtaacatgaatacatgacatgtgatagttgtatataagatctgtggactgggggcgtatcagcgcattctacacagctaagggttgcatagttgcgagaactgaagcatgtaaatgtctttaaactgccatctgattgagatgcagtagtactgctgttctggaataagacatgtctgcttttggggaaaatgattcaaaaaatgtttcgtttgaactcagcgtctgctgaaaatgaatttggttcccgacccctgttctgg

SEQ ID NO: 77208 - DNA, 2842 bp, Zea Mays
gccttcgtgcacctccccggtctctccccctttcctctcccttcccccttcccccgcctccgccatcgccgacgccgacccccacaccggccgacgcgcgagccccggcaccatcttcacacgagcataaatgggtgatgcgtgtttctcaacacagctaattgatggagatgggatcttcaacgtctccggattggagaacttcatgaaggatgtcagattgggtgaatgcgggctgtcctatgctgttgtatcaataatgggcccgcaaagtagtggtcacagactaccaaaggatgatacagcatttgagaagcaaagtgcattgtttgctttggccgtttcggacattgtgttgattaatatgtggtgtcatgacattggcagagaacaggctgcaaacaagcctcttttgaagactgttttccaggtcatgatgaggttgttcagtcctcgcaaaacaacattgttgtttgttatacgtgacaaatcaaggacacccctagaaaatcttgagccaattctaagggaagacattcagaagatatgggatgctgttccgaaaccccatgcccataaagaaactccaattagtgaatttttcgatgttcaagttgtcgcactgtcgagttatgaagaaaaagaagagttattcaaacagcaggtttctgatttaagagataggtttcagcattcaattgcccctggtggacttgctggggatcgtcgtggtgttgtcccagcttcaggtttctcatttagttcccagcaattttggaaagtcatcaaggagaacaaagatcttgatttgcctgctcataaagttatggtggctactgtacgttgtgaggaaattggtaatgagaaagttaccagctttatagctgatgaggaatggcaacaatttgaggaggctgtccaacatgactttgttactgggtttgggaagaagctcagcagccttctggatagatgtttatcagagtatgacatggaggctatttattttgatgaaggtgtcagaagctcgaaaagacaacaacttgagtctaaactgttacagcttgtcaatcctgcctatcaatctcttctaggtcacttacacactagaactttagaagcatttaaggagtactttggcaaggccctagaaaaggagggatttgctgttgcagcttgcaattgtactgaaactttcttggagaagtttgatagaggatctgaagatgctgctattcaacaagtgaattgggacacctcaaaagtgagggataagcttagacgtgacattgaggctcatgtagcttcagttcgggctgctaaattgtctgaactttgtgcgaaatatgaggcacaacttaccaaagctctggtggaaccagttgaatctcttctagattcagccagtgaagacacgtggccagctattagaaagcttcttcaacgcgagacaaaaactgctgttttaggtcttgaatctgctgtgtcagcttttgaactcgatgaagcaactgagaaagaactgcttgcgaagctggagaagcatggaaggagtgttgttgagtcaaaggcaaaagaagaagctggaagggttttgattcgcatgaaggacaggttctcaacattgttcagccgagatgctgactctatgcccaggtctgtgaagttgctttctacaatggctgcaattcggttggaggaggatggtgataacattgagaacactctttcccttgctcttgttgacacttcaagacatgggactacagataggagtatccaattgtccgatccactagcctccagctcatgggaaagggttgctgaggagaagactttaattacccctgtgcagtgcaaaaatttgtggaggcaattcaaagctgaaactgaatatacagtcactcaagccatagctgctcaggaagcaaataagaggaacaacaactggctcccacctccatgggcacttgctgcaatggctatccttggattcaacgagtttatgacattactgaggaatccgctttacctgtttgccatatttgtgatttatcttgttggaaaagccctttgggtgcaatcagaaattggcagggaattccaacatggatttcttcctgccatcctttcactgtcgacgaaatttgttcccactgtaatgaacatcctgaagagattagctgacgcgggtcaagaacctgcagcagcccccgagaggcaaagagagatggagctccaaccaaaatccaccaggaacggttccttatacagcaatgtgacatcggcagggtcatctagcgtaaccacttcggagattggacctgaatattcaagcccggttgtgcaatgattttgctgatctttagctttttggctggaaacatactctagcagttgagaaaaacagggtgcctcaagaacgtacgaagattttggtgccttgcagtttttgtaagcttgcccttcccagactgattcaaggtggcactgcccctcgttgttattcaaggaattttggggctggcggggttgtttgtaagagcattgtaaaataacttgtttcattttttggtttctgtaacatgaatacatgacatgtgatagttgtatataagatctgtggactgggggcgtatcagcgcattctacacagctaagggttgcatagttgcgagaactgaagcatgtaaatgtctttaaactgccatctgattgagatgcagtagtactgctgttctggaataagacatgtctgcttttggggaaaatgattcaaaaaatgtttcgtttgaactcagcgtctgctgaaaatgaatttggttcccgacccctgttctgg

SEQ ID NO: 77209 - DNA, 2886 bp, Zea Mays
aaaagcgcacacgccttcgtgcacctccccggtctctccccctttcctctcccttcccccttcccccgcctccgccatcgccgacgccgacccccacaccggccgacgcgcgagccccggcaccatcttcacacgctaattgatggagatgggatcttcaacgtctccggattggagaacttcatgaaggatgtcagattgggtgaatgcgggctgtcctatgctgttgtatcaataatgggcccgcaaagtagtggtcacagactaccaaaggatgatacagcatttgagaagcaaagtgcattgtttgctttggccgtttcggacattgtgttgattaatatgtggtgtcatgacattggcagagaacaggctgcaaacaagcctcttttgaagactgttttccaggcaacatttgaggtcatgatgaggttgttcagtcctcgcaaaacaacattgttgtttgttatacgtgacaaatcaaggacacccctagaaaatcttgagccaattctaagggaagacattcagaagatatgggatgctgttccgaaaccccatgcccataaagaaactccaattagtgaatttttcgatgttcaagttgtcgcactgtcgagttatgaagaaaaagaagagttattcaaacagcaggtttctgatttaagagataggtttcagcattcaattgcccctggtggacttgctggggatcgtcgtggtgttgtcccagcttcaggtttctcatttagttcccagcaattttggaaagtcatcaaggagaacaaagatcttgatttgcctgctcataaagttatggtggctactgtacgttgtgaggaaattggtaatgagaaagttaccagctttatagctgatgaggaatggcaacaatttgaggaggctgtccaacatgactttgttactgggtttgggaagaagctcagcagccttctggatagatgtttatcagagtatgacatggaggctatttattttgatgaaggtgtcagaagctcgaaaagacaacaacttgagtctaaactgttacagcttgtcaatcctgcctatcaatctcttctaggtcacttacacactagaactttagaagcatttaaggagtactttggcaaggccctagaaaaggagggatttgctgttgcagcttgcaattgtactgaaactttcttggagaagtttgatagaggatctgaagatgctgctattcaacaagtgaattgggacacctcaaaagtgagggataagcttagacgtgacattgaggctcatgtagcttcagttcgggctgctaaattgtctgaactttgtgcgaaatatgaggcacaacttaccaaagctctggtggaaccagttgaatctcttctagattcagccagtgaagacacgtggccagctattagaaagcttcttcaacgcgagacaaaaactgctgttttaggtcttgaatctgctgtgtcagcttttgaactcgatgaagcaactgagaaagaactgcttgcgaagctggagaagcatggaaggagtgttgttgagtcaaaggcaaaagaagaagctggaagggttttgattcgcatgaaggacaggttctcaacattgttcagccgagatgctgactctatgcccagggtgtggacaggaaaggaggacataaaagctataactaaaaccgctcgctcagcttctgtgaagttgctttctacaatggctgcaattcggttggaggaggatggtgataacattgagaacactctttcccttgctcttgttgacacttcaagacatgggactacagataggagtatccaattgtccgatccactagcctccagctcatgggaaagggttgctgaggagaagactttaattacccctgtgcagtgcaaaaatttgtggaggcaattcaaagctgaaactgaatatacagtcactcaagccatagctgctcaggaagcaaataagaggaacaacaactggctcccacctccatgggcacttgctgcaatggctatccttggattcaacgagtttatgacattactgaggaatccgctttacctgtttgccatatttgtgatttatcttgttggaaaagccctttgggtgcaatcagaaattggcagggaattccaacatggatttcttcctgccatcctttcactgtcgacgaaatttgttcccactgtaatgaacatcctgaagagattagctgacgcgggtcaagaacctgcagcagcccccgagaggcaaagagagatggagctccaaccaaaatccaccaggaacggttccttatacagcaatgtgacatcggcagggtcatctagcgtaaccacttcggagattggacctgaatattcaagcccggttgtgcaatgattttgctgatctttagctttttggctggaaacatactctagcagttgagaaaaacagggtgcctcaagaacgtacgaagattttggtgccttgcagtttttgtaagcttgcccttcccagactgattcaaggtggcactgcccctcgttgttattcaaggaattttggggctggcggggttgtttgtaagagcattgtaaaataacttgtttcattttttggtttctgtaacatgaatacatgacatgtgatagttgtatataagatctgtggactgggggcgtatcagcgcattctacacagctaagggttgcatagttgcgagaactgaagcatgtaaatgtctttaaactgccatctgattgagatgcagtagtactgctgttctggaataagacatgtctgcttttggggaaaatgattcaaaaaatgtttcgtttgaactcagcgtctgctgaaaatgaatttggttcccgacccctgttctgg

SEQ ID NO: 77210 - DNA, 3013 bp, Zea Mays
caatcacccaccttccaataaaagcgcacacgccttcgtgcacctccccggtctctccccctttcctctcccttcccccttcccccgcctccgccatcgccgacgccgacccccacaccggccgacgcgcgagccccggcaccatcttcacacgagcataaatgggtgatgcgtgtttctcaacacagctaattgatggagatgggatcttcaacgtctccggattggagaacttcatgaaggatgtcagattgggtgaatgcgggctgtcctatgctgttgtatcaataatgggcccgcaaagtagtggtcacagactaccaaaggtatatggctagcgaaggcccagaatattgaaccgtgcacccttgtaatggatttggaaggaactgatggaagagagaggggagaggatgatacagcatttgagaagcaaagtgcattgtttgctttggccgtttcggacattgtgttgattaatatgtggtgtcatgacattggcagagaacaggctgcaaacaagcctcttttgaagactgttttccaggtcatgatgaggttgttcagtcctcgcaaaacaacattgttgtttgttatacgtgacaaatcaaggacacccctagaaaatcttgagccaattctaagggaagacattcagaagatatgggatgctgttccgaaaccccatgcccataaagaaactccaattagtgaatttttcgatgttcaagttgtcgcactgtcgagttatgaagaaaaagaagagttattcaaacagcaggtttctgatttaagagataggtttcagcattcaattgcccctggtggacttgctggggatcgtcgtggtgttgtcccagcttcaggtttctcatttagttcccagcaattttggaaagtcatcaaggagaacaaagatcttgatttgcctgctcataaagttatggtggctactgtacgttgtgaggaaattggtaatgagaaagttaccagctttatagctgatgaggaatggcaacaatttgaggaggctgtccaacatgactttgttactgggtttgggaagaagctcagcagccttctggatagatgtttatcagagtatgacatggaggctatttattttgatgaaggtgtcagaagctcgaaaagacaacaacttgagtctaaactgttacagcttgtcaatcctgcctatcaatctcttctaggtcacttacacactagaactttagaagcatttaaggagtactttggcaaggccctagaaaaggagggatttgctgttgcagcttgcaattgtactgaaactttcttggagaagtttgatagaggatctgaagatgctgctattcaacaagtgaattgggacacctcaaaagtgagggataagcttagacgtgacattgaggctcatgtagcttcagttcgggctgctaaattgtctgaactttgtgcgaaatatgaggcacaacttaccaaagctctggtggaaccagttgaatctcttctagattcagccagtgaagacacgtggccagctattagaaagcttcttcaacgcgagacaaaaactgctgttttaggtcttgaatctgctgtgtcagcttttgaactcgatgaagcaactgagaaagaactgcttgcgaagctggagaagcatggaaggagtgttgttgagtcaaaggcaaaagaagaagctggaagggttttgattcgcatgaaggacaggttctcaacattgttcagccgagatgctgactctatgcccagggtgtggacaggaaaggaggacataaaagctataactaaaaccgctcgctcagcttctgtgaagttgctttctacaatggctgcaattcggttggaggaggatggtgataacattgagaacactctttcccttgctcttgttgacacttcaagacatgggactacagataggagtatccaattgtccgatccactagcctccagctcatgggaaagggttgctgaggagaagactttaattacccctgtgcagtgcaaaaatttgtggaggcaattcaaagctgaaactgaatatacagtcactcaagccatagctgctcaggaagcaaataagaggaacaacaactggctcccacctccatgggcacttgctgcaatggctatccttggattcaacgagtttatgacattactgaggaatccgctttacctgtttgccatatttgtgatttatcttgttggaaaagccctttgggtgcaatcagaaattggcagggaattccaacatggatttcttcctgccatcctttcactgtcgacgaaatttgttcccactgtaatgaacatcctgaagagattagctgacgcgggtcaagaacctgcagcagcccccgagaggcaaagagagatggagctccaaccaaaatccaccaggaacggttccttatacagcaatgtgacatcggcagggtcatctagcgtaaccacttcggagattggacctgaatattcaagcccggttgtgcaatgattttgctgatctttagctttttggctggaaacatactctagcagttgagaaaaacagggtgcctcaagaacgtacgaagattttggtgccttgcagtttttgtaagcttgcccttcccagactgattcaaggtggcactgcccctcgttgttattcaaggaattttggggctggcggggttgtttgtaagagcattgtaaaataacttgtttcattttttggtttctgtaacatgaatacatgacatgtgatagttgtatataagatctgtggactgggggcgtatcagcgcattctacacagctaagggttgcatagttgcgagaactgaagcatgtaaatgtctttaaactgccatctgattgagatgcagtagtactgctgttctggaataagacatgtctgcttttggggaaaatgattcaaaaaatgtttcgtttgaactcagcgtctgctgaaaatgaatttggttcccgacccctgttctgg

SEQ ID NO: 77211 - DNA, 2948 bp, Zea Mays
cgaaaattacaatcacccaccttccaataaaagcgcacacgccttcgtgcacctccccggtctctccccctttcctctcccttcccccttcccccgcctccgccatcgccgacgccgacccccacaccggccgacgcgcgagccccggcaccatcttcacacgagcataaatgggtgatgcgtgtttctcaacacagctaattgatggagatgggatcttcaacgtctccggattggagaacttcatgaaggatgtcagattgggtgaatgcgggctgtcctatgctgttgtatcaataatgggcccgcaaagtagtggtcacagactaccaaaggatgatacagcatttgagaagcaaagtgcattgtttgctttggccgtttcggacattgtgttgattaatatgtggtgtcatgacattggcagagaacaggctgcaaacaagcctcttttgaagactgttttccaggcaacatttgaggtcatgatgaggttgttcagtcctcgcaaaacaacattgttgtttgttatacgtgacaaatcaaggacacccctagaaaatcttgagccaattctaagggaagacattcagaagatatgggatgctgttccgaaaccccatgcccataaagaaactccaattagtgaatttttcgatgttcaagttgtcgcactgtcgagttatgaagaaaaagaagagttattcaaacagcaggtttctgatttaagagataggtttcagcattcaattgcccctggtggacttgctggggatcgtcgtggtgttgtcccagcttcaggtttctcatttagttcccagcaattttggaaagtcatcaaggagaacaaagatcttgatttgcctgctcataaagttatggtggctactgtacgttgtgaggaaattggtaatgagaaagttaccagctttatagctgatgaggaatggcaacaatttgaggaggctgtccaacatgactttgttactgggtttgggaagaagctcagcagccttctggatagatgtttatcagagtatgacatggaggctatttattttgatgaaggtgtcagaagctcgaaaagacaacaacttgagtctaaactgttacagcttgtcaatcctgcctatcaatctcttctaggtcacttacacactagaactttagaagcatttaaggagtactttggcaaggccctagaaaaggagggatttgctgttgcagcttgcaattgtactgaaactttcttggagaagtttgatagaggatctgaagatgctgctattcaacaagtgaattgggacacctcaaaagtgagggataagcttagacgtgacattgaggctcatgtagcttcagttcgggctgctaaattgtctgaactttgtgcgaaatatgaggcacaacttaccaaagctctggtggaaccagttgaatctcttctagattcagccagtgaagacacgtggccagctattagaaagcttcttcaacgcgagacaaaaactgctgttttaggtcttgaatctgctgtgtcagcttttgaactcgatgaagcaactgagaaagaactgcttgcgaagctggagaagcatggaaggagtgttgttgagtcaaaggcaaaagaagaagctggaagggttttgattcgcatgaaggacaggttctcaacattgttcagccgagatgctgactctatgcccagggtgtggacaggaaaggaggacataaaagctataactaaaaccgctcgctcagcttctgtgaagttgctttctacaatggctgcaattcggttggaggaggatggtgataacattgagaacactctttcccttgctcttgttgacacttcaagacatgggactacagataggagtatccaattgtccgatccactagcctccagctcatgggaaagggttgctgaggagaagactttaattacccctgtgcagtgcaaaaatttgtggaggcaattcaaagctgaaactgaatatacagtcactcaagccatagctgctcaggaagcaaataagaggaacaacaactggctcccacctccatgggcacttgctgcaatggctatccttggattcaacgagtttatgacattactgaggaatccgctttacctgtttgccatatttgtgatttatcttgttggaaaagccctttgggtgcaatcagaaattggcagggaattccaacatggatttcttcctgccatcctttcactgtcgacgaaatttgttcccactgtaatgaacatcctgaagagattagctgacgcgggtcaagaacctgcagcagcccccgagaggcaaagagagatggagctccaaccaaaatccaccaggaacggttccttatacagcaatgtgacatcggcagggtcatctagcgtaaccacttcggagattggacctgaatattcaagcccggttgtgcaatgattttgctgatctttagctttttggctggaaacatactctagcagttgagaaaaacagggtgcctcaagaacgtacgaagattttggtgccttgcagtttttgtaagcttgcccttcccagactgattcaaggtggcactgcccctcgttgttattcaaggaattttggggctggcggggttgtttgtaagagcattgtaaaataacttgtttcattttttggtttctgtaacatgaatacatgacatgtgatagttgtatataagatctgtggactgggggcgtatcagcgcattctacacagctaagggttgcatagttgcgagaactgaagcatgtaaatgtctttaaactgccatctgattgagatgcagtagtactgctgttctggaataagacatgtctgcttttggggaaaatgattcaaaaaatgtttcgtttgaactcagcgtctgctgaaaatgaatttggttcccgacccctgttctgg

SEQ ID NO: 77212 - DNA, 2994 bp, Zea Mays
gcacactcaagcccttacggccttacttgttacccataccccatgctcttctgcttttcgaaaattacaatcacccaccttccaataaaagcgcacacgccttcgtgcacctccccggtctctccccctttcctctcccttcccccttcccccgcctccgccatcgccgacgccgacccccacaccggccgacgcgcgagccccggcaccatcttcacacgagcataaatgggtgatgcgtgtttctcaacacagctaattgatggagatgggatcttcaacgtctccggattggagaacttcatgaaggatgtcagattgggtgaatgcgggctgtcctatgctgttgtatcaataatgggcccgcaaagtagtggtcacagactaccaaaggatgatacagcatttgagaagcaaagtgcattgtttgctttggccgtttcggacattgtgttgattaatatgtggtgtcatgacattggcagagaacaggctgcaaacaagcctcttttgaagactgttttccaggtcatgatgaggttgttcagtcctcgcaaaacaacattgttgtttgttatacgtgacaaatcaaggacacccctagaaaatcttgagccaattctaagggaagacattcagaagatatgggatgctgttccgaaaccccatgcccataaagaaactccaattagtgaatttttcgatgttcaagttgtcgcactgtcgagttatgaagaaaaagaagagttattcaaacagcaggtttctgatttaagagataggtttcagcattcaattgcccctggtggacttgctggggatcgtcgtggtgttgtcccagcttcaggtttctcatttagttcccagcaattttggaaagtcatcaaggagaacaaagatcttgatttgcctgctcataaagttatggtggctactgtacgttgtgaggaaattggtaatgagaaagttaccagctttatagctgatgaggaatggcaacaatttgaggaggctgtccaacatgactttgttactgggtttgggaagaagctcagcagccttctggatagatgtttatcagagtatgacatggaggctatttattttgatgaaggtgtcagaagctcgaaaagacaacaacttgagtctaaactgttacagcttgtcaatcctgcctatcaatctcttctaggtcacttacacactagaactttagaagcatttaaggagtactttggcaaggccctagaaaaggagggatttgctgttgcagcttgcaattgtactgaaactttcttggagaagtttgatagaggatctgaagatgctgctattcaacaagtgaattgggacacctcaaaagtgagggataagcttagacgtgacattgaggctcatgtagcttcagttcgggctgctaaattgtctgaactttgtgcgaaatatgaggcacaacttaccaaagctctggtggaaccagttgaatctcttctagattcagccagtgaagacacgtggccagctattagaaagcttcttcaacgcgagacaaaaactgctgttttaggtcttgaatctgctgtgtcagcttttgaactcgatgaagcaactgagaaagaactgcttgcgaagctggagaagcatggaaggagtgttgttgagtcaaaggcaaaagaagaagctggaagggttttgattcgcatgaaggacaggttctcaacattgttcagccgagatgctgactctatgcccagggtgtggacaggaaaggaggacataaaagctataactaaaaccgctcgctcagcttctgtgaagttgctttctacaatggctgcaattcggttggaggaggatggtgataacattgagaacactctttcccttgctcttgttgacacttcaagacatgggactacagataggagtatccaattgtccgatccactagcctccagctcatgggaaagggttgctgaggagaagactttaattacccctgtgcagtgcaaaaatttgtggaggcaattcaaagctgaaactgaatatacagtcactcaagccatagctgctcaggaagcaaataagaggaacaacaactggctcccacctccatgggcacttgctgcaatggctatccttggattcaacgagtttatgacattactgaggaatccgctttacctgtttgccatatttgtgatttatcttgttggaaaagccctttgggtgcaatcagaaattggcagggaattccaacatggatttcttcctgccatcctttcactgtcgacgaaatttgttcccactgtaatgaacatcctgaagagattagctgacgcgggtcaagaacctgcagcagcccccgagaggcaaagagagatggagctccaaccaaaatccaccaggaacggttccttatacagcaatgtgacatcggcagggtcatctagcgtaaccacttcggagattggacctgaatattcaagcccggttgtgcaatgattttgctgatctttagctttttggctggaaacatactctagcagttgagaaaaacagggtgcctcaagaacgtacgaagattttggtgccttgcagtttttgtaagcttgcccttcccagactgattcaaggtggcactgcccctcgttgttattcaaggaattttggggctggcggggttgtttgtaagagcattgtaaaataacttgtttcattttttggtttctgtaacatgaatacatgacatgtgatagttgtatataagatctgtggactgggggcgtatcagcgcattctacacagctaagggttgcatagttgcgagaactgaagcatgtaaatgtctttaaactgccatctgattgagatgcagtagtactgctgttctggaataagacatgtctgcttttggggaaaatgattcaaaaaatgtttcgtttgaactcagcgtctgctgaaaatgaatttggttcccgacccctgttctgg

SEQ ID NO: 77213 - DNA, 3147 bp, Zea Mays
gcacactcaagcccttacggccttacttgttacccataccccatgctcttctgcttttcgaaaattacaatcacccaccttccaataaaagcgcacacgccttcgtgcacctccccggtctctccccctttcctctcccttcccccttcccccgcctccgccatcgccgacgccgacccccacaccggccgacgcgcgagccccggcaccatcttcacacgagcataaatgggtgatgcgtgtttctcaacacagctaattgatggagatgggatcttcaacgtctccggattggagaacttcatgaaggatgtcagattgggtgaatgcgggctgtcctatgctgttgtatcaataatgggcccgcaaagtagtgggaaaagtacacttttgaatcatctttttggcaccaattttagggagatggatgccttcagaggaaggtcacagactaccaaaggtatatggctagcgaaggcccagaatattgaaccgtgcacccttgtaatggatttggaaggaactgatggaagagagaggggagaggatgatacagcatttgagaagcaaagtgcattgtttgctttggccgtttcggacattgtgttgattaatatgtggtgtcatgacattggcagagaacaggctgcaaacaagcctcttttgaagactgttttccaggtcatgatgaggttgttcagtcctcgcaaaacaacattgttgtttgttatacgtgacaaatcaaggacacccctagaaaatcttgagccaattctaagggaagacattcagaagatatgggatgctgttccgaaaccccatgcccataaagaaactccaattagtgaatttttcgatgttcaagttgtcgcactgtcgagttatgaagaaaaagaagagttattcaaacagcaggtttctgatttaagagataggtttcagcattcaattgcccctggtggacttgctggggatcgtcgtggtgttgtcccagcttcaggtttctcatttagttcccagcaattttggaaagtcatcaaggagaacaaagatcttgatttgcctgctcataaagttatggtggctactgtacgttgtgaggaaattggtaatgagaaagttaccagctttatagctgatgaggaatggcaacaatttgaggaggctgtccaacatgactttgttactgggtttgggaagaagctcagcagccttctggatagatgtttatcagagtatgacatggaggctatttattttgatgaaggtgtcagaagctcgaaaagacaacaacttgagtctaaactgttacagcttgtcaatcctgcctatcaatctcttctaggtcacttacacactagaactttagaagcatttaaggagtactttggcaaggccctagaaaaggagggatttgctgttgcagcttgcaattgtactgaaactttcttggagaagtttgatagaggatctgaagatgctgctattcaacaagtgaattgggacacctcaaaagtgagggataagcttagacgtgacattgaggctcatgtagcttcagttcgggctgctaaattgtctgaactttgtgcgaaatatgaggcacaacttaccaaagctctggtggaaccagttgaatctcttctagattcagccagtgaagacacgtggccagctattagaaagcttcttcaacgcgagacaaaaactgctgttttaggtcttgaatctgctgtgtcagcttttgaactcgatgaagcaactgagaaagaactgcttgcgaagctggagaagcatggaaggagtgttgttgagtcaaaggcaaaagaagaagctggaagggttttgattcgcatgaaggacaggttctcaacattgttcagccgagatgctgactctatgcccagggtgtggacaggaaaggaggacataaaagctataactaaaaccgctcgctcagcttctgtgaagttgctttctacaatggctgcaattcggttggaggaggatggtgataacattgagaacactctttcccttgctcttgttgacacttcaagacatgggactacagataggagtatccaattgtccgatccactagcctccagctcatgggaaagggttgctgaggagaagactttaattacccctgtgcagtgcaaaaatttgtggaggcaattcaaagctgaaactgaatatacagtcactcaagccatagctgctcaggaagcaaataagaggaacaacaactggctcccacctccatgggcacttgctgcaatggctatccttggattcaacgagtttatgacattactgaggaatccgctttacctgtttgccatatttgtgatttatcttgttggaaaagccctttgggtgcaatcagaaattggcagggaattccaacatggatttcttcctgccatcctttcactgtcgacgaaatttgttcccactgtaatgaacatcctgaagagattagctgacgcgggtcaagaacctgcagcagcccccgagaggcaaagagagatggagctccaaccaaaatccaccaggaacggttccttatacagcaatgtgacatcggcagggtcatctagcgtaaccacttcggagattggacctgaatattcaagcccggttgtgcaatgattttgctgatctttagctttttggctggaaacatactctagcagttgagaaaaacagggtgcctcaagaacgtacgaagattttggtgccttgcagtttttgtaagcttgcccttcccagactgattcaaggtggcactgcccctcgttgttattcaaggaattttggggctggcggggttgtttgtaagagcattgtaaaataacttgtttcattttttggtttctgtaacatgaatacatgacatgtgatagttgtatataagatctgtggactgggggcgtatcagcgcattctacacagctaagggttgcatagttgcgagaactgaagcatgtaaatgtctttaaactgccatctgattgagatgcagtagtactgctgttctggaataagacatgtctgcttttggggaaaatgattcaaaaaatgtttcgtttgaactcagcgtctgctgaaaatgaatttggttcccgacccctgttctgg

SEQ ID NO: 77214 - DNA, 1075 bp, Zea Mays
catttgcatcttcctaaaggtgccagaattaaaaatttgcaagagaggaaccagtcaagttacatcggtagccttgcacgccgggtgcgagacctagaatcaccaagccaaacctctcttcttaaagagatttacagaagtgacccggagcgtgtcatacaaatatttgaaagccatccttcattacattctaatcccgcatgggaggccgcgtggcagaagagcttatatttggggatactgaggtgacctccggtgcgtcgtcagacttccagcaagcaactgcaatggcaagagcgatggttaccaagtatggcatgagcaagcatgttggccttgtctcttataactacgaggacgatggaaagagcgtgagctcagaaaccaggcttgtgattgagcaggaggtgaagaatttcctagagaacgcgtataataatgcgaagaccatccttacgaaacacaataaagagctacatgctctggccaacgcacttcttgagcacgagaccctcacaggagcccagataacgaacatattggcccaggtacgtaacaaacagcaacaagaacatactgtcgaagcaccacagagggccccagcttccccggcatcaccagctgcggcggcagcagctgcagccgccgcggcagcacagcaggcggcagccaaagctaagggagtggctggtatgggatcttagcacatggagcgccccaccggatgtatatttaaccaaacaagcaaagctgttccagcgattgacagttgatgaaggtcatcggatgtattgtatgctaaactgctgcagcaatagaacacactgattgcgtggaagttactcttccatgtgcctcgagtgcaaagcagagacaaaaaaactgtacgtgttgtagacttgtagctggtgcttgaatcagttttgtacccacatcgaaaacaattcctgttgtttacaccccgaaaaattgttagatttcgatctggctgccttgtgtaccctaacagagcgtaaattgtaacacatcctgaataaggccctgttccaatctcgtgagataaactttagcagct

SEQ ID NO: 77215 - DNA, 1037 bp, Zea Mays
ctccagtttgtcattagtccatgacaaggggctcggttagtccacagccctagaggctgcagctgcacacttctcttctctgttttcgccggttaaactttccccacttgttgctggccttcgaatctgtggtttgtttgagcttgtaaggatctcttcttcttcactctagcagggaagcgaagaacagggaagcaaggacatggatgctttcagtgcagtgatggacaaggtaaagagccacccagaaatgatggagaaggtaagtgcagtgatggacaaggtgaagaagagccacccagaagcggtggaaaaggtcaaggacgaggtgaagagccttgctgacgctctccacctgcggagacatggatccaaagataaagaacctgagtctgaagagaaggccgtagaaggcgaggcagcgcagagcgtcgaggaggaggagggtacctctgctgacaagactgcagaacctaatgtgttggagcaggccgtacaggagattcaggctgtcgccgcagctttgcagcagacagcacctgaaactgaaactgaaattccagttgagactgctgctgctgctgctcctgaaactttggctgaaggagacaagcctgaagaaacaaacagggatgtggagaaagacgacccaaagaagcggctcgatttcgccgggttcttcgccatgctgtttgagaggttctgctccccggccaacaagaagaaagactgagtgattgcaggtcagctgtggatttctcgttttgtgatcttggacgtggaaattacattttactgggtggtgtacagtctgcacttgtgttctattaagataaatctgctcttgcttttttactttcttctggtgcaatgactacagtttacttgatgtatttattgtcgcccttgtggaattgatttagtttatgtgaacgattgatttattttgggttaagataatgcagtgagtgtgtgatgccttgtatggacatgtgagaaccgattttgctcattgtgaacaaaattttagccctact

SEQ ID NO: 77216 - DNA, 1032 bp, Zea Mays
ctccagtttgtcattagtccatgacaaggggctcggttagtccacagccctagaggctgcagctgcacacttctcttctctgttttcgccggttaaactttccccacttgttgctggccttcgaatctgtggtttgtttgagcttgtaaggatctcttcttcttcactctggaagcgaagaacagggaagcaaggacatggatgctttcagtgcagtgatggacaaggtaaagagccacccagaaatgatggagaaggtaagtgcagtgatggacaaggtgaagaagagccacccagaagcggtggaaaaggtcaaggacgaggtgaagagccttgctgacgctctccacctgcggagacatggatccaaagataaagaacctgagtctgaagagaaggccgtagaaggcgaggcagcgcagagcgtcgaggaggaggagggtacctctgctgacaagactgcagaacctaatgtgttggagcaggccgtacaggagattcaggctgtcgccgcagctttgcagcagacagcacctgaaactgaaactgaaattccagttgagactgctgctgctgctgctcctgaaactttggctgaaggagacaagcctgaagaaacaaacagggatgtggagaaagacgacccaaagaagcggctcgatttcgccgggttcttcgccatgctgtttgagaggttctgctccccggccaacaagaagaaagactgagtgattgcaggtcagctgtggatttctcgttttgtgatcttggacgtggaaattacattttactgggtggtgtacagtctgcacttgtgttctattaagataaatctgctcttgcttttttactttcttctggtgcaatgactacagtttacttgatgtatttattgtcgcccttgtggaattgatttagtttatgtgaacgattgatttattttgggttaagataatgcagtgagtgtgtgatgccttgtatggacatgtgagaaccgattttgctcattgtgaacaaaattttagccctact

SEQ ID NO: 77217 - DNA, 1590 bp, Zea Mays
tgctgcactgtcgccctaccatgtagtattattatgcatggtgctccagtttgtcattagtccatgacaaggggctcggttagtccacagccctagaggctgcagctgcacacttctcttctctgttttcgccggttaaactttccccacttgttgctggccttcgaatctgtggtttgtttgagcttgtaaggatctcttcttcttcactctgtaagtcttgattcagccaatacctaggaataggatcgcaggctttgctcttgcgagcttttcggtgcttctttcatcgttttctctacatgtttctgtatatatatatatatggggatttggcgtcttctctgtagtcgacaataatcctttcccgtctaatcggtcagtcagcggataatccccgcccgtaattctgcactaatcggggcgtgttgaaagcatacagtaataaagggaaggtggagaaagtgtgattagctaatggatctaggtcaccgtaatttataatccttattagcacaatcctaccagtatttcttgtgatgatgctattggattcaactgcacccatcccccacttgcttctgttcttgtccgttcctgtcttcttgacttgtaagatgctattggaccgaaccttatgtatgcctatctaaattagccctcccctgttttccttctctctctctcttgaaaccaaattaagcatccatgtcgatattgtagagcagggaagcgaagaacagggaagcaaggacatggatgctttcagtgcagtgatggacaaggtaaagagccacccagaaatgatggagaaggtaagtgcagtgatggacaaggtgaagaagagccacccagaagcggtggaaaaggtcaaggacgaggtgaagagccttgctgacgctctccacctgcggagacatggatccaaagataaagaacctgagtctgaagagaaggccgtagaaggcgaggcagcgcagagcgtcgaggaggaggagggtacctctgctgacaagactgcagaacctaatgtgttggagcaggccgtacaggagattcaggctgtcgccgcagctttgcagcagacagcacctgaaactgaaactgaaattccagttgagactgctgctgctgctgctcctgaaactttggctgaaggagacaagcctgaagaaacaaacagggatgtggagaaagacgacccaaagaagcggctcgatttcgccgggttcttcgccatgctgtttgagaggttctgctccccggccaacaagaagaaagactgagtgattgcaggtcagctgtggatttctcgttttgtgatcttggacgtggaaattacattttactgggtggtgtacagtctgcacttgtgttctattaagataaatctgctcttgcttttttactttcttctggtgcaatgactacagtttacttgatgtatttattgtcgcccttgtggaattgatttagtttatgtgaacgattgatttattttgggttaagataatgcagtgagtgtgtgatgccttgtatggacatgtgagaaccgattttgctcattgtgaacaaaattttagccctact

SEQ ID NO: 77218 - DNA, 1079 bp, Zea Mays
gtttgcttgcgtccatttcgctgtcactctgctgcactgtcgccctaccatgtagtattattatgcatggtgctccagtttgtcattagtccatgacaaggggctcggttagtccacagccctagaggctgcagctgcacacttctcttctctgttttcgccggttaaactttccccacttgttgctggccttcgaatctgtggtttgtttgagcttggaagcgaagaacagggaagcaaggacatggatgctttcagtgcagtgatggacaaggtaaagagccacccagaaatgatggagaaggtaagtgcagtgatggacaaggtgaagaagagccacccagaagcggtggaaaaggtcaaggacgaggtgaagagccttgctgacgctctccacctgcggagacatggatccaaagataaagaacctgagtctgaagagaaggccgtagaaggcgaggcagcgcagagcgtcgaggaggaggagggtacctctgctgacaagactgcagaacctaatgtgttggagcaggccgtacaggagattcaggctgtcgccgcagctttgcagcagacagcacctgaaactgaaactgaaattccagttgagactgctgctgctgctgctcctgaaactttggctgaaggagacaagcctgaagaaacaaacagggatgtggagaaagacgacccaaagaagcggctcgatttcgccgggttcttcgccatgctgtttgagaggttctgctccccggccaacaagaagaaagactgagtgattgcaggtcagctgtggatttctcgttttgtgatcttggacgtggaaattacattttactgggtggtgtacagtctgcacttgtgttctattaagataaatctgctcttgcttttttactttcttctggtgcaatgactacagtttacttgatgtatttattgtcgcccttgtggaattgatttagtttatgtgaacgattgatttattttgggttaagataatgcagtgagtgtgtgatgccttgtatggacatgtgagaaccgattttgctcattgtgaacaaaattttagccctact

SEQ ID NO: 77219 - DNA, 2192 bp, Zea Mays
ctccacgaaccacatcaaaactgatcaactctctccctctgcttcccgctagagcaaacgccacgagagtcgcgattcttccaccacttccacgggaccggtcggatccaatctgctgccgcccagccaccgccaccgccgccaccgccggctcctctataggggtcttccctcctcttcgcccttcgcaacccgcaagttccgagcgattgatgagtatttttctccccgtcccttggagcgactcggtggatgcgagggacctgtccgcgctcgacccgccttcgcccctatctcgccgcccggcgggcaggctcctgctctcgccttccgttcccggagctagccgcaggcccatgggctagtgggtcgtcgttcgccctcctgcgatcgcgagcggagaggcggcctgcgggatccgcccgtctccaatccaaataactcctctccttggacgatttcggagttactggcctgcctgaaaatcgattcctgctaacgccagtattgtgcttttcagtaacaagagtgtacagttgttgcttcttgggatgtgaatcctgtcttgggtggggatccagctcacgctagatttccccccttttgcctttcactttttcactcgggagggaaaggttgggttcctgggtaattaacatccaatcgctctgcttgattctaccttatcttctaatcactatttccgtgctcttaatgcaagtggtgggaaggcaaagtaaatattgtattgccggttttggggacatattcttggggatattccggtctgtgcaaacatatctcttgcccttagtttagtttgatgctcatatcagtattcagtactggtggggagtgcacatatcacaaatcctgattatcctcggccgttggggagatgagttcctcacaagaatccaccttcacctcggcctcagcggctgcacaagttaatgcttccgctttggacttgctcccggtctatgccaaggagcttatcgccggcggcgctgctggtgcatttgcaaagactgcggtagcaccactggagagggtcaagatcttattacaagaactgaaggtttccagtccctcgggatcctccagtccttgaggaagctgtggcaatacgagggaattcgaggcttctacaaagggaacggtgcaagcgtgcttcggattgttccatatgcagcattgcattacatgacatatgagcagtataggtgctggatattgaataattctgcttcatcaataggtacagggcctgtcgttgatcttttagctggctctgctgctggtggtactgcagttttgtgtacatacccattagacttggctaggaccaagctggcataccaggtttcaaatgttggccaaactggtaatgctttgggaaattctggtcaacaacaaacgtataatggcataaaagatgttttcaagactgtttacaaggaaggaggtgcacgatctttgtatcgtggagtaggcccaactcttattggtattcttccatatgctggcttgaagttttacatatatgaagatctgaaatctcaagttccagacgattacaaggattctgttatactgaagctctcttgtggagctttagctggtctatttggacaaaccctcacttatccactggatgttgtccggagacaaatgcaggttcagagcaagcagtctcaaaattcgagcgatggcttccgtataagaggaacttttcagggtctcttgctcatcattcggtgccaagggtggagacaactctttgctggcttgagccttaactatgtcaaggttgtcccttcagtagctatcggtttcacaacatacgacatgatgaaggcattgcttggagttcctccccgagagagagtccatgcgtcaggtggtaacaagtgaagcaatgttggccatccttgtgttatgactgatgaactaaagaaattctaggttgtgagttgtgacattgttattcttgttatgaatcccattgcatagggtggagagtgttgtatattggtcaaatagctatattcatgtaacattaagttgagatgcttgtatcatccattatgctgcttgtaatgtaaccatgaatacaatgacgcccctaaagatcactttaaattaactataaaagattagtattacccttaggccctgtttgtttcgtt

SEQ ID NO: 77220 - DNA, 1064 bp, Zea Mays
gcgatcactgcgtactgttgagttgtaaaggaaaatgtccaaattacctcccaagttttgcctatgtccgggcaatcacagccgcaggaacaaggaaaaatgagtccatctttggtgagcttcacacccagattaagaacaagaaattgacagttgatgtcaaagcaaactcagaatcagatcttttgacaacaatcactgtcgatgagtttggtactccagggctaaaatcaattatcaatttggttgttccagaccagaggtcagggaagcttgaattccagtacctacatgaatatgctggtgtgaatgcaagcgtcgggcttaattccaaccctatggttaacctttctggtgcctttggaagcaaagcactatcagtcggcgttgatgtctcatttgatacggcgactagcgatttcaccaagtacaacgctgccctgagcctcaccagtccagatcttattgcttcccttcatctgaataaccacggtgataccctggttgcgtcctactaccacttggtaaagaaccattcaggcactgctgttggagctgagttgtctcacagcatgtcgagaaatgagagcacgctaatcttcgggtcccagcactcgctggatccccacacgactatcaagacacgtttcaacaactacggcatggccagtgcccttgtccagcatgaatggcgtcccaagtccttcgtcaccatctctggtgacgttgacactaaggcgattgagaagagcacgaaagttggcctatccttggtgctcaagcactgaagtgccgagtgtttttgggctctaggaatttattttcggttcagttggattggaataaacatggtctggagtcatctttgcggcaccattttgatcttgaactatatatttttttcactctctgcatgatcaatttcataggaaaatattaggattaattgactttatgtttcaattctcagcgccctgttaataattctgttgattgagaccaattgttaaacttgtgaaatatataatggtgattactttgggtttacatctatgttcattcat

SEQ ID NO: 77221 - DNA, 1552 bp, Zea Mays
ggtgtgatgagacaaaaccctttgtacgtgatgaatatggactgatcagcaatgaagtgcttgtggaaaacaatgtactacccgttgtgcagccagagccttctatcagaggaactaatatggataagggtaccattttgaaaacaatgcccctggagccatcatctcagaacccaagcatgcaaatagcagttatccgccatgtggtctctggaatattattacacaataccatatatgacgttgttcccctttctagcaagggtcttgctctggttcctttttgggatgaccgtcagggaaccataacaggcatgctcactgcatcagattttgttttaatcttgagaaagttgcagagaaacattcaagttattggcaacgaagagcccatttctgcttggaaagaagcaaagctacagttctatggtgggcctgatggtgctgtcatgcagagaacgccattaatccatacaggcaacattgatctcagggccaagaaagaagctcaactcggcatgcttcctgtttgaagcaagggcaacaaacttaccccaccagatctctgtcgccaaagcagggctagtgaataagctgtgtttcctcccggattgtcactgcttttatatttgtgcatttattttgagggaaacattttgcccaaaaaaggcctgcagtgcacgttttaaacaagtcatttgaaccaactcttatgctgaaaactgtatgtgatactgcagaaggcaacacactagcttgataggaaagttggttggcaagcataggtggactctggtgccttcatatatctatatatatattttaagttgacgatcttcgtgatgctgaaactgatgaagacctccgatgaaaaaagagacatgctgcacatgcacgagggtacttgcagatcgatgtcggctctatggacgaacactcgaccaagtcagatgaggagtatgagggcctagccatgcgcgacgtgatggctactggtccgacgatgagcagcaagctgtgagttaaagatgaactcacctgccctggagagtaacatccataggagtgaggcaaaatggctggtaccaccacaacatggacccgttcctgaagatgtccaaggaggtggtagccgacaccataatgtcttgtgtcattgtgtcaccggtcggcaacacactgcgctggtaccggcgggtgttgtgtttcttaggcgtctgcttctgtgctttgagttgtgctatagagtggttgtgccaactactgattttaaaagaaaaaggtgagctgagaatcattgttgaaaacaaacatgtaattgttcgttctcatcagttgtgccaactaccaagcatttcattgatcagaatttatcgttgctcatgagaaccaaaagtaagacacttctcaataacattggatgcaaatttctgctagcttatcttcactatcttttctcgtatcaatataacacacatttatacataatttttgtgttattatatgttttcgttgcaacgcacgggcactcacctagttatagaataaaaat

SEQ ID NO: 77222 - DNA, 2599 bp, Zea Mays
gctgtcaatcgcctccccactgcggcagatccgcaatccgctcctccaccaccgcgctcctcacccacgccagggacaagactgtctacctccacgcccgcctcaccaactccgcggccaccgccaccgccacgcccctcccccatggtcgtcgagtccgagtggtggaaccagcgacgcatgcgcgtcgagggcgacgtgaaataggtgctccaccgcgggcacaacgggcacagtggaggtggaacgagcaccatcgagttctggttccaccgaatccaccgctcgcacaccggatccatcgctcccacatgcccgcacaccggatccaccgctccctcccccgcgatggcctggttccaccgagacaactgcggggctagggtttggattcgtgggtggagcccaaggctagatccagcagggggagggaggtagaggaggggagggaactgctggtggtcggcagtgggcgaaggcgcgacaatccaggatatggattcctgagcgtcacccacccgcccatccacgtcgcgcggtgtagtcatcccctatccgcagccgcctcgctccctctcccacaacaaatccattctcctcctcccactcgacgaggatcgcgaggatgctggaggacgtcgtcgctgtcacgcttgacgttagggcctccgatgcttgacgttagggcctctcgcttgaagaggaacacaaacagagctcatgttttttattttgctctgcattatctactgcttctctgtgggggcgttatttacagtatgtggcctgtttgttgtgttgttcctgcggaagggcgggcgggccgaaggtgtttaagaaaatgttgttgtcaacatcaacctcctggaagggccagaacgcaggcagcgcctcaactcgtcaccccatcagcacgatgctacttcatgtggagctggtatgtaggatgattatcacgagtacttcaagcgctcattttaggaagacatcgctgcgcaagtgcctcaaggagtggaatgtaccggtttttggttgatggtgtctggaggtgtgatgagacaaaaccctttgtacgtgatgaatatggactgatcagcaatgaagtgcttgtggaaaacaatgtactacccgttgtgcagccagagccttctatcagaggaactaatatggataagggtaccattttgaaaacaatgcccctggagccatcatctcagaacccaagcatgcaaatagcagttatccgccatgtggtctctggaatattattacacaataccatatatgacgttgttcccctttctagcaagggtcttgctctggttcctttttgggatgaccgtcagggaaccataacaggcatgctcactgcatcagattttgttttaatcttgagaaagttgcagagaaacattcaagttattggcaacgaagagcccatttctgcttggaaagaagcaaagctacagttctatggtgggcctgatggtgctgtcatgcagagaacgccattaatccatacaggcaacattgatctcagggccaagaaagaagctcaactcggcatgcttcctgtttgaagcaagggcaacaaacttaccccaccagatctctgtcgccaaagcagggctagtgaataagctgtgtttcctcccggattgtcactgcttttatatttgtgcatttattttgagggaaacattttgcccaaaaaaggcctgcagtgcacgttttaaacaagtcatttgaaccaactcttatgctgaaaactgtatgtgatactgcagaaggcaacacactagcttgataggaaagttggttggcaagcataggtggactctggtgccttcatatatctatatatatattttaagttgacgatcttcgtgatgctgaaactgatgaagacctccgatgaaaaaagagacatgctgcacatgcacgagggtacttgcagatcgatgtcggctctatggacgaacactcgaccaagtcagatgaggagtatgagggcctagccatgcgcgacgtgatggctactggtccgacgatgagcagcaagctgtgagttaaagatgaactcacctgccctggagagtaacatccataggagtgaggcaaaatggctggtaccaccacaacatggacccgttcctgaagatgtccaaggaggtggtagccgacaccataatgtcttgtgtcattgtgtcaccggtcggcaacacactgcgctggtaccggcgggtgttgtgtttcttaggcgtctgcttctgtgctttgagttgtgctatagagtggttgtgccaactactgattttaaaagaaaaaggtgagctgagaatcattgttgaaaacaaacatgtaattgttcgttctcatcagttgtgccaactaccaagcatttcattgatcagaatttatcgttgctcatgagaaccaaaagtaagacacttctcaataacattggatgcaaatttctgctagcttatcttcactatcttttctcgtatcaatataacacacatttatacataatttttgtgttattatatgttttcgttgcaacgcacgggcactcacctagttatagaataaaaat

SEQ ID NO: 77223 - DNA, 3987 bp, Zea Mays
gctgtcaatcgcctccccactgcggcagatccgcaatccgctcctccaccaccgcgctcctcacccacgccagggacaagactgtctacctccacgcccgcctcaccaactccgcggccaccgccaccgccacgcccctcccccatggtcgtcgagtccgagtggtggaaccagcgacgcatgcgcgtcgagggcgacgtgaaataggtgctccaccgcgggcacaacgggcacagtggaggtggaacgagcaccatcgagttctggttccaccgaatccaccgctcgcacaccggatccatcgctcccacatgcccgcacaccggatccaccgctccctcccccgcgatggcctggttccaccgagacaactgcggggctagggtttggattcgtgggtggagcccaaggctagatccagcagggggagggaggtagaggaggggagggaactgctggtggtcggcagtgggcgaaggcgcgacaatccaggatatggattcctgagcgtcacccacccgcccatccacgtcgcgcggtgtagtcatcccctatccgcagccgcctcgctccctctcccacaacaaatccattctcctcctcccactcgacgaggatcgcgaggatgctggaggacgtcgtcgctgtcacgcttgacgttagggcctccgatgcttgacgttagggcctctcgcttgaagaggaacacaaacagagctcatgttttttattttgctctgcattatctactgcttctctgtgggggcgttatttacagtatgtggcctgtttgttgtgttgttcctgcggaagggcgggcgggccgaaggtgtttaagaaaatgttgttgtcaacatcaacctcctggaagggccagaacgcaggcagcgcctcaactcgtcaccccatcagcacggtgagccccttatctggattgttatcatggtacgcggtgcgctgcaagcctgcaagtgacatcaaattggattggtagtcagcgggtgtcatagtgtcagttcgatggaatggttctgcagtgcatgtgcttctgtaatttccgcaagaagcagtcaacttctccctgatatggcactaggacattgtagtgattcccgcacgtttgtggaactcgacaacctaccagagcgccagatgtttcattgagaagagaactcctccagtctggctttccactggtctagtctctcctttaaaccaaatttgataccactcattgaagtcaatagctgggatgtagacatgtgaaaccacacctgtggaactttcagcgtgtgatgactgggtcactggtggaataccgtgttttttgagctgctcgctttcagttcgcggtcatagtcctgtgttttttgccttcagtttcttgatgtagttattgcctaaaatttctatatcttgttcatcgtactggagatgctacttcatgtggagctggtatgtaggatgattatcacgagtacttcaagcgctcattttaggaagacatcgctgcgcaagtgcctcaaggagtggaatggtgagcccctgtccatctactgaacagagaaaataccaggagcaaatgactgcatttttagttaatccttttattcctaaattaattgtgtttgttaatgcttttattcctaaaataagtaaccgagctcgggattcttcgcaatttgatttgcgagatcacccccataaaggcatcatgaatctttatgcctgtaaagacatcccactgtctctttcgttttcgataagatgttttggccgttacataatgcctgtaaggtagaatgccattgcagttgttgcatcagaaagcagccatttaacgccattgtaaagtgagtgatgattaaatacaaccacacttctgtctctcaggtttctgtacatggagtttttattgcacctcttcttccccagcaattagtacttgcagttagactaaatgaatcttgaatgccccttaactgttggctttacatggaactacttttgcatataccagacaactattttgaacttcaatatgtttttcaattccagcaattgatcgaaacatgatatatttgacatattcatgatggatttttgtatttgatgtgtcgctttttcatctatcaatgtaattcttggacataacattgcgcacaggtaccaaattcacacccttgttattgcgagttctgtaaatcatgatgttcacatgtgatggtttgattcagttcaatggttagcaagctatttgaacatgatactatagtagtgcatatttgctgtacaaatggccactgcccagctatttgcataagatattatgtttctcctgtgacattttctatgccacatacatttatatggcatttttgtgcaatttagtaccggtttttggttgatggtgtctggaggtgtgatgagacaaaaccctttgtacgtgatgaatatggactgatcagcaatgaagtgcttgtggaaaacaatgtactacccgttgtgcagccagagccttctatcagaggaactaatatggataaggatgcccctggagccatcatctcagaacccaagcatgcaaatagcagttatccgccatgtggtctctggaatattattacacaataccatatatgacgttgttcccctttctagcaagttaacagttttggacactcagcttcctgttaaacaagcatttaaaataatgcatgatgtgggaaccataacaggcatgctcactgcatcagattttgttttaatcttgagaaagttgcagagaaacattcaagttattggcaacgaagagcccatttctgcttggaaagaagcaaagctacagttctatggtgggcctgatggtgctgtcatgcagagaacgccattaatccattttgtacagacaggcaacattgatctcagggccaagaaagaagctcaactcggcatgcttcctgtttgaagcaagggcaacaaacttaccccaccagatctctgtcgccaaagcagggctagtgaataagctgtgtttcctcccggattgtcactgcttttatatttgtgcatttattttgagggaaacattttgcccaaaaaaggcctgcagtgcacgttttaaacaagtcatttgaaccaactcttatgctgaaaactgtatgtgatactgcagaaggcaacacactagcttgataggaaagttggttggcaagcataggtggactctggtgccttcatatatctatatatatattttaagttgacgatcttcgtgatgctgaaactgatgaagacctccgatgaaaaaagagacatgctgcacatgcacgagggtacttgcagatcgatgtcggctctatggacgaacactcgaccaagtcagatgaggagtatgagggcctagccatgcgcgacgtgatggctactggtccgacgatgagcagcaagctgtgagttaaagatgaactcacctgccctggagagtaacatccataggagtgaggcaaaatggctggtaccaccacaacatggacccgttcctgaagatgtccaaggaggtggtagccgacaccataatgtcttgtgtcattgtgtcaccggtcggcaacacactgcgctggtaccggcgggtgttgtgtttcttaggcgtctgcttctgtgctttgagttgtgctatagagtggttgtgccaactactgattttaaaagaaaaaggtgagctgagaatcattgttgaaaacaaacatgtaattgttcgttctcatcagttgtgccaactaccaagcatttcattgatcagaatttatcgttgctcatgagaaccaaaagtaagacacttctcaataacattggatgcaaatttctgctagcttatcttcactatcttttctcgtatcaatataacacacatttatacataatttttgtgttattatatgttttcgttgcaacgcacgggcactcacctagttatagaataaaaat

SEQ ID NO: 77224 - DNA, 3511 bp, Zea Mays
gctgtcaatcgcctccccactgcggcagatccgcaatccgctcctccaccaccgcgctcctcacccacgccagggacaagactgtctacctccacgcccgcctcaccaactccgcggccaccgccaccgccacgcccctcccccatggtcgtcgagtccgagtggtggaaccagcgacgcatgcgcgtcgagggcgacgtgaaataggtgctccaccgcgggcacaacgggcacagtggaggtggaacgagcaccatcgagttctggttccaccgaatccaccgctcgcacaccggatccatcgctcccacatgcccgcacaccggatccaccgctccctcccccgcgatggcctggttccaccgagacaactgcggggctagggtttggattcgtgggtggagcccaaggctagatccagcagggggagggaggtagaggaggggagggaactgctggtggtcggcagtgggcgaaggcgcgacaatccaggatatggattcctgagcgtcacccacccgcccatccacgtcgcgcggtgtagtcatcccctatccgcagccgcctcgctccctctcccacaacaaatccattctcctcctcccactcgacgaggatcgcgaggatgctggaggacgtcgtcgctgtcacgcttgacgttagggcctccgatgcttgacgttagggcctctcgcttgaagaggaacacaaacagagctcatgttttttattttgctctgcattatctactgcttctctgtgggggcgttatttacagtatgtggcctgtttgttgtgttgttcctgcggaagggcgggcgggccgaaggtgtttaagaaaatgttgttgtcaacatcaacctcctggaagggccagaacgcaggcagcgcctcaactcgtcaccccatcagcacggatgattatcacgagtacttcaagcgctcattttaggaagacatcgctgcgcaagtgcctcaaggagtggaatggtgagcccctgtccatctactgaacagagaaaataccaggagcaaatgactgcatttttagttaatccttttattcctaaattaattgtgtttgttaatgcttttattcctaaaataagtaaccgagctcgggattcttcgcaatttgatttgcgagatcacccccataaaggcatcatgaatctttatgcctgtaaagacatcccactgtctctttcgttttcgataagatgttttggccgttacataatgcctgtaaggtagaatgccattgcagttgttgcatcagaaagcagccatttaacgccattgtaaagtgagtgatgattaaatacaaccacacttctgtctctcaggtttctgtacatggagtttttattgcacctcttcttccccagcaattagtacttgcagttagactaaatgaatcttgaatgccccttaactgttggctttacatggaactacttttgcatataccagacaactattttgaacttcaatatgtttttcaattccagcaattgatcgaaacatgatatatttgacatattcatgatggatttttgtatttgatgtgtcgctttttcatctatcaatgtaattcttggacataacattgcgcacaggtaccaaattcacacccttgttattgcgagttctgtaaatcatgatgttcacatgtgatggtttgattcagttcaatggttagcaagctatttgaacatgatactatagtagtgcatatttgctgtacaaatggccactgcccagctatttgcataagatattatgtttctcctgtgacattttctatgccacatacatttatatggcatttttgtgcaatttagtaccggtttttggttgatggtgtctggaggtgtgatgagacaaaaccctttgtacgtgatgaatatggactgatcagcaatgaagtgcttgtggaaaacaatgtactacccgttgtgcagccagagccttctatcagaggaactaatatggataaggatgcccctggagccatcatctcagaacccaagcatgcaaatagcagttatccgccatgtggtctctggaatattattacacaataccatatatgacgttgttcccctttctagcaagttaacagttttggacactcagcttcctgttaaacaagcatttaaaataatgcatgatgtgggtcttgctctggttcctttttgggatgaccgtcagggaaccataacaggcatgctcactgcatcagattttgttttaatcttgagaaagttgcagagaaacattcaagttattggcaacgaagagcccatttctgcttggaaagaagcaaagctacagttctatggtgggcctgatggtgctgtcatgcagagaacgccattaatccatgtacttctccatatatttgctgattctttcatttgattcaatgtacaggcaacattgatctcagggccaagaaagaagctcaactcggcatgcttcctgtttgaagcaagggcaacaaacttaccccaccagatctctgtcgccaaagcagggctagtgaataagctgtgtttcctcccggattgtcactgcttttatatttgtgcatttattttgagggaaacattttgcccaaaaaaggcctgcagtgcacgttttaaacaagtcatttgaaccaactcttatgctgaaaactgtatgtgatactgcagaaggcaacacactagcttgataggaaagttggttggcaagcataggtggactctggtgccttcatatatctatatatatattttaagttgacgatcttcgtgatgctgaaactgatgaagacctccgatgaaaaaagagacatgctgcacatgcacgagggtacttgcagatcgatgtcggctctatggacgaacactcgaccaagtcagatgaggagtatgagggcctagccatgcgcgacgtgatggctactggtccgacgatgagcagcaagctgtgagttaaagatgaactcacctgccctggagagtaacatccataggagtgaggcaaaatggctggtaccaccacaacatggacccgttcctgaagatgtccaaggaggtggtagccgacaccataatgtcttgtgtcattgtgtcaccggtcggcaacacactgcgctggtaccggcgggtgttgtgtttcttaggcgtctgcttctgtgctttgagttgtgctatagagtggttgtgccaactactgattttaaaagaaaaaggtgagctgagaatcattgttgaaaacaaacatgtaattgttcgttctcatcagttgtgccaactaccaagcatttcattgatcagaatttatcgttgctcatgagaaccaaaagtaagacacttctcaataacattggatgcaaatttctgctagcttatcttcactatcttttctcgtatcaatataacacacatttatacataatttttgtgttattatatgttttcgttgcaacgcacgggcactcacctagttatagaataaaaat

SEQ ID NO: 77225 - DNA, 3199 bp, Zea Mays
gctgtcaatcgcctccccactgcggcagatccgcaatccgctcctccaccaccgcgctcctcacccacgccagggacaagactgtctacctccacgcccgcctcaccaactccgcggccaccgccaccgccacgcccctcccccatggtcgtcgagtccgagtggtggaaccagcgacgcatgcgcgtcgagggcgacgtgaaataggtgctccaccgcgggcacaacgggcacagtggaggtggaacgagcaccatcgagttctggttccaccgaatccaccgctcgcacaccggatccatcgctcccacatgcccgcacaccggatccaccgctccctcccccgcgatggcctggttccaccgagacaactgcggggctagggtttggattcgtgggtggagcccaaggctagatccagcagggggagggaggtagaggaggggagggaactgctggtggtcggcagtgggcgaaggcgcgacaatccaggatatggattcctgagcgtcacccacccgcccatccacgtcgcgcggtgtagtcatcccctatccgcagccgcctcgctccctctcccacaacaaatccattctcctcctcccactcgacgaggatcgcgaggatgctggaggacgtcgtcgctgtcacgcttgacgttagggcctccgatgcttgacgttagggcctctcgcttgaagaggaacacaaacagagctcatgttttttattttgctctgcattatctactgcttctctgtgggggcgttatttacagtatgtggcctgtttgttgtgttgttcctgcggaagggcgggcgggccgaaggtgtttaagaaaatgttgttgtcaacatcaacctcctggaagggccagaacgcaggcagcgcctcaactcgtcaccccatcagcacggatgattatcacgagtacttcaagcgctcattttaggaagacatcgctgcgcaagtgcctcaaggagtggaatggtgagcccctgtccatctactgaacagagaaaataccaggagcaaatgactgcatttttagttaatccttttattcctaaattaattgtgtttgttaatgcttttattcctaaaataagtaaccgagctcgggattcttcgcaatttgatttgcgagatcacccccataaaggcatcatgaatctttatgcctgtaaagacatcccactgtctctttcgttttcgataagatgttttggccgttacataatgcctgtaaggtagaatgccattgcagttgttgcatcagaaagcagccatttaacgccattgtaaagtgagtgatgattaaatacaaccacacttctgtctctcaggtttctgtacatggagtttttattgcacctcttcttccccagcaattagtacttgcagttagactaaatgaatcttgaatgccccttaactgttggctttacatggaactacttttgcatataccagacaactattttgaacttcaatatgtttttcaattccagcaattgatcgaaacatgatatatttgacatattcatgatggatttttgtatttgatgtgtcgctttttcatctatcaatgtaattcttggacataacattgcgcacagtaccggtttttggttgatggtgtctggaggtgtgatgagacaaaaccctttgtacgtgatgaatatggactgatcagcaatgaagtgcttgtggaaaacaatgtactacccgttgtgcagccagagccttctatcagaggaactaatatggataagggtaccattttgaaaacaatgcccctggagccatcatctcagaacccaagcatgcaaatagcagttatccgccatgtggtctctggaatattattacacaataccatatatgacgttgttcccctttctagcaagggtcttgctctggttcctttttgggatgaccgtcagggaaccataacaggcatgctcactgcatcagattttgttttaatcttgagaaagttgcagagaaacattcaagttattggcaacgaagagcccatttctgcttggaaagaagcaaagctacagttctatggtgggcctgatggtgctgtcatgcagagaacgccattaatccatacaggcaacattgatctcagggccaagaaagaagctcaactcggcatgcttcctgtttgaagcaagggcaacaaacttaccccaccagatctctgtcgccaaagcagggctagtgaataagctgtgtttcctcccggattgtcactgcttttatatttgtgcatttattttgagggaaacattttgcccaaaaaaggcctgcagtgcacgttttaaacaagtcatttgaaccaactcttatgctgaaaactgtatgtgatactgcagaaggcaacacactagcttgataggaaagttggttggcaagcataggtggactctggtgccttcatatatctatatatatattttaagttgacgatcttcgtgatgctgaaactgatgaagacctccgatgaaaaaagagacatgctgcacatgcacgagggtacttgcagatcgatgtcggctctatggacgaacactcgaccaagtcagatgaggagtatgagggcctagccatgcgcgacgtgatggctactggtccgacgatgagcagcaagctgtgagttaaagatgaactcacctgccctggagagtaacatccataggagtgaggcaaaatggctggtaccaccacaacatggacccgttcctgaagatgtccaaggaggtggtagccgacaccataatgtcttgtgtcattgtgtcaccggtcggcaacacactgcgctggtaccggcgggtgttgtgtttcttaggcgtctgcttctgtgctttgagttgtgctatagagtggttgtgccaactactgattttaaaagaaaaaggtgagctgagaatcattgttgaaaacaaacatgtaattgttcgttctcatcagttgtgccaactaccaagcatttcattgatcagaatttatcgttgctcatgagaaccaaaagtaagacacttctcaataacattggatgcaaatttctgctagcttatcttcactatcttttctcgtatcaatataacacacatttatacataatttttgtgttattatatgttttcgttgcaacgcacgggcactcacctagttatagaataaaaat

SEQ ID NO: 77226 - DNA, 2609 bp, Zea Mays
gctgtcaatcgcctccccactgcggcagatccgcaatccgctcctccaccaccgcgctcctcacccacgccagggacaagactgtctacctccacgcccgcctcaccaactccgcggccaccgccaccgccacgcccctcccccatggtcgtcgagtccgagtggtggaaccagcgacgcatgcgcgtcgagggcgacgtgaaataggtgctccaccgcgggcacaacgggcacagtggaggtggaacgagcaccatcgagttctggttccaccgaatccaccgctcgcacaccggatccatcgctcccacatgcccgcacaccggatccaccgctccctcccccgcgatggcctggttccaccgagacaactgcggggctagggtttggattcgtgggtggagcccaaggctagatccagcagggggagggaggtagaggaggggagggaactgctggtggtcggcagtgggcgaaggcgcgacaatccaggatatggattcctgagcgtcacccacccgcccatccacgtcgcgcggtgtagtcatcccctatccgcagccgcctcgctccctctcccacaacaaatccattctcctcctcccactcgacgaggatcgcgaggatgctggaggacgtcgtcgctgtcacgcttgacgttagggcctccgatgcttgacgttagggcctctcgcttgaagaggaacacaaacagagctcatgttttttattttgctctgcattatctactgcttctctgtgggggcgttatttacagtatgtggcctgtttgttgtgttgttcctgcggaagggcgggcgggccgaaggtgtttaagaaaatgttgttgtcaacatcaacctcctggaagggccagaacgcaggcagcgcctcaactcgtcaccccatcagcacggatgattatcacgagtacttcaagcgctcattttaggaagacatcgctgcgcaagtgcctcaaggagtggaatgtaccggtttttggttgatggtgtctggaggtgtgatgagacaaaaccctttgtacgtgatgaatatggactgatcagcaatgaagtgcttgtggaaaacaatgtactacccgttgtgcagccagagccttctatcagaggaactaatatggataaggatgcccctggagccatcatctcagaacccaagcatgcaaatagcagttatccgccatgtggtctctggaatattattacacaataccatatatgacgttgttcccctttctagcaagttaacagttttggacactcagcttcctgttaaacaagcatttaaaataatgcatgatgtgggtcttgctctggttcctttttgggatgaccgtcagggaaccataacaggcatgctcactgcatcagattttgttttaatcttgagaaagttgcagagaaacattcaagttattggcaacgaagagcccatttctgcttggaaagaagcaaagctacagttctatggtgggcctgatggtgctgtcatgcagagaacgccattaatccatgcaacattgatctcagggccaagaaagaagctcaactcggcatgcttcctgtttgaagcaagggcaacaaacttaccccaccagatctctgtcgccaaagcagggctagtgaataagctgtgtttcctcccggattgtcactgcttttatatttgtgcatttattttgagggaaacattttgcccaaaaaaggcctgcagtgcacgttttaaacaagtcatttgaaccaactcttatgctgaaaactgtatgtgatactgcagaaggcaacacactagcttgataggaaagttggttggcaagcataggtggactctggtgccttcatatatctatatatatattttaagttgacgatcttcgtgatgctgaaactgatgaagacctccgatgaaaaaagagacatgctgcacatgcacgagggtacttgcagatcgatgtcggctctatggacgaacactcgaccaagtcagatgaggagtatgagggcctagccatgcgcgacgtgatggctactggtccgacgatgagcagcaagctgtgagttaaagatgaactcacctgccctggagagtaacatccataggagtgaggcaaaatggctggtaccaccacaacatggacccgttcctgaagatgtccaaggaggtggtagccgacaccataatgtcttgtgtcattgtgtcaccggtcggcaacacactgcgctggtaccggcgggtgttgtgtttcttaggcgtctgcttctgtgctttgagttgtgctatagagtggttgtgccaactactgattttaaaagaaaaaggtgagctgagaatcattgttgaaaacaaacatgtaattgttcgttctcatcagttgtgccaactaccaagcatttcattgatcagaatttatcgttgctcatgagaaccaaaagtaagacacttctcaataacattggatgcaaatttctgctagcttatcttcactatcttttctcgtatcaatataacacacatttatacataatttttgtgttattatatgttttcgttgcaacgcacgggcactcacctagttatagaataaaaat

SEQ ID NO: 77227 - DNA, 2975 bp, Zea Mays
gctgtcaatcgcctccccactgcggcagatccgcaatccgctcctccaccaccgcgctcctcacccacgccagggacaagactgtctacctccacgcccgcctcaccaactccgcggccaccgccaccgccacgcccctcccccatggtcgtcgagtccgagtggtggaaccagcgacgcatgcgcgtcgagggcgacgtgaaataggtgctccaccgcgggcacaacgggcacagtggaggtggaacgagcaccatcgagttctggttccaccgaatccaccgctcgcacaccggatccatcgctcccacatgcccgcacaccggatccaccgctccctcccccgcgatggcctggttccaccgagacaactgcggggctagggtttggattcgtgggtggagcccaaggctagatccagcagggggagggaggtagaggaggggagggaactgctggtggtcggcagtgggcgaaggcgcgacaatccaggatatggattcctgagcgtcacccacccgcccatccacgtcgcgcggtgtagtcatcccctatccgcagccgcctcgctccctctcccacaacaaatccattctcctcctcccactcgacgaggatcgcgaggatgctggaggacgtcgtcgctgtcacgcttgacgttagggcctccgatgcttgacgttagggcctctcgcttgaagaggaacacaaacagagctcatgttttttattttgctctgcattatctactgcttctctgtgggggcgttatttacagtatgtggcctgtttgttgtgttgttcctgcggaagggcgggcgggccgaaggtgtttaagaaaatgttgttgtcaacatcaacctcctggaagggccagaacgcaggcagcgcctcaactcgtcaccccatcagcacgatgctacttcatgtggagctggtatgtaggatgattatcacgagtacttcaagcgctcattttaggaagacatcgctgcgcaagtgcctcaaggagtggaatgcaattgatcgaaacatgatatatttgacatattcatgatggatttttgtatttgatgtgtcgctttttcatctatcaatgtaattcttggacataacattgcgcacaggtaccaaattcacacccttgttattgcgagttctgtaaatcatgatgttcacatgtgatggtttgattcagttcaatggttagcaagctatttgaacatgatactatagtagtgcatatttgctgtacaaatggccactgcccagctatttgcataagatattatgtttctcctgtgacattttctatgccacatacatttatatggcatttttgtgcaatttagtaccggtttttggttgatggtgtctggaggtgtgatgagacaaaaccctttgtacgtgatgaatatggactgatcagcaatgaagtgcttgtggaaaacaatgtactacccgttgtgcagccagagccttctatcagaggaactaatatggataaggatgcccctggagccatcatctcagaacccaagcatgcaaatagcagttatccgccatgtggtctctggaatattattacacaataccatatatgacgttgttcccctttctagcaagttaacagttttggacactcagcttcctgttaaacaagcatttaaaataatgcatgatgtgggtcttgctctggttcctttttgggatgaccgtcagggaaccataacaggcatgctcactgcatcagattttgttttaatcttgagaaagttgcagagaaacattcaagttattggcaacgaagagcccatttctgcttggaaagaagcaaagctacagttctatggtgggcctgatggtgctgtcatgcagagaacgccattaatccatacaggcaacattgatctcagggccaagaaagaagctcaactcggcatgcttcctgtttgaagcaagggcaacaaacttaccccaccagatctctgtcgccaaagcagggctagtgaataagctgtgtttcctcccggattgtcactgcttttatatttgtgcatttattttgagggaaacattttgcccaaaaaaggcctgcagtgcacgttttaaacaagtcatttgaaccaactcttatgctgaaaactgtatgtgatactgcagaaggcaacacactagcttgataggaaagttggttggcaagcataggtggactctggtgccttcatatatctatatatatattttaagttgacgatcttcgtgatgctgaaactgatgaagacctccgatgaaaaaagagacatgctgcacatgcacgagggtacttgcagatcgatgtcggctctatggacgaacactcgaccaagtcagatgaggagtatgagggcctagccatgcgcgacgtgatggctactggtccgacgatgagcagcaagctgtgagttaaagatgaactcacctgccctggagagtaacatccataggagtgaggcaaaatggctggtaccaccacaacatggacccgttcctgaagatgtccaaggaggtggtagccgacaccataatgtcttgtgtcattgtgtcaccggtcggcaacacactgcgctggtaccggcgggtgttgtgtttcttaggcgtctgcttctgtgctttgagttgtgctatagagtggttgtgccaactactgattttaaaagaaaaaggtgagctgagaatcattgttgaaaacaaacatgtaattgttcgttctcatcagttgtgccaactaccaagcatttcattgatcagaatttatcgttgctcatgagaaccaaaagtaagacacttctcaataacattggatgcaaatttctgctagcttatcttcactatcttttctcgtatcaatataacacacatttatacataatttttgtgttattatatgttttcgttgcaacgcacgggcactcacctagttatagaataaaaat

SEQ ID NO: 77228 - DNA, 3126 bp, Zea Mays
gctgtcaatcgcctccccactgcggcagatccgcaatccgctcctccaccaccgcgctcctcacccacgccagggacaagactgtctacctccacgcccgcctcaccaactccgcggccaccgccaccgccacgcccctcccccatggtcgtcgagtccgagtggtggaaccagcgacgcatgcgcgtcgagggcgacgtgaaataggtgctccaccgcgggcacaacgggcacagtggaggtggaacgagcaccatcgagttctggttccaccgaatccaccgctcgcacaccggatccatcgctcccacatgcccgcacaccggatccaccgctccctcccccgcgatggcctggttccaccgagacaactgcggggctagggtttggattcgtgggtggagcccaaggctagatccagcagggggagggaggtagaggaggggagggaactgctggtggtcggcagtgggcgaaggcgcgacaatccaggatatggattcctgagcgtcacccacccgcccatccacgtcgcgcggtgtagtcatcccctatccgcagccgcctcgctccctctcccacaacaaatccattctcctcctcccactcgacgaggatcgcgaggatgctggaggacgtcgtcgctgtcacgcttgacgttagggcctccgatgcttgacgttagggcctctcgcttgaagaggaacacaaacagagctcatgttttttattttgctctgcattatctactgcttctctgtgggggcgttatttacagtatgtggcctgtttgttgtgttgttcctgcggaagggcgggcgggccgaaggtgtttaagaaaatgttgttgtcaacatcaacctcctggaagggccagaacgcaggcagcgcctcaactcgtcaccccatcagcacggtgagccccttatctggattgttatcatggtacgcggtgcgctgcaagcctgcaagtgacatcaaattggattggtagtcagcgggtgtcatagtgtcagttcgatggaatggttctgcagtgcatgtgcttctgtaatttccgcaagaagcagtcaacttctccctgatatggcactaggacattgtagtgattcccgcacgtttgtggaactcgacaacctaccagagcgccagatgtttcattgagaagagaactcctccagtctggctttccactggtctagtctctcctttaaaccaaatttgataccactcattgaagtcaatagctgggatgtagacatgtgaaaccacacctgtggaactttcagcgtgtgatgactgggtcactggtggaataccgtgttttttgagctgctcgctttcagttcgcggtcatagtcctgtgttttttgccttcagtttcttgatgtagttattgcctaaaatttctatatcttgttcatcgtactggagatgctacttcatgtggagctggtatgtaggatgattatcacgagtacttcaagcgctcattttaggaagacatcgctgcgcaagtgcctcaaggagtggaatgtaccggtttttggttgatggtgtctggaggtgtgatgagacaaaaccctttgtacgtgatgaatatggactgatcagcaatgaagtgcttgtggaaaacaatgtactacccgttgtgcagccagagccttctatcagaggaactaatatggataagggtaccattttgaaaacaatgcccctggagccatcatctcagaacccaagcatgcaaatagcagttatccgccatgtggtctctggaatattattacacaataccatatatgacgttgttcccctttctagcaagggtcttgctctggttcctttttgggatgaccgtcagggaaccataacaggcatgctcactgcatcagattttgttttaatcttgagaaagttgcagagaaacattcaagttattggcaacgaagagcccatttctgcttggaaagaagcaaagctacagttctatggtgggcctgatggtgctgtcatgcagagaacgccattaatccattttgtacagacaggcaacattgatctcagggccaagaaagaagctcaactcggcatgcttcctgtttgaagcaagggcaacaaacttaccccaccagatctctgtcgccaaagcagggctagtgaataagctgtgtttcctcccggattgtcactgcttttatatttgtgcatttattttgagggaaacattttgcccaaaaaaggcctgcagtgcacgttttaaacaagtcatttgaaccaactcttatgctgaaaactgtatgtgatactgcagaaggcaacacactagcttgataggaaagttggttggcaagcataggtggactctggtgccttcatatatctatatatatattttaagttgacgatcttcgtgatgctgaaactgatgaagacctccgatgaaaaaagagacatgctgcacatgcacgagggtacttgcagatcgatgtcggctctatggacgaacactcgaccaagtcagatgaggagtatgagggcctagccatgcgcgacgtgatggctactggtccgacgatgagcagcaagctgtgagttaaagatgaactcacctgccctggagagtaacatccataggagtgaggcaaaatggctggtaccaccacaacatggacccgttcctgaagatgtccaaggaggtggtagccgacaccataatgtcttgtgtcattgtgtcaccggtcggcaacacactgcgctggtaccggcgggtgttgtgtttcttaggcgtctgcttctgtgctttgagttgtgctatagagtggttgtgccaactactgattttaaaagaaaaaggtgagctgagaatcattgttgaaaacaaacatgtaattgttcgttctcatcagttgtgccaactaccaagcatttcattgatcagaatttatcgttgctcatgagaaccaaaagtaagacacttctcaataacattggatgcaaatttctgctagcttatcttcactatcttttctcgtatcaatataacacacatttatacataatttttgtgttattatatgttttcgttgcaacgcacgggcactcacctagttatagaataaaaat

SEQ ID NO: 77229 - DNA, 2354 bp, Zea Mays
gctgtcaatcgcctccccactgcggcagatccgcaatccgctcctccaccaccgcgctcctcacccacgccagggacaagactgtctacctccacgcccgcctcaccaactccgcggccaccgccaccgccacgcccctcccccatggtcgtcgagtccgagtggtggaaccagcgacgcatgcgcgtcgagggcgacgtgaaataggtgctccaccgcgggcacaacgggcacagtggaggtggaacgagcaccatcgagttctggttccaccgaatccaccgctcgcacaccggatccatcgctcccacatgcccgcacaccggatccaccgctccctcccccgcgatggcctggttccaccgagacaactgcggggctagggtttggattcgtgggtggagcccaaggctagatccagcagggggagggaggtagaggaggggagggaactgctggtggtcggcagtgggcgaaggcgcgacaatccaggatatggattcctgagggcgggcgggccgaaggtgtttaagaaaatgttgttgtcaacatcaacctcctggaagggccagaacgcaggcagcgcctcaactcgtcaccccatcagcacgatgctacttcatgtggagctggtatgtaggatgattatcacgagtacttcaagcgctcattttaggaagacatcgctgcgcaagtgcctcaaggagtggaatgtaccggtttttggttgatggtgtctggaggtgtgatgagacaaaaccctttgtacgtgatgaatatggactgatcagcaatgaagtgcttgtggaaaacaatgtactacccgttgtgcagccagagccttctatcagaggaactaatatggataagggtaccattttgaaaacaatgcccctggagccatcatctcagaacccaagcatgcaaatagcagttatccgccatgtggtctctggaatattattacacaataccatatatgacgttgttcccctttctagcaagttaacagttttggacactcagcttcctgttaaacaagcatttaaaataatgcatgatgtgggtcttgctctggttcctttttgggatgaccgtcagggaaccataacaggcatgctcactgcatcagattttgttttaatcttgagaaagttgcagagaaacattcaagttattggcaacgaagagcccatttctgcttggaaagaagcaaagctacagttctatggtgggcctgatggtgctgtcatgcagagaacgccattaatccatacaggcaacattgatctcagggccaagaaagaagctcaactcggcatgcttcctgtttgaagcaagggcaacaaacttaccccaccagatctctgtcgccaaagcagggctagtgaataagctgtgtttcctcccggattgtcactgcttttatatttgtgcatttattttgagggaaacattttgcccaaaaaaggcctgcagtgcacgttttaaacaagtcatttgaaccaactcttatgctgaaaactgtatgtgatactgcagaaggcaacacactagcttgataggaaagttggttggcaagcataggtggactctggtgccttcatatatctatatatatattttaagttgacgatcttcgtgatgctgaaactgatgaagacctccgatgaaaaaagagacatgctgcacatgcacgagggtacttgcagatcgatgtcggctctatggacgaacactcgaccaagtcagatgaggagtatgagggcctagccatgcgcgacgtgatggctactggtccgacgatgagcagcaagctgtgagttaaagatgaactcacctgccctggagagtaacatccataggagtgaggcaaaatggctggtaccaccacaacatggacccgttcctgaagatgtccaaggaggtggtagccgacaccataatgtcttgtgtcattgtgtcaccggtcggcaacacactgcgctggtaccggcgggtgttgtgtttcttaggcgtctgcttctgtgctttgagttgtgctatagagtggttgtgccaactactgattttaaaagaaaaaggtgagctgagaatcattgttgaaaacaaacatgtaattgttcgttctcatcagttgtgccaactaccaagcatttcattgatcagaatttatcgttgctcatgagaaccaaaagtaagacacttctcaataacattggatgcaaatttctgctagcttatcttcactatcttttctcgtatcaatataacacacatttatacataatttttgtgttattatatgttttcgttgcaacgcacgggcactcacctagttatagaataaaaat

SEQ ID NO: 77230 - DNA, 2563 bp, Zea Mays
gctgtcaatcgcctccccactgcggcagatccgcaatccgctcctccaccaccgcgctcctcacccacgccagggacaagactgtctacctccacgcccgcctcaccaactccgcggccaccgccaccgccacgcccctcccccatggtcgtcgagtccgagtggtggaaccagcgacgcatgcgcgtcgagggcgacgtgaaataggtgctccaccgcgggcacaacgggcacagtggaggtggaacgagcaccatcgagttctggttccaccgaatccaccgctcgcacaccggatccatcgctcccacatgcccgcacaccggatccaccgctccctcccccgcgatggcctggttccaccgagacaactgcggggctagggtttggattcgtgggtggagcccaaggctagatccagcagggggagggaggtagaggaggggagggaactgctggtggtcggcagtgggcgaaggcgcgacaatccaggatatggattcctgagtcatcccctatccgcagccgcctcgctccctctcccacaacaaatccattctcctcctcccactcgacgaggatcgcgaggatgctggaggacgtcgtcgctgtcacgcttgacgttagggcctccgatgcttgacgttagggcctctcgcttgaagaggaacacaaacagagctcatgttttttattttgctctgcattatctactgcttctctgtgggggcgttatttacagtatgtggcctgtttgttgtgttgttcctgcggaagggcgggcgggccgaaggtgtttaagaaaatgttgttgtcaacatcaacctcctggaagggccagaacgcaggcagcgcctcaactcgtcaccccatcagcacgatgctacttcatgtggagctggtatgtaggatgattatcacgagtacttcaagcgctcattttaggaagacatcgctgcgcaagtgcctcaaggagtggaatgtaccggtttttggttgatggtgtctggaggtgtgatgagacaaaaccctttgtacgtgatgaatatggactgatcagcaatgaagtgcttgtggaaaacaatgtactacccgttgtgcagccagagccttctatcagaggaactaatatggataagggtaccattttgaaaacaatgcccctggagccatcatctcagaacccaagcatgcaaatagcagttatccgccatgtggtctctggaatattattacacaataccatatatgacgttgttcccctttctagcaagggtcttgctctggttcctttttgggatgaccgtcagggaaccataacaggcatgctcactgcatcagattttgttttaatcttgagaaagttgcagagaaacattcaagttattggcaacgaagagcccatttctgcttggaaagaagcaaagctacagttctatggtgggcctgatggtgctgtcatgcagagaacgccattaatccatacaggcaacattgatctcagggccaagaaagaagctcaactcggcatgcttcctgtttgaagcaagggcaacaaacttaccccaccagatctctgtcgccaaagcagggctagtgaataagctgtgtttcctcccggattgtcactgcttttatatttgtgcatttattttgagggaaacattttgcccaaaaaaggcctgcagtgcacgttttaaacaagtcatttgaaccaactcttatgctgaaaactgtatgtgatactgcagaaggcaacacactagcttgataggaaagttggttggcaagcataggtggactctggtgccttcatatatctatatatatattttaagttgacgatcttcgtgatgctgaaactgatgaagacctccgatgaaaaaagagacatgctgcacatgcacgagggtacttgcagatcgatgtcggctctatggacgaacactcgaccaagtcagatgaggagtatgagggcctagccatgcgcgacgtgatggctactggtccgacgatgagcagcaagctgtgagttaaagatgaactcacctgccctggagagtaacatccataggagtgaggcaaaatggctggtaccaccacaacatggacccgttcctgaagatgtccaaggaggtggtagccgacaccataatgtcttgtgtcattgtgtcaccggtcggcaacacactgcgctggtaccggcgggtgttgtgtttcttaggcgtctgcttctgtgctttgagttgtgctatagagtggttgtgccaactactgattttaaaagaaaaaggtgagctgagaatcattgttgaaaacaaacatgtaattgttcgttctcatcagttgtgccaactaccaagcatttcattgatcagaatttatcgttgctcatgagaaccaaaagtaagacacttctcaataacattggatgcaaatttctgctagcttatcttcactatcttttctcgtatcaatataacacacatttatacataatttttgtgttattatatgttttcgttgcaacgcacgggcactcacctagttatagaataaaaat

SEQ ID NO: 77231 - DNA, 2614 bp, Zea Mays
gctgtcaatcgcctccccactgcggcagatccgcaatccgctcctccaccaccgcgctcctcacccacgccagggacaagactgtctacctccacgcccgcctcaccaactccgcggccaccgccaccgccacgcccctcccccatggtcgtcgagtccgagtggtggaaccagcgacgcatgcgcgtcgagggcgacgtgaaataggtgctccaccgcgggcacaacgggcacagtggaggtggaacgagcaccatcgagttctggttccaccgaatccaccgctcgcacaccggatccatcgctcccacatgcccgcacaccggatccaccgctccctcccccgcgatggcctggttccaccgagacaactgcggggctagggtttggattcgtgggtggagcccaaggctagatccagcagggggagggaggtagaggaggggagggaactgctggtggtcggcagtgggcgaaggcgcgacaatccaggatatggattcctgagcgtcacccacccgcccatccacgtcgcgcggtgtagtcatcccctatccgcagccgcctcgctccctctcccacaacaaatccattctcctcctcccactcgacgaggatcgcgaggatgctggaggacgtcgtcgctgtcacgcttgacgttagggcctccgatgcttgacgttagggcctctcgcttgaagaggaacacaaacagagctcatgttttttattttgctctgcattatctactgcttctctgtgggggcgttatttacagtatgtggcctgtttgttgtgttgttcctgcggaagggcgggcgggccgaaggtgtttaagaaaatgttgttgtcaacatcaacctcctggaagggccagaacgcaggcagcgcctcaactcgtcaccccatcagcacggatgattatcacgagtacttcaagcgctcattttaggaagacatcgctgcgcaagtgcctcaaggagtggaatgtaccggtttttggttgatggtgtctggaggtgtgatgagacaaaaccctttgtacgtgatgaatatggactgatcagcaatgaagtgcttgtggaaaacaatgtactacccgttgtgcagccagagccttctatcagaggaactaatatggataagggtaccattttgaaaacaatgcccctggagccatcatctcagaacccaagcatgcaaatagcagttatccgccatgtggtctctggaatattattacacaataccatatatgacgttgttcccctttctagcaagggtcttgctctggttcctttttgggatgaccgtcagggaaccataacaggcatgctcactgcatcagattttgttttaatcttgagaaagttgcagagaaacattcaagttattggcaacgaagagcccatttctgcttggaaagaagcaaagctacagttctatggtgggcctgatggtgctgtcatgcagagaacgccattaatccatgtacttctccatatatttgctgattctttcatttgattcaatgtacaggcaacattgatctcagggccaagaaagaagctcaactcggcatgcttcctgtttgaagcaagggcaacaaacttaccccaccagatctctgtcgccaaagcagggctagtgaataagctgtgtttcctcccggattgtcactgcttttatatttgtgcatttattttgagggaaacattttgcccaaaaaaggcctgcagtgcacgttttaaacaagtcatttgaaccaactcttatgctgaaaactgtatgtgatactgcagaaggcaacacactagcttgataggaaagttggttggcaagcataggtggactctggtgccttcatatatctatatatatattttaagttgacgatcttcgtgatgctgaaactgatgaagacctccgatgaaaaaagagacatgctgcacatgcacgagggtacttgcagatcgatgtcggctctatggacgaacactcgaccaagtcagatgaggagtatgagggcctagccatgcgcgacgtgatggctactggtccgacgatgagcagcaagctgtgagttaaagatgaactcacctgccctggagagtaacatccataggagtgaggcaaaatggctggtaccaccacaacatggacccgttcctgaagatgtccaaggaggtggtagccgacaccataatgtcttgtgtcattgtgtcaccggtcggcaacacactgcgctggtaccggcgggtgttgtgtttcttaggcgtctgcttctgtgctttgagttgtgctatagagtggttgtgccaactactgattttaaaagaaaaaggtgagctgagaatcattgttgaaaacaaacatgtaattgttcgttctcatcagttgtgccaactaccaagcatttcattgatcagaatttatcgttgctcatgagaaccaaaagtaagacacttctcaataacattggatgcaaatttctgctagcttatcttcactatcttttctcgtatcaatataacacacatttatacataatttttgtgttattatatgttttcgttgcaacgcacgggcactcacctagttatagaataaaaat

SEQ ID NO: 77232 - DNA, 2734 bp, Zea Mays
gctgtcaatcgcctccccactgcggcagatccgcaatccgctcctccaccaccgcgctcctcacccacgccagggacaagactgtctacctccacgcccgcctcaccaactccgcggccaccgccaccgccacgcccctcccccatggtcgtcgagtccgagtggtggaaccagcgacgcatgcgcgtcgagggcgacgtgaaataggtgctccaccgcgggcacaacgggcacagtggaggtggaacgagcaccatcgagttctggttccaccgaatccaccgctcgcacaccggatccatcgctcccacatgcccgcacaccggatccaccgctccctcccccgcgatggcctggttccaccgagacaactgcggggctagggtttggattcgtgggtggagcccaaggctagatccagcagggggagggaggtagaggaggggagggaactgctggtggtcggcagtgggcgaaggcgcgacaatccaggatatggattcctgagcgtcacccacccgcccatccacgtcgcgcggtgtagtcatcccctatccgcagccgcctcgctccctctcccacaacaaatccattctcctcctcccactcgacgaggatcgcgaggatgctggaggacgtcgtcgctgtcacgcttgacgttagggcctccgatgcttgacgttagggcctctcgcttgaagaggaacacaaacagagctcatgttttttattttgctctgcattatctactgcttctctgtgggggcgttatttacagtatgtggcctgtttgttgtgttgttcctgcggaagggcgggcgggccgaaggtgtttaagaaaatgttgttgtcaacatcaacctcctggaagggccagaacgcaggcagcgcctcaactcgtcaccccatcagcacgatgctacttcatgtggagctggtatgtaggatgattatcacgagtacttcaagcgctcattttaggaagacatcgctgcgcaagtgcctcaaggagtggaatgtaccggtttttggttgatggtgtctggaggtgtgatgagacaaaaccctttgtacgtgatgaatatggactgatcagcaatgaagtgcttgtggaaaacaatgtactacccgttgtgcagccagagccttctatcagaggaactaatatggataaggatgcccctggagccatcatctcagaacccaagcatgcaaatagcagttatccgccatgtggtctctggaatattattacacaataccatatatgacgttgttcccctttctagcaagttaacagttttggacactcagcttcctgttaaacaagcatttaaaataatgcatgatgtgggtcttgctctggttcctttttgggatgaccgtcagggaaccataacaggcatgctcactgcatcagattttgttttaatcttgagaaagttgcagagaaacattcaagttattggcaacgaagagcccatttctgcttggaaagaagcaaagctacagttctatggtgggcctgatggtgctgtcatgcagagaacgccattaatccatgcaacattgatctcagggccaagaaagaagctcaactcggcatgcttcctgtttgaagcaagggcaacaaacttaccccaccagatctctgtcgccaaagcagggctagtgaataagctgtgtttcctcccggattgtcactgcttttatatttgtgcatttattttgagggaaacattttgcccaaaaaaggcctgcagtgcacgttttaaacaagtcatttgaaccaactcttatgctgaaaactgtatgtgatactgcagaaggcaacacactagcttgataggaaagttggttggcaagcataggtagtgtaaccacttcaccaatgatatcagtactcttcttgcctttaactcgtgcatctttaaatttagcctcttcaagtctggttctcatggcaggtggactctggtgccttcatatatctatatatatattttaagttgacgatcttcgtgatgctgaaactgatgaagacctccgatgaaaaaagagacatgctgcacatgcacgagggtacttgcagatcgatgtcggctctatggacgaacactcgaccaagtcagatgaggagtatgagggcctagccatgcgcgacgtgatggctactggtccgacgatgagcagcaagctgtgagttaaagatgaactcacctgccctggagagtaacatccataggagtgaggcaaaatggctggtaccaccacaacatggacccgttcctgaagatgtccaaggaggtggtagccgacaccataatgtcttgtgtcattgtgtcaccggtcggcaacacactgcgctggtaccggcgggtgttgtgtttcttaggcgtctgcttctgtgctttgagttgtgctatagagtggttgtgccaactactgattttaaaagaaaaaggtgagctgagaatcattgttgaaaacaaacatgtaattgttcgttctcatcagttgtgccaactaccaagcatttcattgatcagaatttatcgttgctcatgagaaccaaaagtaagacacttctcaataacattggatgcaaatttctgctagcttatcttcactatcttttctcgtatcaatataacacacatttatacataatttttgtgttattatatgttttcgttgcaacgcacgggcactcacctagttatagaataaaaat

SEQ ID NO: 77233 - DNA, 3746 bp, Zea Mays
gctgtcaatcgcctccccactgcggcagatccgcaatccgctcctccaccaccgcgctcctcacccacgccagggacaagactgtctacctccacgcccgcctcaccaactccgcggccaccgccaccgccacgcccctcccccatggtcgtcgagtccgagtggtggaaccagcgacgcatgcgcgtcgagggcgacgtgaaataggtgctccaccgcgggcacaacgggcacagtggaggtggaacgagcaccatcgagttctggttccaccgaatccaccgctcgcacaccggatccatcgctcccacatgcccgcacaccggatccaccgctccctcccccgcgatggcctggttccaccgagacaactgcggggctagggtttggattcgtgggtggagcccaaggctagatccagcagggggagggaggtagaggaggggagggaactgctggtggtcggcagtgggcgaaggcgcgacaatccaggatatggattcctgagcgtcacccacccgcccatccacgtcgcgcggtgtagtcatcccctatccgcagccgcctcgctccctctcccacaacaaatccattctcctcctcccactcgacgaggatcgcgaggatgctggaggacgtcgtcgctgtcacgcttgacgttagggcctccgatgcttgacgttagggcctctcgcttgaagaggaacacaaacagagctcatgttttttattttgctctgcattatctactgcttctctgtgggggcgttatttacagtatgtggcctgtttgttgtgttgttcctgcggaagggcgggcgggccgaaggtgtttaagaaaatgttgttgtcaacatcaacctcctggaagggccagaacgcaggcagcgcctcaactcgtcaccccatcagcacggtgagccccttatctggattgttatcatggtacgcggtgcgctgcaagcctgcaagtgacatcaaattggattggtagtcagcgggtgtcatagtgtcagttcgatggaatggttctgcagtgcatgtgcttctgtaatttccgcaagaagcagtcaacttctccctgatatggcactaggacattgtagtgattcccgcacgtttgtggaactcgacaacctaccagagcgccagatgtttcattgagaagagaactcctccagtctggctttccactggtctagtctctcctttaaaccaaatttgataccactcattgaagtcaatagctgggatgtagacatgtgaaaccacacctgtggaactttcagcgtgtgatgactgggtcactggtggaataccgtgttttttgagctgctcgctttcagttcgcggtcatagtcctgtgttttttgccttcagtttcttgatgtagttattgcctaaaatttctatatcttgttcatcgtactggagatgctacttcatgtggagctggtatgtaggatgattatcacgagtacttcaagcgctcattttaggaagacatcgctgcgcaagtgcctcaaggagtggaatggtgagcccctgtccatctactgaacagagaaaataccaggagcaaatgactgcatttttagttaatccttttattcctaaattaattgtgtttgttaatgcttttattcctaaaataagtaaccgagctcgggattcttcgcaatttgatttgcgagatcacccccataaaggcatcatgaatctttatgcctgtaaagacatcccactgtctctttcgttttcgataagatgttttggccgttacataatgcctgtaaggtagaatgccattgcagttgttgcatcagaaagcagccatttaacgccattgtaaagtgagtgatgattaaatacaaccacacttctgtctctcaggtttctgtacatggagtttttattgcacctcttcttccccagcaattagtacttgcagttagactaaatgaatcttgaatgccccttaactgttggctttacatggaactacttttgcatataccagacaactattttgaacttcaatatgtttttcaattccagcaattgatcgaaacatgatatatttgacatattcatgatggatttttgtatttgatgtgtcgctttttcatctatcaatgtaattcttggacataacattgcgcacagtaccggtttttggttgatggtgtctggaggtgtgatgagacaaaaccctttgtacgtgatgaatatggactgatcagcaatgaagtgcttgtggaaaacaatgtactacccgttgtgcagccagagccttctatcagaggaactaatatggataagggtaccattttgaaaacaatgcccctggagccatcatctcagaacccaagcatgcaaatagcagttatccgccatgtggtctctggaatattattacacaataccatatatgacgttgttcccctttctagcaagggtcttgctctggttcctttttgggatgaccgtcagggaaccataacaggcatgctcactgcatcagattttgttttaatcttgagaaagttgcagagaaacattcaagttattggcaacgaagagcccatttctgcttggaaagaagcaaagctacagttctatggtgggcctgatggtgctgtcatgcagagaacgccattaatccatacaggcaacattgatctcagggccaagaaagaagctcaactcggcatgcttcctgtttgaagcaagggcaacaaacttaccccaccagatctctgtcgccaaagcagggctagtgaataagctgtgtttcctcccggattgtcactgcttttatatttgtgcatttattttgagggaaacattttgcccaaaaaaggcctgcagtgcacgttttaaacaagtcatttgaaccaactcttatgctgaaaactgtatgtgatactgcagaaggcaacacactagcttgataggaaagttggttggcaagcataggtggactctggtgccttcatatatctatatatatattttaagttgacgatcttcgtgatgctgaaactgatgaagacctccgatgaaaaaagagacatgctgcacatgcacgagggtacttgcagatcgatgtcggctctatggacgaacactcgaccaagtcagatgaggagtatgagggcctagccatgcgcgacgtgatggctactggtccgacgatgagcagcaagctgtgagttaaagatgaactcacctgccctggagagtaacatccataggagtgaggcaaaatggctggtaccaccacaacatggacccgttcctgaagatgtccaaggaggtggtagccgacaccataatgtcttgtgtcattgtgtcaccggtcggcaacacactgcgctggtaccggcgggtgttgtgtttcttaggcgtctgcttctgtgctttgagttgtgctatagagtggttgtgccaactactgattttaaaagaaaaaggtgagctgagaatcattgttgaaaacaaacatgtaattgttcgttctcatcagttgtgccaactaccaagcatttcattgatcagaatttatcgttgctcatgagaaccaaaagtaagacacttctcaataacattggatgcaaatttctgctagcttatcttcactatcttttctcgtatcaatataacacacatttatacataatttttgtgttattatatgttttcgttgcaacgcacgggcactcacctagttatagaataaaaat

SEQ ID NO: 77234 - DNA, 2859 bp, Zea Mays
gctgtcaatcgcctccccactgcggcagatccgcaatccgctcctccaccaccgcgctcctcacccacgccagggacaagactgtctacctccacgcccgcctcaccaactccgcggccaccgccaccgccacgcccctcccccatggtcgtcgagtccgagtggtggaaccagcgacgcatgcgcgtcgagggcgacgtgaaataggtgctccaccgcgggcacaacgggcacagtggaggtggaacgagcaccatcgagttctggttccaccgaatccaccgctcgcacaccggatccatcgctcccacatgcccgcacaccggatccaccgctccctcccccgcgatggcctggttccaccgagacaactgcggggctagggtttggattcgtgggtggagcccaaggctagatccagcagggggagggaggtagaggaggggagggaactgctggtggtcggcagtgggcgaaggcgcgacaatccaggatatggattcctgagcgtcacccacccgcccatccacgtcgcgcggtgtagtcatcccctatccgcagccgcctcgctccctctcccacaacaaatccattctcctcctcccactcgacgaggatcgcgaggatgctggaggacgtcgtcgctgtcacgcttgacgttagggcctccgatgcttgacgttagggcctctcgcttgaagaggaacacaaacagagctcatgttttttattttgctctgcattatctactgcttctctgtgggggcgttatttacagtatgtggcctgtttgttgtgttgttcctgcggaagggcgggcgggccgaaggtgtttaagaaaatgttgttgtcaacatcaacctcctggaagggccagaacgcaggcagcgcctcaactcgtcaccccatcagcacggatgattatcacgagtacttcaagcgctcattttaggaagacatcgctgcgcaagtgcctcaaggagtggaatgcaattgatcgaaacatgatatatttgacatattcatgatggatttttgtatttgatgtgtcgctttttcatctatcaatgtaattcttggacataacattgcgcacaggtaccaaattcacacccttgttattgcgagttctgtaaatcatgatgttcacatgtgatggtttgattcagttcaatggttagcaagctatttgaacatgatactatagtagtgcatatttgctgtacaaatggccactgcccagctatttgcataagatattatgtttctcctgtgacattttctatgccacatacatttatatggcatttttgtgcaatttagtaccggtttttggttgatggtgtctggaggtgtgatgagacaaaaccctttgtacgtgatgaatatggactgatcagcaatgaagtgcttgtggaaaacaatgtactacccgttgtgcagccagagccttctatcagaggaactaatatggataaggatgcccctggagccatcatctcagaacccaagcatgcaaatagcagttatccgccatgtggtctctggaatattattacacaataccatatatgacgttgttcccctttctagcaagggaaccataacaggcatgctcactgcatcagattttgttttaatcttgagaaagttgcagagaaacattcaagttattggcaacgaagagcccatttctgcttggaaagaagcaaagctacagttctatggtgggcctgatggtgctgtcatgcagagaacgccattaatccattttgtacagacaggcaacattgatctcagggccaagaaagaagctcaactcggcatgcttcctgtttgaagcaagggcaacaaacttaccccaccagatctctgtcgccaaagcagggctagtgaataagctgtgtttcctcccggattgtcactgcttttatatttgtgcatttattttgagggaaacattttgcccaaaaaaggcctgcagtgcacgttttaaacaagtcatttgaaccaactcttatgctgaaaactgtatgtgatactgcagaaggcaacacactagcttgataggaaagttggttggcaagcataggtggactctggtgccttcatatatctatatatatattttaagttgacgatcttcgtgatgctgaaactgatgaagacctccgatgaaaaaagagacatgctgcacatgcacgagggtacttgcagatcgatgtcggctctatggacgaacactcgaccaagtcagatgaggagtatgagggcctagccatgcgcgacgtgatggctactggtccgacgatgagcagcaagctgtgagttaaagatgaactcacctgccctggagagtaacatccataggagtgaggcaaaatggctggtaccaccacaacatggacccgttcctgaagatgtccaaggaggtggtagccgacaccataatgtcttgtgtcattgtgtcaccggtcggcaacacactgcgctggtaccggcgggtgttgtgtttcttaggcgtctgcttctgtgctttgagttgtgctatagagtggttgtgccaactactgattttaaaagaaaaaggtgagctgagaatcattgttgaaaacaaacatgtaattgttcgttctcatcagttgtgccaactaccaagcatttcattgatcagaatttatcgttgctcatgagaaccaaaagtaagacacttctcaataacattggatgcaaatttctgctagcttatcttcactatcttttctcgtatcaatataacacacatttatacataatttttgtgttattatatgttttcgttgcaacgcacgggcactcacctagttatagaataaaaat

SEQ ID NO: 77235 - DNA, 2685 bp, Zea Mays
gctgtcaatcgcctccccactgcggcagatccgcaatccgctcctccaccaccgcgctcctcacccacgccagggacaagactgtctacctccacgcccgcctcaccaactccgcggccaccgccaccgccacgcccctcccccatggtcgtcgagtccgagtggtggaaccagcgacgcatgcgcgtcgagggcgacgtgaaataggtgctccaccgcgggcacaacgggcacagtggaggtggaacgagcaccatcgagttctggttccaccgaatccaccgctcgcacaccggatccatcgctcccacatgcccgcacaccggatccaccgctccctcccccgcgatggcctggttccaccgagacaactgcggggctagggtttggattcgtgggtggagcccaaggctagatccagcagggggagggaggtagaggaggggagggaactgctggtggtcggcagtgggcgaaggcgcgacaatccaggatatggattcctgagcgtcacccacccgcccatccacgtcgcgcggtgtagtcatcccctatccgcagccgcctcgctccctctcccacaacaaatccattctcctcctcccactcgacgaggatcgcgaggatgctggaggacgtcgtcgctgtcacgcttgacgttagggcctccgatgcttgacgttagggcctctcgcttgaagaggaacacaaacagagctcatgttttttattttgctctgcattatctactgcttctctgtgggggcgttatttacagtatgtggcctgtttgttgtgttgttcctgcggaagggcgggcgggccgaaggtgtttaagaaaatgttgttgtcaacatcaacctcctggaagggccagaacgcaggcagcgcctcaactcgtcaccccatcagcacgatgctacttcatgtggagctggtatgtaggatgattatcacgagtacttcaagcgctcattttaggaagacatcgctgcgcaagtgcctcaaggagtggaatgtaccggtttttggttgatggtgtctggaggtgtgatgagacaaaaccctttgtacgtgatgaatatggactgatcagcaatgaagtgcttgtggaaaacaatgtactacccgttgtgcagccagagccttctatcagaggaactaatatggataagggtaccattttgaaaacaatgcccctggagccatcatctcagaacccaagcatgcaaatagcagttatccgccatgtggtctctggaatattattacacaataccatatatgacgttgttcccctttctagcaagttaacagttttggacactcagcttcctgttaaacaagcatttaaaataatgcatgatgtgggtcttgctctggttcctttttgggatgaccgtcagggaaccataacaggcatgctcactgcatcagattttgttttaatcttgagaaagttgcagagaaacattcaagttattggcaacgaagagcccatttctgcttggaaagaagcaaagctacagttctatggtgggcctgatggtgctgtcatgcagagaacgccattaatccattttgtacagacaggcaacattgatctcagggccaagaaagaagctcaactcggcatgcttcctgtttgaagcaagggcaacaaacttaccccaccagatctctgtcgccaaagcagggctagtgaataagctgtgtttcctcccggattgtcactgcttttatatttgtgcatttattttgagggaaacattttgcccaaaaaaggcctgcagtgcacgttttaaacaagtcatttgaaccaactcttatgctgaaaactgtatgtgatactgcagaaggcaacacactagcttgataggaaagttggttggcaagcatagtctggttctcatggcaggtggactctggtgccttcatatatctatatatatattttaagttgacgatcttcgtgatgctgaaactgatgaagacctccgatgaaaaaagagacatgctgcacatgcacgagggtacttgcagatcgatgtcggctctatggacgaacactcgaccaagtcagatgaggagtatgagggcctagccatgcgcgacgtgatggctactggtccgacgatgagcagcaagctgtgagttaaagatgaactcacctgccctggagagtaacatccataggagtgaggcaaaatggctggtaccaccacaacatggacccgttcctgaagatgtccaaggaggtggtagccgacaccataatgtcttgtgtcattgtgtcaccggtcggcaacacactgcgctggtaccggcgggtgttgtgtttcttaggcgtctgcttctgtgctttgagttgtgctatagagtggttgtgccaactactgattttaaaagaaaaaggtgagctgagaatcattgttgaaaacaaacatgtaattgttcgttctcatcagttgtgccaactaccaagcatttcattgatcagaatttatcgttgctcatgagaaccaaaagtaagacacttctcaataacattggatgcaaatttctgctagcttatcttcactatcttttctcgtatcaatataacacacatttatacataatttttgtgttattatatgttttcgttgcaacgcacgggcactcacctagttatagaataaaaat

SEQ ID NO: 77236 - DNA, 2591 bp, Zea Mays
gctgtcaatcgcctccccactgcggcagatccgcaatccgctcctccaccaccgcgctcctcacccacgccagggacaagactgtctacctccacgcccgcctcaccaactccgcggccaccgccaccgccacgcccctcccccatggtcgtcgagtccgagtggtggaaccagcgacgcatgcgcgtcgagggcgacgtgaaataggtgctccaccgcgggcacaacgggcacagtggaggtggaacgagcaccatcgagttctggttccaccgaatccaccgctcgcacaccggatccatcgctcccacatgcccgcacaccggatccaccgctccctcccccgcgatggcctggttccaccgagacaactgcggggctagggtttggattcgtgggtggagcccaaggctagatccagcagggggagggaggtagaggaggggagggaactgctggtggtcggcagtgggcgaaggcgcgacaatccaggatatggattcctgagcgtcacccacccgcccatccacgtcgcgcggtgtagtcatcccctatccgcagccgcctcgctccctctcccacaacaaatccattctcctcctcccactcgacgaggatcgcgaggatgctggaggacgtcgtcgctgtcacgcttgacgttagggcctccgatgcttgacgttagggcctctcgcttgaagaggaacacaaacagagctcatgttttttattttgctctgcattatctactgcttctctgtgggggcgttatttacagtatgtggcctgtttgttgtgttgttcctgcggaagggcgggcgggccgaaggtgtttaagaaaatgttgttgtcaacatcaacctcctggaagggccagaacgcaggcagcgcctcaactcgtcaccccatcagcacgatgctacttcatgtggagctggtatgtaggatgattatcacgagtacttcaagcgctcattttaggaagacatcgctgcgcaagtgcctcaaggagtggaatgtaccggtttttggttgatggtgtctggaggtgtgatgagacaaaaccctttgtacgtgatgaatatggactgatcagcaatgaagtgcttgtggaaaacaatgtactacccgttgtgcagccagagccttctatcagaggaactaatatggataaggatgcccctggagccatcatctcagaacccaagcatgcaaatagcagttatccgccatgtggtctctggaatattattacacaataccatatatgacgttgttcccctttctagcaagggtcttgctctggttcctttttgggatgaccgtcagggaaccataacaggcatgctcactgcatcagattttgttttaatcttgagaaagttgcagagaaacattcaagttattggcaacgaagagcccatttctgcttggaaagaagcaaagctacagttctatggtgggcctgatggtgctgtcatgcagagaacgccattaatccattttgtacagacaggcaacattgatctcagggccaagaaagaagctcaactcggcatgcttcctgtttgaagcaagggcaacaaacttaccccaccagatctctgtcgccaaagcagggctagtgaataagctgtgtttcctcccggattgtcactgcttttatatttgtgcatttattttgagggaaacattttgcccaaaaaaggcctgcagtgcacgttttaaacaagtcatttgaaccaactcttatgctgaaaactgtatgtgatactgcagaaggcaacacactagcttgataggaaagttggttggcaagcataggtggactctggtgccttcatatatctatatatatattttaagttgacgatcttcgtgatgctgaaactgatgaagacctccgatgaaaaaagagacatgctgcacatgcacgagggtacttgcagatcgatgtcggctctatggacgaacactcgaccaagtcagatgaggagtatgagggcctagccatgcgcgacgtgatggctactggtccgacgatgagcagcaagctgtgagttaaagatgaactcacctgccctggagagtaacatccataggagtgaggcaaaatggctggtaccaccacaacatggacccgttcctgaagatgtccaaggaggtggtagccgacaccataatgtcttgtgtcattgtgtcaccggtcggcaacacactgcgctggtaccggcgggtgttgtgtttcttaggcgtctgcttctgtgctttgagttgtgctatagagtggttgtgccaactactgattttaaaagaaaaaggtgagctgagaatcattgttgaaaacaaacatgtaattgttcgttctcatcagttgtgccaactaccaagcatttcattgatcagaatttatcgttgctcatgagaaccaaaagtaagacacttctcaataacattggatgcaaatttctgctagcttatcttcactatcttttctcgtatcaatataacacacatttatacataatttttgtgttattatatgttttcgttgcaacgcacgggcactcacctagttatagaataaaaat

SEQ ID NO: 77237 - DNA, 2579 bp, Zea Mays
gctgtcaatcgcctccccactgcggcagatccgcaatccgctcctccaccaccgcgctcctcacccacgccagggacaagactgtctacctccacgcccgcctcaccaactccgcggccaccgccaccgccacgcccctcccccatggtcgtcgagtccgagtggtggaaccagcgacgcatgcgcgtcgagggcgacgtgaaataggtgctccaccgcgggcacaacgggcacagtggaggtggaacgagcaccatcgagttctggttccaccgaatccaccgctcgcacaccggatccatcgctcccacatgcccgcacaccggatccaccgctccctcccccgcgatggcctggttccaccgagacaactgcggggctagggtttggattcgtgggtggagcccaaggctagatccagcagggggagggaggtagaggaggggagggaactgctggtggtcggcagtgggcgaaggcgcgacaatccaggatatggattcctgagcgtcacccacccgcccatccacgtcgcgcggtgtagtcatcccctatccgcagccgcctcgctccctctcccacaacaaatccattctcctcctcccactcgacgaggatcgcgaggatgctggaggacgtcgtcgctgtcacgcttgacgttagggcctccgatgcttgacgttagggcctctcgcttgaagaggaacacaaacagagctcatgttttttattttgctctgcattatctactgcttctctgtgggggcgttatttacagtatgtggcctgtttgttgtgttgttcctgcggaagggcgggcgggccgaaggtgtttaagaaaatgttgttgtcaacatcaacctcctggaagggccagaacgcaggcagcgcctcaactcgtcaccccatcagcacggatgattatcacgagtacttcaagcgctcattttaggaagacatcgctgcgcaagtgcctcaaggagtggaatgtaccggtttttggttgatggtgtctggaggtgtgatgagacaaaaccctttgtacgtgatgaatatggactgatcagcaatgaagtgcttgtggaaaacaatgtactacccgttgtgcagccagagccttctatcagaggaactaatatggataagggtaccattttgaaaacaatgcccctggagccatcatctcagaacccaagcatgcaaatagcagttatccgccatgtggtctctggaatattattacacaataccatatatgacgttgttcccctttctagcaagggtcttgctctggttcctttttgggatgaccgtcagggaaccataacaggcatgctcactgcatcagattttgttttaatcttgagaaagttgcagagaaacattcaagttattggcaacgaagagcccatttctgcttggaaagaagcaaagctacagttctatggtgggcctgatggtgctgtcatgcagagaacgccattaatccattttgtacagacaggcaacattgatctcagggccaagaaagaagctcaactcggcatgcttcctgtttgaagcaagggcaacaaacttaccccaccagatctctgtcgccaaagcagggctagtgaataagctgtgtttcctcccggattgtcactgcttttatatttgtgcatttattttgagggaaacattttgcccaaaaaaggcctgcagtgcacgttttaaacaagtcatttgaaccaactcttatgctgaaaactgtatgtgatactgcagaaggcaacacactagcttgataggaaagttggttggcaagcataggtggactctggtgccttcatatatctatatatatattttaagttgacgatcttcgtgatgctgaaactgatgaagacctccgatgaaaaaagagacatgctgcacatgcacgagggtacttgcagatcgatgtcggctctatggacgaacactcgaccaagtcagatgaggagtatgagggcctagccatgcgcgacgtgatggctactggtccgacgatgagcagcaagctgtgagttaaagatgaactcacctgccctggagagtaacatccataggagtgaggcaaaatggctggtaccaccacaacatggacccgttcctgaagatgtccaaggaggtggtagccgacaccataatgtcttgtgtcattgtgtcaccggtcggcaacacactgcgctggtaccggcgggtgttgtgtttcttaggcgtctgcttctgtgctttgagttgtgctatagagtggttgtgccaactactgattttaaaagaaaaaggtgagctgagaatcattgttgaaaacaaacatgtaattgttcgttctcatcagttgtgccaactaccaagcatttcattgatcagaatttatcgttgctcatgagaaccaaaagtaagacacttctcaataacattggatgcaaatttctgctagcttatcttcactatcttttctcgtatcaatataacacacatttatacataatttttgtgttattatatgttttcgttgcaacgcacgggcactcacctagttatagaataaaaat

SEQ ID NO: 77238 - DNA, 2630 bp, Zea Mays
gctgtcaatcgcctccccactgcggcagatccgcaatccgctcctccaccaccgcgctcctcacccacgccagggacaagactgtctacctccacgcccgcctcaccaactccgcggccaccgccaccgccacgcccctcccccatggtcgtcgagtccgagtggtggaaccagcgacgcatgcgcgtcgagggcgacgtgaaataggtgctccaccgcgggcacaacgggcacagtggaggtggaacgagcaccatcgagttctggttccaccgaatccaccgctcgcacaccggatccatcgctcccacatgcccgcacaccggatccaccgctccctcccccgcgatggcctggttccaccgagacaactgcggggctagggtttggattcgtgggtggagcccaaggctagatccagcagggggagggaggtagaggaggggagggaactgctggtggtcggcagtgggcgaaggcgcgacaatccaggatatggattcctgagcgtcacccacccgcccatccacgtcgcgcggtgtagtcatcccctatccgcagccgcctcgctccctctcccacaacaaatccattctcctcctcccactcgacgaggatcgcgaggatgctggaggacgtcgtcgctgtcacgcttgacgttagggcctccgatgcttgacgttagggcctctcgcttgaagaggaacacaaacagagctcatgttttttattttgctctgcattatctactgcttctctgtgggggcgttatttacagtatgtggcctgtttgttgtgttgttcctgcggaagggcgggcgggccgaaggtgtttaagaaaatgttgttgtcaacatcaacctcctggaagggccagaacgcaggcagcgcctcaactcgtcaccccatcagcacggatgattatcacgagtacttcaagcgctcattttaggaagacatcgctgcgcaagtgcctcaaggagtggaatgtaccggtttttggttgatggtgtctggaggtgtgatgagacaaaaccctttgtacgtgatgaatatggactgatcagcaatgaagtgcttgtggaaaacaatgtactacccgttgtgcagccagagccttctatcagaggaactaatatggataagggtaccattttgaaaacaatgcccctggagccatcatctcagaacccaagcatgcaaatagcagttatccgccatgtggtctctggaatattattacacaataccatatatgacgttgttcccctttctagcaagttaacagttttggacactcagcttcctgttaaacaagcatttaaaataatgcatgatgtgggtcttgctctggttcctttttgggatgaccgtcagggaaccataacaggcatgctcactgcatcagattttgttttaatcttgagaaagttgcagagaaacattcaagttattggcaacgaagagcccatttctgcttggaaagaagcaaagctacagttctatggtgggcctgatggtgctgtcatgcagagaacgccattaatccatacaggcaacattgatctcagggccaagaaagaagctcaactcggcatgcttcctgtttgaagcaagggcaacaaacttaccccaccagatctctgtcgccaaagcagggctagtgaataagctgtgtttcctcccggattgtcactgcttttatatttgtgcatttattttgagggaaacattttgcccaaaaaaggcctgcagtgcacgttttaaacaagtcatttgaaccaactcttatgctgaaaactgtatgtgatactgcagaaggcaacacactagcttgataggaaagttggttggcaagcataggtggactctggtgccttcatatatctatatatatattttaagttgacgatcttcgtgatgctgaaactgatgaagacctccgatgaaaaaagagacatgctgcacatgcacgagggtacttgcagatcgatgtcggctctatggacgaacactcgaccaagtcagatgaggagtatgagggcctagccatgcgcgacgtgatggctactggtccgacgatgagcagcaagctgtgagttaaagatgaactcacctgccctggagagtaacatccataggagtgaggcaaaatggctggtaccaccacaacatggacccgttcctgaagatgtccaaggaggtggtagccgacaccataatgtcttgtgtcattgtgtcaccggtcggcaacacactgcgctggtaccggcgggtgttgtgtttcttaggcgtctgcttctgtgctttgagttgtgctatagagtggttgtgccaactactgattttaaaagaaaaaggtgagctgagaatcattgttgaaaacaaacatgtaattgttcgttctcatcagttgtgccaactaccaagcatttcattgatcagaatttatcgttgctcatgagaaccaaaagtaagacacttctcaataacattggatgcaaatttctgctagcttatcttcactatcttttctcgtatcaatataacacacatttatacataatttttgtgttattatatgttttcgttgcaacgcacgggcactcacctagttatagaataaaaat

SEQ ID NO: 77239 - DNA, 3249 bp, Zea Mays
gctgtcaatcgcctccccactgcggcagatccgcaatccgctcctccaccaccgcgctcctcacccacgccagggacaagactgtctacctccacgcccgcctcaccaactccgcggccaccgccaccgccacgcccctcccccatggtcgtcgagtccgagtggtggaaccagcgacgcatgcgcgtcgagggcgacgtgaaataggtgctccaccgcgggcacaacgggcacagtggaggtggaacgagcaccatcgagttctggttccaccgaatccaccgctcgcacaccggatccatcgctcccacatgcccgcacaccggatccaccgctccctcccccgcgatggcctggttccaccgagacaactgcggggctagggtttggattcgtgggtggagcccaaggctagatccagcagggggagggaggtagaggaggggagggaactgctggtggtcggcagtgggcgaaggcgcgacaatccaggatatggattcctgaggttacttcattcgctttgtgctctcccgcgttcttgattcattcgcttttgtgttctccctaaacctttacgcctgccctgcctggcagcgtcacccacccgcccatccacgtcgcgcggtgtagtcatcccctatccgcagccgcctcgctccctctcccacaacaaatccattctcctcctcccactcgacgaggatcgcgaggatgctggaggacgtcgtcgctgtcacgcttgacgttagggcctccgatgcttgacgttagggcctctcgcttgaagaggaacacaaacagagctcatgttttttattttgctctgcattatctactgcttctctgtgggggcgttatttacagtatgtggcctgtttgttgtgttgttcctgcggaagggcgggcgggccgaaggtgtttaagaaaatgttgttgtcaacatcaacctcctggaagggccagaacgcaggcagcgcctcaactcgtcaccccatcagcacggtgagccccttatctggattgttatcatggtacgcggtgcgctgcaagcctgcaagtgacatcaaattggattggtagtcagcgggtgtcatagtgtcagttcgatggaatggttctgcagtgcatgtgcttctgtaatttccgcaagaagcagtcaacttctccctgatatggcactaggacattgtagtgattcccgcacgtttgtggaactcgacaacctaccagagcgccagatgtttcattgagaagagaactcctccagtctggctttccactggtctagtctctcctttaaaccaaatttgataccactcattgaagtcaatagctgggatgtagacatgtgaaaccacacctgtggaactttcagcgtgtgatgactgggtcactggtggaataccgtgttttttgagctgctcgctttcagttcgcggtcatagtcctgtgttttttgccttcagtttcttgatgtagttattgcctaaaatttctatatcttgttcatcgtactggagatgctacttcatgtggagctggtatgtaggatgattatcacgagtacttcaagcgctcattttaggaagacatcgctgcgcaagtgcctcaaggagtggaatgtaccggtttttggttgatggtgtctggaggtgtgatgagacaaaaccctttgtacgtgatgaatatggactgatcagcaatgaagtgcttgtggaaaacaatgtactacccgttgtgcagccagagccttctatcagaggaactaatatggataaggatgcccctggagccatcatctcagaacccaagcatgcaaatagcagttatccgccatgtggtctctggaatattattacacaataccatatatgacgttgttcccctttctagcaagttaacagttttggacactcagcttcctgttaaacaagcatttaaaataatgcatgatgtgggtcttgctctggttcctttttgggatgaccgtcagggaaccataacaggcatgctcactgcatcagattttgttttaatcttgagaaagttgcagagaaacattcaagttattggcaacgaagagcccatttctgcttggaaagaagcaaagctacagttctatggtgggcctgatggtgctgtcatgcagagaacgccattaatccatacaggcaacattgatctcagggccaagaaagaagctcaactcggcatgcttcctgtttgaagcaagggcaacaaacttaccccaccagatctctgtcgccaaagcagggctagtgaataagctgtgtttcctcccggattgtcactgcttttatatttgtgcatttattttgagggaaacattttgcccaaaaaaggcctgcagtgcacgttttaaacaagtcatttgaaccaactcttatgctgaaaactgtatgtgatactgcagaaggcaacacactagcttgataggaaagttggttggcaagcataggtggactctggtgccttcatatatctatatatatattttaagttgacgatcttcgtgatgctgaaactgatgaagacctccgatgaaaaaagagacatgctgcacatgcacgagggtacttgcagatcgatgtcggctctatggacgaacactcgaccaagtcagatgaggagtatgagggcctagccatgcgcgacgtgatggctactggtccgacgatgagcagcaagctgtgagttaaagatgaactcacctgccctggagagtaacatccataggagtgaggcaaaatggctggtaccaccacaacatggacccgttcctgaagatgtccaaggaggtggtagccgacaccataatgtcttgtgtcattgtgtcaccggtcggcaacacactgcgctggtaccggcgggtgttgtgtttcttaggcgtctgcttctgtgctttgagttgtgctatagagtggttgtgccaactactgattttaaaagaaaaaggtgagctgagaatcattgttgaaaacaaacatgtaattgttcgttctcatcagttgtgccaactaccaagcatttcattgatcagaatttatcgttgctcatgagaaccaaaagtaagacacttctcaataacattggatgcaaatttctgctagcttatcttcactatcttttctcgtatcaatataacacacatttatacataatttttgtgttattatatgttttcgttgcaacgcacgggcactcacctagttatagaataaaaat

SEQ ID NO: 77240 - DNA, 3111 bp, Zea Mays
gctgtcaatcgcctccccactgcggcagatccgcaatccgctcctccaccaccgcgctcctcacccacgccagggacaagactgtctacctccacgcccgcctcaccaactccgcggccaccgccaccgccacgcccctcccccatggtcgtcgagtccgagtggtggaaccagcgacgcatgcgcgtcgagggcgacgtgaaataggtgctccaccgcgggcacaacgggcacagtggaggtggaacgagcaccatcgagttctggttccaccgaatccaccgctcgcacaccggatccatcgctcccacatgcccgcacaccggatccaccgctccctcccccgcgatggcctggttccaccgagacaactgcggggctagggtttggattcgtgggtggagcccaaggctagatccagcagggggagggaggtagaggaggggagggaactgctggtggtcggcagtgggcgaaggcgcgacaatccaggatatggattcctgagggcgggcgggccgaaggtgtttaagaaaatgttgttgtcaacatcaacctcctggaagggccagaacgcaggcagcgcctcaactcgtcaccccatcagcacggatgattatcacgagtacttcaagcgctcattttaggaagacatcgctgcgcaagtgcctcaaggagtggaatggtgagcccctgtccatctactgaacagagaaaataccaggagcaaatgactgcatttttagttaatccttttattcctaaattaattgtgtttgttaatgcttttattcctaaaataagtaaccgagctcgggattcttcgcaatttgatttgcgagatcacccccataaaggcatcatgaatctttatgcctgtaaagacatcccactgtctctttcgttttcgataagatgttttggccgttacataatgcctgtaaggtagaatgccattgcagttgttgcatcagaaagcagccatttaacgccattgtaaagtgagtgatgattaaatacaaccacacttctgtctctcaggtttctgtacatggagtttttattgcacctcttcttccccagcaattagtacttgcagttagactaaatgaatcttgaatgccccttaactgttggctttacatggaactacttttgcatataccagacaactattttgaacttcaatatgtttttcaattccagcaattgatcgaaacatgatatatttgacatattcatgatggatttttgtatttgatgtgtcgctttttcatctatcaatgtaattcttggacataacattgcgcacaggtaccaaattcacacccttgttattgcgagttctgtaaatcatgatgttcacatgtgatggtttgattcagttcaatggttagcaagctatttgaacatgatactatagtagtgcatatttgctgtacaaatggccactgcccagctatttgcataagatattatgtttctcctgtgacattttctatgccacatacatttatatggcatttttgtgcaatttagtaccggtttttggttgatggtgtctggaggtgtgatgagacaaaaccctttgtacgtgatgaatatggactgatcagcaatgaagtgcttgtggaaaacaatgtactacccgttgtgcagccagagccttctatcagaggaactaatatggataaggatgcccctggagccatcatctcagaacccaagcatgcaaatagcagttatccgccatgtggtctctggaatattattacacaataccatatatgacgttgttcccctttctagcaagggtcttgctctggttcctttttgggatgaccgtcagggaaccataacaggcatgctcactgcatcagattttgttttaatcttgagaaagttgcagagaaacattcaagttattggcaacgaagagcccatttctgcttggaaagaagcaaagctacagttctatggtgggcctgatggtgctgtcatgcagagaacgccattaatccattttgtacagacaggcaacattgatctcagggccaagaaagaagctcaactcggcatgcttcctgtttgaagcaagggcaacaaacttaccccaccagatctctgtcgccaaagcagggctagtgaataagctgtgtttcctcccggattgtcactgcttttatatttgtgcatttattttgagggaaacattttgcccaaaaaaggcctgcagtgcacgttttaaacaagtcatttgaaccaactcttatgctgaaaactgtatgtgatactgcagaaggcaacacactagcttgataggaaagttggttggcaagcataggtggactctggtgccttcatatatctatatatatattttaagttgacgatcttcgtgatgctgaaactgatgaagacctccgatgaaaaaagagacatgctgcacatgcacgagggtacttgcagatcgatgtcggctctatggacgaacactcgaccaagtcagatgaggagtatgagggcctagccatgcgcgacgtgatggctactggtccgacgatgagcagcaagctgtgagttaaagatgaactcacctgccctggagagtaacatccataggagtgaggcaaaatggctggtaccaccacaacatggacccgttcctgaagatgtccaaggaggtggtagccgacaccataatgtcttgtgtcattgtgtcaccggtcggcaacacactgcgctggtaccggcgggtgttgtgtttcttaggcgtctgcttctgtgctttgagttgtgctatagagtggttgtgccaactactgattttaaaagaaaaaggtgagctgagaatcattgttgaaaacaaacatgtaattgttcgttctcatcagttgtgccaactaccaagcatttcattgatcagaatttatcgttgctcatgagaaccaaaagtaagacacttctcaataacattggatgcaaatttctgctagcttatcttcactatcttttctcgtatcaatataacacacatttatacataatttttgtgttattatatgttttcgttgcaacgcacgggcactcacctagttatagaataaaaat

SEQ ID NO: 77241 - DNA, 2562 bp, Zea Mays
gctgtcaatcgcctccccactgcggcagatccgcaatccgctcctccaccaccgcgctcctcacccacgccagggacaagactgtctacctccacgcccgcctcaccaactccgcggccaccgccaccgccacgcccctcccccatggtcgtcgagtccgagtggtggaaccagcgacgcatgcgcgtcgagggcgacgtgaaataggtgctccaccgcgggcacaacgggcacagtggaggtggaacgagcaccatcgagttctggttccaccgaatccaccgctcgcacaccggatccatcgctcccacatgcccgcacaccggatccaccgctccctcccccgcgatggcctggttccaccgagacaactgcggggctagggtttggattcgtgggtggagcccaaggctagatccagcagggggagggaggtagaggaggggagggaactgctggtggtcggcagtgggcgaaggcgcgacaatccaggatatggattcctgagcgtcacccacccgcccatccacgtcgcgcggtgtagtcatcccctatccgcagccgcctcgctccctctcccacaacaaatccattctcctcctcccactcgacgaggatcgcgaggatgctggaggacgtcgtcgctgtcacgcttgacgttagggcctccgatgcttgacgttagggcctctcgcttgaagaggaacacaaacagagctcatgttttttattttgctctgcattatctactgcttctctgtgggggcgttatttacagtatgtggcctgtttgttgtgttgttcctgcggaagggcgggcgggccgaaggtgtttaagaaaatgttgttgtcaacatcaacctcctggaagggccagaacgcaggcagcgcctcaactcgtcaccccatcagcacggatgattatcacgagtacttcaagcgctcattttaggaagacatcgctgcgcaagtgcctcaaggagtggaatgtaccggtttttggttgatggtgtctggaggtgtgatgagacaaaaccctttgtacgtgatgaatatggactgatcagcaatgaagtgcttgtggaaaacaatgtactacccgttgtgcagccagagccttctatcagaggaactaatatggataaggatgcccctggagccatcatctcagaacccaagcatgcaaatagcagttatccgccatgtggtctctggaatattattacacaataccatatatgacgttgttcccctttctagcaagggtcttgctctggttcctttttgggatgaccgtcagggaaccataacaggcatgctcactgcatcagattttgttttaatcttgagaaagttgcagagaaacattcaagttattggcaacgaagagcccatttctgcttggaaagaagcaaagctacagttctatggtgggcctgatggtgctgtcatgcagagaacgccattaatccattttgtacagacaggcaacattgatctcagggccaagaaagaagctcaactcggcatgcttcctgtttgaagcaagggcaacaaacttaccccaccagatctctgtcgccaaagcagggctagtgaataagctgtgtttcctcccggattgtcactgcttttatatttgtgcatttattttgagggaaacattttgcccaaaaaaggcctgcagtgcacgttttaaacaagtcatttgaaccaactcttatgctgaaaactgtatgtgatactgcagaaggcaacacactagcttgataggaaagttggttggcaagcataggtggactctggtgccttcatatatctatatatatattttaagttgacgatcttcgtgatgctgaaactgatgaagacctccgatgaaaaaagagacatgctgcacatgcacgagggtacttgcagatcgatgtcggctctatggacgaacactcgaccaagtcagatgaggagtatgagggcctagccatgcgcgacgtgatggctactggtccgacgatgagcagcaagctgtgagttaaagatgaactcacctgccctggagagtaacatccataggagtgaggcaaaatggctggtaccaccacaacatggacccgttcctgaagatgtccaaggaggtggtagccgacaccataatgtcttgtgtcattgtgtcaccggtcggcaacacactgcgctggtaccggcgggtgttgtgtttcttaggcgtctgcttctgtgctttgagttgtgctatagagtggttgtgccaactactgattttaaaagaaaaaggtgagctgagaatcattgttgaaaacaaacatgtaattgttcgttctcatcagttgtgccaactaccaagcatttcattgatcagaatttatcgttgctcatgagaaccaaaagtaagacacttctcaataacattggatgcaaatttctgctagcttatcttcactatcttttctcgtatcaatataacacacatttatacataatttttgtgttattatatgttttcgttgcaacgcacgggcactcacctagttatagaataaaaat

SEQ ID NO: 77242 - DNA, 3476 bp, Zea Mays
gctgtcaatcgcctccccactgcggcagatccgcaatccgctcctccaccaccgcgctcctcacccacgccagggacaagactgtctacctccacgcccgcctcaccaactccgcggccaccgccaccgccacgcccctcccccatggtcgtcgagtccgagtggtggaaccagcgacgcatgcgcgtcgagggcgacgtgaaataggtgctccaccgcgggcacaacgggcacagtggaggtggaacgagcaccatcgagttctggttccaccgaatccaccgctcgcacaccggatccatcgctcccacatgcccgcacaccggatccaccgctccctcccccgcgatggcctggttccaccgagacaactgcggggctagggtttggattcgtgggtggagcccaaggctagatccagcagggggagggaggtagaggaggggagggaactgctggtggtcggcagtgggcgaaggcgcgacaatccaggatatggattcctgagcgtcacccacccgcccatccacgtcgcgcggtgtagtcatcccctatccgcagccgcctcgctccctctcccacaacaaatccattctcctcctcccactcgacgaggatcgcgaggatgctggaggacgtcgtcgctgtcacgcttgacgttagggcctccgatgcttgacgttagggcctctcgcttgaagaggaacacaaacagagctcatgttttttattttgctctgcattatctactgcttctctgtgggggcgttatttacagtatgtggcctgtttgttgtgttgttcctgcggaagggcgggcgggccgaaggtgtttaagaaaatgttgttgtcaacatcaacctcctggaagggccagaacgcaggcagcgcctcaactcgtcaccccatcagcacggatgattatcacgagtacttcaagcgctcattttaggaagacatcgctgcgcaagtgcctcaaggagtggaatggtgagcccctgtccatctactgaacagagaaaataccaggagcaaatgactgcatttttagttaatccttttattcctaaattaattgtgtttgttaatgcttttattcctaaaataagtaaccgagctcgggattcttcgcaatttgatttgcgagatcacccccataaaggcatcatgaatctttatgcctgtaaagacatcccactgtctctttcgttttcgataagatgttttggccgttacataatgcctgtaaggtagaatgccattgcagttgttgcatcagaaagcagccatttaacgccattgtaaagtgagtgatgattaaatacaaccacacttctgtctctcaggtttctgtacatggagtttttattgcacctcttcttccccagcaattagtacttgcagttagactaaatgaatcttgaatgccccttaactgttggctttacatggaactacttttgcatataccagacaactattttgaacttcaatatgtttttcaattccagcaattgatcgaaacatgatatatttgacatattcatgatggatttttgtatttgatgtgtcgctttttcatctatcaatgtaattcttggacataacattgcgcacaggtaccaaattcacacccttgttattgcgagttctgtaaatcatgatgttcacatgtgatggtttgattcagttcaatggttagcaagctatttgaacatgatactatagtagtgcatatttgctgtacaaatggccactgcccagctatttgcataagatattatgtttctcctgtgacattttctatgccacatacatttatatggcatttttgtgcaatttagtaccggtttttggttgatggtgtctggaggtgtgatgagacaaaaccctttgtacgtgatgaatatggactgatcagcaatgaagtgcttgtggaaaacaatgtactacccgttgtgcagccagagccttctatcagaggaactaatatggataaggatgcccctggagccatcatctcagaacccaagcatgcaaatagcagttatccgccatgtggtctctggaatattattacacaataccatatatgacgttgttcccctttctagcaagttaacagttttggacactcagcttcctgttaaacaagcatttaaaataatgcatgatgtgggtcttgctctggttcctttttgggatgaccgtcagggaaccataacaggcatgctcactgcatcagattttgttttaatcttgagaaagttgcagagaaacattcaagttattggcaacgaagagcccatttctgcttggaaagaagcaaagctacagttctatggtgggcctgatggtgctgtcatgcagagaacgccattaatccattttgtacagacaggcaacattgatctcagggccaagaaagaagctcaactcggcatgcttcctgtttgaagcaagggcaacaaacttaccccaccagatctctgtcgccaaagcagggctagtgaataagctgtgtttcctcccggattgtcactgcttttatatttgtgcatttattttgagggaaacattttgcccaaaaaaggcctgcagtgcacgttttaaacaagtcatttgaaccaactcttatgctgaaaactgtatgtgatactgcagaaggcaacacactagcttgataggaaagttggttggcaagcataggtggactctggtgccttcatatatctatatatatattttaagttgacgatcttcgtgatgctgaaactgatgaagacctccgatgaaaaaagagacatgctgcacatgcacgagggtacttgcagatcgatgtcggctctatggacgaacactcgaccaagtcagatgaggagtatgagggcctagccatgcgcgacgtgatggctactggtccgacgatgagcagcaagctgtgagttaaagatgaactcacctgccctggagagtaacatccataggagtgaggcaaaatggctggtaccaccacaacatggacccgttcctgaagatgtccaaggaggtggtagccgacaccataatgtcttgtgtcattgtgtcaccggtcggcaacacactgcgctggtaccggcgggtgttgtgtttcttaggcgtctgcttctgtgctttgagttgtgctatagagtggttgtgccaactactgattttaaaagaaaaaggtgagctgagaatcattgttgaaaacaaacatgtaattgttcgttctcatcagttgtgccaactaccaagcatttcattgatcagaatttatcgttgctcatgagaaccaaaagtaagacacttctcaataacattggatgcaaatttctgctagcttatcttcactatcttttctcgtatcaatataacacacatttatacataatttttgtgttattatatgttttcgttgcaacgcacgggcactcacctagttatagaataaaaat

SEQ ID NO: 77243 - DNA, 3424 bp, Zea Mays
gctgtcaatcgcctccccactgcggcagatccgcaatccgctcctccaccaccgcgctcctcacccacgccagggacaagactgtctacctccacgcccgcctcaccaactccgcggccaccgccaccgccacgcccctcccccatggtcgtcgagtccgagtggtggaaccagcgacgcatgcgcgtcgagggcgacgtgaaataggtgctccaccgcgggcacaacgggcacagtggaggtggaacgagcaccatcgagttctggttccaccgaatccaccgctcgcacaccggatccatcgctcccacatgcccgcacaccggatccaccgctccctcccccgcgatggcctggttccaccgagacaactgcggggctagggtttggattcgtgggtggagcccaaggctagatccagcagggggagggaggtagaggaggggagggaactgctggtggtcggcagtgggcgaaggcgcgacaatccaggatatggattcctgagcgtcacccacccgcccatccacgtcgcgcggtgtagtcatcccctatccgcagccgcctcgctccctctcccacaacaaatccattctcctcctcccactcgacgaggatcgcgaggatgctggaggacgtcgtcgctgtcacgcttgacgttagggcctccgatgcttgacgttagggcctctcgcttgaagaggaacacaaacagagctcatgttttttattttgctctgcattatctactgcttctctgtgggggcgttatttacagtatgtggcctgtttgttgtgttgttcctgcggaagggcgggcgggccgaaggtgtttaagaaaatgttgttgtcaacatcaacctcctggaagggccagaacgcaggcagcgcctcaactcgtcaccccatcagcacggatgattatcacgagtacttcaagcgctcattttaggaagacatcgctgcgcaagtgcctcaaggagtggaatggtgagcccctgtccatctactgaacagagaaaataccaggagcaaatgactgcatttttagttaatccttttattcctaaattaattgtgtttgttaatgcttttattcctaaaataagtaaccgagctcgggattcttcgcaatttgatttgcgagatcacccccataaaggcatcatgaatctttatgcctgtaaagacatcccactgtctctttcgttttcgataagatgttttggccgttacataatgcctgtaaggtagaatgccattgcagttgttgcatcagaaagcagccatttaacgccattgtaaagtgagtgatgattaaatacaaccacacttctgtctctcaggtttctgtacatggagtttttattgcacctcttcttccccagcaattagtacttgcagttagactaaatgaatcttgaatgccccttaactgttggctttacatggaactacttttgcatataccagacaactattttgaacttcaatatgtttttcaattccagcaattgatcgaaacatgatatatttgacatattcatgatggatttttgtatttgatgtgtcgctttttcatctatcaatgtaattcttggacataacattgcgcacaggtaccaaattcacacccttgttattgcgagttctgtaaatcatgatgttcacatgtgatggtttgattcagttcaatggttagcaagctatttgaacatgatactatagtagtgcatatttgctgtacaaatggccactgcccagctatttgcataagatattatgtttctcctgtgacattttctatgccacatacatttatatggcatttttgtgcaatttagtaccggtttttggttgatggtgtctggaggtgtgatgagacaaaaccctttgtacgtgatgaatatggactgatcagcaatgaagtgcttgtggaaaacaatgtactacccgttgtgcagccagagccttctatcagaggaactaatatggataagggtaccattttgaaaacaatgcccctggagccatcatctcagaacccaagcatgcaaatagcagttatccgccatgtggtctctggaatattattacacaataccatatatgacgttgttcccctttctagcaagggtcttgctctggttcctttttgggatgaccgtcagggaaccataacaggcatgctcactgcatcagattttgttttaatcttgagaaagttgcagagaaacattcaagttattggcaacgaagagcccatttctgcttggaaagaagcaaagctacagttctatggtgggcctgatggtgctgtcatgcagagaacgccattaatccatacaggcaacattgatctcagggccaagaaagaagctcaactcggcatgcttcctgtttgaagcaagggcaacaaacttaccccaccagatctctgtcgccaaagcagggctagtgaataagctgtgtttcctcccggattgtcactgcttttatatttgtgcatttattttgagggaaacattttgcccaaaaaaggcctgcagtgcacgttttaaacaagtcatttgaaccaactcttatgctgaaaactgtatgtgatactgcagaaggcaacacactagcttgataggaaagttggttggcaagcataggtggactctggtgccttcatatatctatatatatattttaagttgacgatcttcgtgatgctgaaactgatgaagacctccgatgaaaaaagagacatgctgcacatgcacgagggtacttgcagatcgatgtcggctctatggacgaacactcgaccaagtcagatgaggagtatgagggcctagccatgcgcgacgtgatggctactggtccgacgatgagcagcaagctgtgagttaaagatgaactcacctgccctggagagtaacatccataggagtgaggcaaaatggctggtaccaccacaacatggacccgttcctgaagatgtccaaggaggtggtagccgacaccataatgtcttgtgtcattgtgtcaccggtcggcaacacactgcgctggtaccggcgggtgttgtgtttcttaggcgtctgcttctgtgctttgagttgtgctatagagtggttgtgccaactactgattttaaaagaaaaaggtgagctgagaatcattgttgaaaacaaacatgtaattgttcgttctcatcagttgtgccaactaccaagcatttcattgatcagaatttatcgttgctcatgagaaccaaaagtaagacacttctcaataacattggatgcaaatttctgctagcttatcttcactatcttttctcgtatcaatataacacacatttatacataatttttgtgttattatatgttttcgttgcaacgcacgggcactcacctagttatagaataaaaat

SEQ ID NO: 77244 - DNA, 3496 bp, Zea Mays
gctgtcaatcgcctccccactgcggcagatccgcaatccgctcctccaccaccgcgctcctcacccacgccagggacaagactgtctacctccacgcccgcctcaccaactccgcggccaccgccaccgccacgcccctcccccatggtcgtcgagtccgagtggtggaaccagcgacgcatgcgcgtcgagggcgacgtgaaataggtgctccaccgcgggcacaacgggcacagtggaggtggaacgagcaccatcgagttctggttccaccgaatccaccgctcgcacaccggatccatcgctcccacatgcccgcacaccggatccaccgctccctcccccgcgatggcctggttccaccgagacaactgcggggctagggtttggattcgtgggtggagcccaaggctagatccagcagggggagggaggtagaggaggggagggaactgctggtggtcggcagtgggcgaaggcgcgacaatccaggatatggattcctgaggatgattatcacgagtacttcaagcgctcattttaggaagacatcgctgcgcaagtgcctcaaggagtggaatggtgagcccctgtccatctactgaacagagaaaataccaggagcaaatgactgcatttttagttaatccttttattcctaaattaattgtgtttgttaatgcttttattcctaaaataagtaaccgagctcgggattcttcgcaatttgatttgcgagatcacccccataaaggcatcatgaatctttatgcctgtaaagacatcccactgtctctttcgttttcgataagatgttttggccgttacataatgcctgtaaggtagaatgccattgcagttgttgcatcagaaagcagccatttaacgccattgtaaagtgagtgatgattaaatacaaccacacttctgtctctcaggtttctgtacatggagtttttattgcacctcttcttccccagcaattagtacttgcagttagactaaatgaatcttgaatgccccttaactgttggctttacatggaactacttttgcatataccagacaactattttgaacttcaatatgtttttcaattccagcaattgatcgaaacatgatatatttgacatattcatgatggatttttgtatttgatgtgtcgctttttcatctatcaatgtaattcttggacataacattgcgcacaggtaccaaattcacacccttgttattgcgagttctgtaaatcatgatgttcacatgtgatggtttgattcagttcaatggttagcaagctatttgaacatgatactatagtagtgcatatttgctgtacaaatggccactgcccagctatttgcataagatattatgtttctcctgtgacattttctatgccacatacatttatatggcatttttgtgcaatttagtaccggtttttggttgatggtgtctggaggtgtgatgagacaaaaccctttgtacgtgatgaatatggactgatcagcaatgaagtgcttgtggaaaacaatgtactacccgttgtgcagccagagccttctatcagaggaactaatatggataagggtaccattttgaaaacagtatgtcttagaagtttaacattatattttcttgttctccatattcctgataactaatggtctgttatttactgtggccttaaataaacaaagatgcccctggagccatcatctcagaacccaagcatgcaaatagcagttatccgccatgtggtctctggaatattattacacaataccatatatgacgttgttcccctttctagcaagttaacagttttggacactcagcttcctgttaaacaagcatttaaaataatgcatgatgtgggtcttgctctggttcctttttgggatgaccgtcagggaaccataacaggcatgctcactgcatcagattttgttttaatcttgagaaagttgcagagaaacattcaagttattggcaacgaagagcccatttctgcttggaaagaagcaaagctacagttctatggtgggcctgatggtgctgtcatgcagagaacgccattaatccatgtacttctccatatatttgctgattctttcatttgattcaatgtgtaagcagttgcaagatcagcactttcataatataaatatattacttgtatgaaattctagatatggtctccaatacaacattaagcttaatgtcgtttgtgttaaaaaattacaaatcatcttatgtcttgaaataaggagaaattgtttgggtttctcctccccaactttcagaattacctatttctattgtatgtttgatcatttggacttccattccatcaacaattttggtttattcagtgaggaactatgtttttaaccactctgtagtttgtacagacaggcaacattgatctcagggccaagaaagaagctcaactcggcatgcttcctgtttgaagcaagggcaacaaacttaccccaccagatctctgtcgccaaagcagggctagtgaataagctgtgtttcctcccggattgtcactgcttttatatttgtgcatttattttgagggaaacattttgcccaaaaaaggcctgcagtgcacgttttaaacaagtcatttgaaccaactcttatgctgaaaactgtatgtgatactgcagaaggcaacacactagcttgataggaaagttggttggcaagcataggtggactctggtgccttcatatatctatatatatattttaagttgacgatcttcgtgatgctgaaactgatgaagacctccgatgaaaaaagagacatgctgcacatgcacgagggtacttgcagatcgatgtcggctctatggacgaacactcgaccaagtcagatgaggagtatgagggcctagccatgcgcgacgtgatggctactggtccgacgatgagcagcaagctgtgagttaaagatgaactcacctgccctggagagtaacatccataggagtgaggcaaaatggctggtaccaccacaacatggacccgttcctgaagatgtccaaggaggtggtagccgacaccataatgtcttgtgtcattgtgtcaccggtcggcaacacactgcgctggtaccggcgggtgttgtgtttcttaggcgtctgcttctgtgctttgagttgtgctatagagtggttgtgccaactactgattttaaaagaaaaaggtgagctgagaatcattgttgaaaacaaacatgtaattgttcgttctcatcagttgtgccaactaccaagcatttcattgatcagaatttatcgttgctcatgagaaccaaaagtaagacacttctcaataacattggatgcaaatttctgctagcttatcttcactatcttttctcgtatcaatataacacacatttatacataatttttgtgttattatatgttttcgttgcaacgcacgggcactcacctagttatagaataaaaat

SEQ ID NO: 77245 - DNA, 2639 bp, Zea Mays
gctgtcaatcgcctccccactgcggcagatccgcaatccgctcctccaccaccgcgctcctcacccacgccagggacaagactgtctacctccacgcccgcctcaccaactccgcggccaccgccaccgccacgcccctcccccatggtcgtcgagtccgagtggtggaaccagcgacgcatgcgcgtcgagggcgacgtgaaataggtgctccaccgcgggcacaacgggcacagtggaggtggaacgagcaccatcgagttctggttccaccgaatccaccgctcgcacaccggatccatcgctcccacatgcccgcacaccggatccaccgctccctcccccgcgatggcctggttccaccgagacaactgcggggctagggtttggattcgtgggtggagcccaaggctagatccagcagggggagggaggtagaggaggggagggaactgctggtggtcggcagtgggcgaaggcgcgacaatccaggatatggattcctgagcgtcacccacccgcccatccacgtcgcgcggtgtagtcatcccctatccgcagccgcctcgctccctctcccacaacaaatccattctcctcctcccactcgacgaggatcgcgaggatgctggaggacgtcgtcgctgtcacgcttgacgttagggcctccgatgcttgacgttagggcctctcgcttgaagaggaacacaaacagagctcatgttttttattttgctctgcattatctactgcttctctgtgggggcgttatttacagtatgtggcctgtttgttgtgttgttcctgcggaagggcgggcgggccgaaggtgtttaagaaaatgttgttgtcaacatcaacctcctggaagggccagaacgcaggcagcgcctcaactcgtcaccccatcagcacggatgattatcacgagtacttcaagcgctcattttaggaagacatcgctgcgcaagtgcctcaaggagtggaatgtaccggtttttggttgatggtgtctggaggtgtgatgagacaaaaccctttgtacgtgatgaatatggactgatcagcaatgaagtgcttgtggaaaacaatgtactacccgttgtgcagccagagccttctatcagaggaactaatatggataagggtaccattttgaaaacaatgcccctggagccatcatctcagaacccaagcatgcaaatagcagttatccgccatgtggtctctggaatattattacacaataccatatatgacgttgttcccctttctagcaagttaacagttttggacactcagcttcctgttaaacaagcatttaaaataatgcatgatgtgggtcttgctctggttcctttttgggatgaccgtcagggaaccataacaggcatgctcactgcatcagattttgttttaatcttgagaaagttgcagagaaacattcaagttattggcaacgaagagcccatttctgcttggaaagaagcaaagctacagttctatggtgggcctgatggtgctgtcatgcagagaacgccattaatccattttgtacagacaggcaacattgatctcagggccaagaaagaagctcaactcggcatgcttcctgtttgaagcaagggcaacaaacttaccccaccagatctctgtcgccaaagcagggctagtgaataagctgtgtttcctcccggattgtcactgcttttatatttgtgcatttattttgagggaaacattttgcccaaaaaaggcctgcagtgcacgttttaaacaagtcatttgaaccaactcttatgctgaaaactgtatgtgatactgcagaaggcaacacactagcttgataggaaagttggttggcaagcataggtggactctggtgccttcatatatctatatatatattttaagttgacgatcttcgtgatgctgaaactgatgaagacctccgatgaaaaaagagacatgctgcacatgcacgagggtacttgcagatcgatgtcggctctatggacgaacactcgaccaagtcagatgaggagtatgagggcctagccatgcgcgacgtgatggctactggtccgacgatgagcagcaagctgtgagttaaagatgaactcacctgccctggagagtaacatccataggagtgaggcaaaatggctggtaccaccacaacatggacccgttcctgaagatgtccaaggaggtggtagccgacaccataatgtcttgtgtcattgtgtcaccggtcggcaacacactgcgctggtaccggcgggtgttgtgtttcttaggcgtctgcttctgtgctttgagttgtgctatagagtggttgtgccaactactgattttaaaagaaaaaggtgagctgagaatcattgttgaaaacaaacatgtaattgttcgttctcatcagttgtgccaactaccaagcatttcattgatcagaatttatcgttgctcatgagaaccaaaagtaagacacttctcaataacattggatgcaaatttctgctagcttatcttcactatcttttctcgtatcaatataacacacatttatacataatttttgtgttattatatgttttcgttgcaacgcacgggcactcacctagttatagaataaaaat

SEQ ID NO: 77246 - DNA, 3500 bp, Zea Mays
gctgtcaatcgcctccccactgcggcagatccgcaatccgctcctccaccaccgcgctcctcacccacgccagggacaagactgtctacctccacgcccgcctcaccaactccgcggccaccgccaccgccacgcccctcccccatggtcgtcgagtccgagtggtggaaccagcgacgcatgcgcgtcgagggcgacgtgaaataggtgctccaccgcgggcacaacgggcacagtggaggtggaacgagcaccatcgagttctggttccaccgaatccaccgctcgcacaccggatccatcgctcccacatgcccgcacaccggatccaccgctccctcccccgcgatggcctggttccaccgagacaactgcggggctagggtttggattcgtgggtggagcccaaggctagatccagcagggggagggaggtagaggaggggagggaactgctggtggtcggcagtgggcgaaggcgcgacaatccaggatatggattcctgaggttacttcattcgctttgtgctctcccgcgttcttgattcattcgcttttgtgttctccctaaacctttacgcctgccctgcctggcagcgtcacccacccgcccatccacgtcgcgcggtgtagtcatcccctatccgcagccgcctcgctccctctcccacaacaaatccattctcctcctcccactcgacgaggatcgcgaggatgctggaggacgtcgtcgctgtcacgcttgacgttagggcctccgatgcttgacgttagggcctctcgcttgaagaggaacacaaacagagctcatgttttttattttgctctgcattatctactgcttctctgtgggggcgttatttacagtatgtggcctgtttgttgtgttgttcctgcggaagggcgggcgggccgaaggtgtttaagaaaatgttgttgtcaacatcaacctcctggaagggccagaacgcaggcagcgcctcaactcgtcaccccatcagcacggtgagccccttatctggattgttatcatggtacgcggtgcgctgcaagcctgcaagtgacatcaaattggattggtagtcagcgggtgtcatagtgtcagttcgatggaatggttctgcagtgcatgtgcttctgtaatttccgcaagaagcagtcaacttctccctgatatggcactaggacattgtagtgattcccgcacgtttgtggaactcgacaacctaccagagcgccagatgtttcattgagaagagaactcctccagtctggctttccactggtctagtctctcctttaaaccaaatttgataccactcattgaagtcaatagctgggatgtagacatgtgaaaccacacctgtggaactttcagcgtgtgatgactgggtcactggtggaataccgtgttttttgagctgctcgctttcagttcgcggtcatagtcctgtgttttttgccttcagtttcttgatgtagttattgcctaaaatttctatatcttgttcatcgtactggagatgctacttcatgtggagctggtatgtaggatgattatcacgagtacttcaagcgctcattttaggaagacatcgctgcgcaagtgcctcaaggagtggaatggtaccaaattcacacccttgttattgcgagttctgtaaatcatgatgttcacatgtgatggtttgattcagttcaatggttagcaagctatttgaacatgatactatagtagtgcatatttgctgtacaaatggccactgcccagctatttgcataagatattatgtttctcctgtgacattttctatgccacatacatttatatggcatttttgtgcaatttagtaccggtttttggttgatggtgtctggaggtgtgatgagacaaaaccctttgtacgtgatgaatatggactgatcagcaatgaagtgcttgtggaaaacaatgtactacccgttgtgcagccagagccttctatcagaggaactaatatggataagggtaccattttgaaaacaatgcccctggagccatcatctcagaacccaagcatgcaaatagcagttatccgccatgtggtctctggaatattattacacaataccatatatgacgttgttcccctttctagcaagttaacagttttggacactcagcttcctgttaaacaagcatttaaaataatgcatgatgtgggtcttgctctggttcctttttgggatgaccgtcagggaaccataacaggcatgctcactgcatcagattttgttttaatcttgagaaagttgcagagaaacattcaagttattggcaacgaagagcccatttctgcttggaaagaagcaaagctacagttctatggtgggcctgatggtgctgtcatgcagagaacgccattaatccattttgtacagacaggcaacattgatctcagggccaagaaagaagctcaactcggcatgcttcctgtttgaagcaagggcaacaaacttaccccaccagatctctgtcgccaaagcagggctagtgaataagctgtgtttcctcccggattgtcactgcttttatatttgtgcatttattttgagggaaacattttgcccaaaaaaggcctgcagtgcacgttttaaacaagtcatttgaaccaactcttatgctgaaaactgtatgtgatactgcagaaggcaacacactagcttgataggaaagttggttggcaagcataggtggactctggtgccttcatatatctatatatatattttaagttgacgatcttcgtgatgctgaaactgatgaagacctccgatgaaaaaagagacatgctgcacatgcacgagggtacttgcagatcgatgtcggctctatggacgaacactcgaccaagtcagatgaggagtatgagggcctagccatgcgcgacgtgatggctactggtccgacgatgagcagcaagctgtgagttaaagatgaactcacctgccctggagagtaacatccataggagtgaggcaaaatggctggtaccaccacaacatggacccgttcctgaagatgtccaaggaggtggtagccgacaccataatgtcttgtgtcattgtgtcaccggtcggcaacacactgcgctggtaccggcgggtgttgtgtttcttaggcgtctgcttctgtgctttgagttgtgctatagagtggttgtgccaactactgattttaaaagaaaaaggtgagctgagaatcattgttgaaaacaaacatgtaattgttcgttctcatcagttgtgccaactaccaagcatttcattgatcagaatttatcgttgctcatgagaaccaaaagtaagacacttctcaataacattggatgcaaatttctgctagcttatcttcactatcttttctcgtatcaatataacacacatttatacataatttttgtgttattatatgttttcgttgcaacgcacgggcactcacctagttatagaataaaaat

SEQ ID NO: 77247 - DNA, 3971 bp, Zea Mays
gctgtcaatcgcctccccactgcggcagatccgcaatccgctcctccaccaccgcgctcctcacccacgccagggacaagactgtctacctccacgcccgcctcaccaactccgcggccaccgccaccgccacgcccctcccccatggtcgtcgagtccgagtggtggaaccagcgacgcatgcgcgtcgagggcgacgtgaaataggtgctccaccgcgggcacaacgggcacagtggaggtggaacgagcaccatcgagttctggttccaccgaatccaccgctcgcacaccggatccatcgctcccacatgcccgcacaccggatccaccgctccctcccccgcgatggcctggttccaccgagacaactgcggggctagggtttggattcgtgggtggagcccaaggctagatccagcagggggagggaggtagaggaggggagggaactgctggtggtcggcagtgggcgaaggcgcgacaatccaggatatggattcctgagcgtcacccacccgcccatccacgtcgcgcggtgtagtcatcccctatccgcagccgcctcgctccctctcccacaacaaatccattctcctcctcccactcgacgaggatcgcgaggatgctggaggacgtcgtcgctgtcacgcttgacgttagggcctccgatgcttgacgttagggcctctcgcttgaagaggaacacaaacagagctcatgttttttattttgctctgcattatctactgcttctctgtgggggcgttatttacagtatgtggcctgtttgttgtgttgttcctgcggaagggcgggcgggccgaaggtgtttaagaaaatgttgttgtcaacatcaacctcctggaagggccagaacgcaggcagcgcctcaactcgtcaccccatcagcacggtgagccccttatctggattgttatcatggtacgcggtgcgctgcaagcctgcaagtgacatcaaattggattggtagtcagcgggtgtcatagtgtcagttcgatggaatggttctgcagtgcatgtgcttctgtaatttccgcaagaagcagtcaacttctccctgatatggcactaggacattgtagtgattcccgcacgtttgtggaactcgacaacctaccagagcgccagatgtttcattgagaagagaactcctccagtctggctttccactggtctagtctctcctttaaaccaaatttgataccactcattgaagtcaatagctgggatgtagacatgtgaaaccacacctgtggaactttcagcgtgtgatgactgggtcactggtggaataccgtgttttttgagctgctcgctttcagttcgcggtcatagtcctgtgttttttgccttcagtttcttgatgtagttattgcctaaaatttctatatcttgttcatcgtactggagatgctacttcatgtggagctggtatgtaggatgattatcacgagtacttcaagcgctcattttaggaagacatcgctgcgcaagtgcctcaaggagtggaatggtgagcccctgtccatctactgaacagagaaaataccaggagcaaatgactgcatttttagttaatccttttattcctaaattaattgtgtttgttaatgcttttattcctaaaataagtaaccgagctcgggattcttcgcaatttgatttgcgagatcacccccataaaggcatcatgaatctttatgcctgtaaagacatcccactgtctctttcgttttcgataagatgttttggccgttacataatgcctgtaaggtagaatgccattgcagttgttgcatcagaaagcagccatttaacgccattgtaaagtgagtgatgattaaatacaaccacacttctgtctctcaggtttctgtacatggagtttttattgcacctcttcttccccagcaattagtacttgcagttagactaaatgaatcttgaatgccccttaactgttggctttacatggaactacttttgcatataccagacaactattttgaacttcaatatgtttttcaattccagcaattgatcgaaacatgatatatttgacatattcatgatggatttttgtatttgatgtgtcgctttttcatctatcaatgtaattcttggacataacattgcgcacaggtaccaaattcacacccttgttattgcgagttctgtaaatcatgatgttcacatgtgatggtttgattcagttcaatggttagcaagctatttgaacatgatactatagtagtgcatatttgctgtacaaatggccactgcccagctatttgcataagatattatgtttctcctgtgacattttctatgccacatacatttatatggcatttttgtgcaatttagtaccggtttttggttgatggtgtctggaggtgtgatgagacaaaaccctttgtacgtgatgaatatggactgatcagcaatgaagtgcttgtggaaaacaatgtactacccgttgtgcagccagagccttctatcagaggaactaatatggataagggtaccattttgaaaacaatgcccctggagccatcatctcagaacccaagcatgcaaatagcagttatccgccatgtggtctctggaatattattacacaataccatatatgacgttgttcccctttctagcaagggtcttgctctggttcctttttgggatgaccgtcagggaaccataacaggcatgctcactgcatcagattttgttttaatcttgagaaagttgcagagaaacattcaagttattggcaacgaagagcccatttctgcttggaaagaagcaaagctacagttctatggtgggcctgatggtgctgtcatgcagagaacgccattaatccatacaggcaacattgatctcagggccaagaaagaagctcaactcggcatgcttcctgtttgaagcaagggcaacaaacttaccccaccagatctctgtcgccaaagcagggctagtgaataagctgtgtttcctcccggattgtcactgcttttatatttgtgcatttattttgagggaaacattttgcccaaaaaaggcctgcagtgcacgttttaaacaagtcatttgaaccaactcttatgctgaaaactgtatgtgatactgcagaaggcaacacactagcttgataggaaagttggttggcaagcataggtggactctggtgccttcatatatctatatatatattttaagttgacgatcttcgtgatgctgaaactgatgaagacctccgatgaaaaaagagacatgctgcacatgcacgagggtacttgcagatcgatgtcggctctatggacgaacactcgaccaagtcagatgaggagtatgagggcctagccatgcgcgacgtgatggctactggtccgacgatgagcagcaagctgtgagttaaagatgaactcacctgccctggagagtaacatccataggagtgaggcaaaatggctggtaccaccacaacatggacccgttcctgaagatgtccaaggaggtggtagccgacaccataatgtcttgtgtcattgtgtcaccggtcggcaacacactgcgctggtaccggcgggtgttgtgtttcttaggcgtctgcttctgtgctttgagttgtgctatagagtggttgtgccaactactgattttaaaagaaaaaggtgagctgagaatcattgttgaaaacaaacatgtaattgttcgttctcatcagttgtgccaactaccaagcatttcattgatcagaatttatcgttgctcatgagaaccaaaagtaagacacttctcaataacattggatgcaaatttctgctagcttatcttcactatcttttctcgtatcaatataacacacatttatacataatttttgtgttattatatgttttcgttgcaacgcacgggcactcacctagttatagaataaaaat

SEQ ID NO: 77248 - DNA, 2570 bp, Zea Mays
gctgtcaatcgcctccccactgcggcagatccgcaatccgctcctccaccaccgcgctcctcacccacgccagggacaagactgtctacctccacgcccgcctcaccaactccgcggccaccgccaccgccacgcccctcccccatggtcgtcgagtccgagtggtggaaccagcgacgcatgcgcgtcgagggcgacgtgaaataggtgctccaccgcgggcacaacgggcacagtggaggtggaacgagcaccatcgagttctggttccaccgaatccaccgctcgcacaccggatccatcgctcccacatgcccgcacaccggatccaccgctccctcccccgcgatggcctggttccaccgagacaactgcggggctagggtttggattcgtgggtggagcccaaggctagatccagcagggggagggaggtagaggaggggagggaactgctggtggtcggcagtgggcgaaggcgcgacaatccaggatatggattcctgagcgtcacccacccgcccatccacgtcgcgcggtgtagtcatcccctatccgcagccgcctcgctccctctcccacaacaaatccattctcctcctcccactcgacgaggatcgcgaggatgctggaggacgtcgtcgctgtcacgcttgacgttagggcctccgatgcttgacgttagggcctctcgcttgaagaggaacacaaacagagctcatgttttttattttgctctgcattatctactgcttctctgtgggggcgttatttacagtatgtggcctgtttgttgtgttgttcctgcggaagggcgggcgggccgaaggtgtttaagaaaatgttgttgtcaacatcaacctcctggaagggccagaacgcaggcagcgcctcaactcgtcaccccatcagcacggatgattatcacgagtacttcaagcgctcattttaggaagacatcgctgcgcaagtgcctcaaggagtggaatgtaccggtttttggttgatggtgtctggaggtgtgatgagacaaaaccctttgtacgtgatgaatatggactgatcagcaatgaagtgcttgtggaaaacaatgtactacccgttgtgcagccagagccttctatcagaggaactaatatggataagggtaccattttgaaaacaatgcccctggagccatcatctcagaacccaagcatgcaaatagcagttatccgccatgtggtctctggaatattattacacaataccatatatgacgttgttcccctttctagcaagggtcttgctctggttcctttttgggatgaccgtcagggaaccataacaggcatgctcactgcatcagattttgttttaatcttgagaaagttgcagagaaacattcaagttattggcaacgaagagcccatttctgcttggaaagaagcaaagctacagttctatggtgggcctgatggtgctgtcatgcagagaacgccattaatccatacaggcaacattgatctcagggccaagaaagaagctcaactcggcatgcttcctgtttgaagcaagggcaacaaacttaccccaccagatctctgtcgccaaagcagggctagtgaataagctgtgtttcctcccggattgtcactgcttttatatttgtgcatttattttgagggaaacattttgcccaaaaaaggcctgcagtgcacgttttaaacaagtcatttgaaccaactcttatgctgaaaactgtatgtgatactgcagaaggcaacacactagcttgataggaaagttggttggcaagcataggtggactctggtgccttcatatatctatatatatattttaagttgacgatcttcgtgatgctgaaactgatgaagacctccgatgaaaaaagagacatgctgcacatgcacgagggtacttgcagatcgatgtcggctctatggacgaacactcgaccaagtcagatgaggagtatgagggcctagccatgcgcgacgtgatggctactggtccgacgatgagcagcaagctgtgagttaaagatgaactcacctgccctggagagtaacatccataggagtgaggcaaaatggctggtaccaccacaacatggacccgttcctgaagatgtccaaggaggtggtagccgacaccataatgtcttgtgtcattgtgtcaccggtcggcaacacactgcgctggtaccggcgggtgttgtgtttcttaggcgtctgcttctgtgctttgagttgtgctatagagtggttgtgccaactactgattttaaaagaaaaaggtgagctgagaatcattgttgaaaacaaacatgtaattgttcgttctcatcagttgtgccaactaccaagcatttcattgatcagaatttatcgttgctcatgagaaccaaaagtaagacacttctcaataacattggatgcaaatttctgctagcttatcttcactatcttttctcgtatcaatataacacacatttatacataatttttgtgttattatatgttttcgttgcaacgcacgggcactcacctagttatagaataaaaat

SEQ ID NO: 77249 - DNA, 2852 bp, Zea Mays
gctgtcaatcgcctccccactgcggcagatccgcaatccgctcctccaccaccgcgctcctcacccacgccagggacaagactgtctacctccacgcccgcctcaccaactccgcggccaccgccaccgccacgcccctcccccatggtcgtcgagtccgagtggtggaaccagcgacgcatgcgcgtcgagggcgacgtgaaataggtgctccaccgcgggcacaacgggcacagtggaggtggaacgagcaccatcgagttctggttccaccgaatccaccgctcgcacaccggatccatcgctcccacatgcccgcacaccggatccaccgctccctcccccgcgatggcctggttccaccgagacaactgcggggctagggtttggattcgtgggtggagcccaaggctagatccagcagggggagggaggtagaggaggggagggaactgctggtggtcggcagtgggcgaaggcgcgacaatccaggatatggattcctgagcgtcacccacccgcccatccacgtcgcgcggtgtagtcatcccctatccgcagccgcctcgctccctctcccacaacaaatccattctcctcctcccactcgacgaggatcgcgaggatgctggaggacgtcgtcgctgtcacgcttgacgttagggcctccgatgcttgacgttagggcctctcgcttgaagaggaacacaaacagagctcatgttttttattttgctctgcattatctactgcttctctgtgggggcgttatttacagtatgtggcctgtttgttgtgttgttcctgcggaagggcgggcgggccgaaggtgtttaagaaaatgttgttgtcaacatcaacctcctggaagggccagaacgcaggcagcgcctcaactcgtcaccccatcagcacggtgagccccttatctggattgttatcatggtacgcggtgcgctgcaagcctgcaagtgacatcaaattggattggtagtcagcgggtgtcatagtgtcagttcgatggaatggttctgcagtgcatgtgcttctgtaatttccgcaagaagcagtcaacttctccctgatatggcactaggacattgtagtgattcccgcacgtttgtggaactcgacaacctaccagagcgccagatgtttcattgagaagagaactcctccagtctggctttccactggtctagtctctcctttaaaccaaatttgataccactcattgaagtcaatagctgggatgtagacatgtgaaaccacacctgtggaactttcagcgtgtgatgactgggtcactggtggaataccgtgttttttgagctgctcgctttcagttcgcggtcatagtcctgtgttttttgccttcagtttcttgatgtagttattgcctaaaatttctatatcttgttcatcgtactggagatgctacttcatgtggagctggtatgtaggatgattatcacgagtacttcaagcgctcattttaggaagacatcgctgcgcaagtgcctcaaggagtggaatgggtcttgctctggttcctttttgggatgaccgtcagggaaccataacaggcatgctcactgcatcagattttgttttaatcttgagaaagttgcagagaaacattcaagttattggcaacgaagagcccatttctgcttggaaagaagcaaagctacagttctatggtgggcctgatggtgctgtcatgcagagaacgccattaatccattttgtacagacaggcaacattgatctcagggccaagaaagaagctcaactcggcatgcttcctgtttgaagcaagggcaacaaacttaccccaccagatctctgtcgccaaagcagggctagtgaataagctgtgtttcctcccggattgtcactgcttttatatttgtgcatttattttgagggaaacattttgcccaaaaaaggcctgcagtgcacgttttaaacaagtcatttgaaccaactcttatgctgaaaactgtatgtgatactgcagaaggcaacacactagcttgataggaaagttggttggcaagcatagtctggttctcatggcaggtggactctggtgccttcatatatctatatatatattttaagttgacgatcttcgtgatgctgaaactgatgaagacctccgatgaaaaaagagacatgctgcacatgcacgagggtacttgcagatcgatgtcggctctatggacgaacactcgaccaagtcagatgaggagtatgagggcctagccatgcgcgacgtgatggctactggtccgacgatgagcagcaagctgtgagttaaagatgaactcacctgccctggagagtaacatccataggagtgaggcaaaatggctggtaccaccacaacatggacccgttcctgaagatgtccaaggaggtggtagccgacaccataatgtcttgtgtcattgtgtcaccggtcggcaacacactgcgctggtaccggcgggtgttgtgtttcttaggcgtctgcttctgtgctttgagttgtgctatagagtggttgtgccaactactgattttaaaagaaaaaggtgagctgagaatcattgttgaaaacaaacatgtaattgttcgttctcatcagttgtgccaactaccaagcatttcattgatcagaatttatcgttgctcatgagaaccaaaagtaagacacttctcaataacattggatgcaaatttctgctagcttatcttcactatcttttctcgtatcaatataacacacatttatacataatttttgtgttattatatgttttcgttgcaacgcacgggcactcacctagttatagaataaaaat

SEQ ID NO: 77250 - DNA, 2582 bp, Zea Mays
gctgtcaatcgcctccccactgcggcagatccgcaatccgctcctccaccaccgcgctcctcacccacgccagggacaagactgtctacctccacgcccgcctcaccaactccgcggccaccgccaccgccacgcccctcccccatggtcgtcgagtccgagtggtggaaccagcgacgcatgcgcgtcgagggcgacgtgaaataggtgctccaccgcgggcacaacgggcacagtggaggtggaacgagcaccatcgagttctggttccaccgaatccaccgctcgcacaccggatccatcgctcccacatgcccgcacaccggatccaccgctccctcccccgcgatggcctggttccaccgagacaactgcggggctagggtttggattcgtgggtggagcccaaggctagatccagcagggggagggaggtagaggaggggagggaactgctggtggtcggcagtgggcgaaggcgcgacaatccaggatatggattcctgagcgtcacccacccgcccatccacgtcgcgcggtgtagtcatcccctatccgcagccgcctcgctccctctcccacaacaaatccattctcctcctcccactcgacgaggatcgcgaggatgctggaggacgtcgtcgctgtcacgcttgacgttagggcctccgatgcttgacgttagggcctctcgcttgaagaggaacacaaacagagctcatgttttttattttgctctgcattatctactgcttctctgtgggggcgttatttacagtatgtggcctgtttgttgtgttgttcctgcggaagggcgggcgggccgaaggtgtttaagaaaatgttgttgtcaacatcaacctcctggaagggccagaacgcaggcagcgcctcaactcgtcaccccatcagcacgatgctacttcatgtggagctggtatgtaggatgattatcacgagtacttcaagcgctcattttaggaagacatcgctgcgcaagtgcctcaaggagtggaatgtaccggtttttggttgatggtgtctggaggtgtgatgagacaaaaccctttgtacgtgatgaatatggactgatcagcaatgaagtgcttgtggaaaacaatgtactacccgttgtgcagccagagccttctatcagaggaactaatatggataaggatgcccctggagccatcatctcagaacccaagcatgcaaatagcagttatccgccatgtggtctctggaatattattacacaataccatatatgacgttgttcccctttctagcaagggtcttgctctggttcctttttgggatgaccgtcagggaaccataacaggcatgctcactgcatcagattttgttttaatcttgagaaagttgcagagaaacattcaagttattggcaacgaagagcccatttctgcttggaaagaagcaaagctacagttctatggtgggcctgatggtgctgtcatgcagagaacgccattaatccatacaggcaacattgatctcagggccaagaaagaagctcaactcggcatgcttcctgtttgaagcaagggcaacaaacttaccccaccagatctctgtcgccaaagcagggctagtgaataagctgtgtttcctcccggattgtcactgcttttatatttgtgcatttattttgagggaaacattttgcccaaaaaaggcctgcagtgcacgttttaaacaagtcatttgaaccaactcttatgctgaaaactgtatgtgatactgcagaaggcaacacactagcttgataggaaagttggttggcaagcataggtggactctggtgccttcatatatctatatatatattttaagttgacgatcttcgtgatgctgaaactgatgaagacctccgatgaaaaaagagacatgctgcacatgcacgagggtacttgcagatcgatgtcggctctatggacgaacactcgaccaagtcagatgaggagtatgagggcctagccatgcgcgacgtgatggctactggtccgacgatgagcagcaagctgtgagttaaagatgaactcacctgccctggagagtaacatccataggagtgaggcaaaatggctggtaccaccacaacatggacccgttcctgaagatgtccaaggaggtggtagccgacaccataatgtcttgtgtcattgtgtcaccggtcggcaacacactgcgctggtaccggcgggtgttgtgtttcttaggcgtctgcttctgtgctttgagttgtgctatagagtggttgtgccaactactgattttaaaagaaaaaggtgagctgagaatcattgttgaaaacaaacatgtaattgttcgttctcatcagttgtgccaactaccaagcatttcattgatcagaatttatcgttgctcatgagaaccaaaagtaagacacttctcaataacattggatgcaaatttctgctagcttatcttcactatcttttctcgtatcaatataacacacatttatacataatttttgtgttattatatgttttcgttgcaacgcacgggcactcacctagttatagaataaaaat

SEQ ID NO: 77251 - DNA, 4037 bp, Zea Mays
gctgtcaatcgcctccccactgcggcagatccgcaatccgctcctccaccaccgcgctcctcacccacgccagggacaagactgtctacctccacgcccgcctcaccaactccgcggccaccgccaccgccacgcccctcccccatggtcgtcgagtccgagtggtggaaccagcgacgcatgcgcgtcgagggcgacgtgaaataggtgctccaccgcgggcacaacgggcacagtggaggtggaacgagcaccatcgagttctggttccaccgaatccaccgctcgcacaccggatccatcgctcccacatgcccgcacaccggatccaccgctccctcccccgcgatggcctggttccaccgagacaactgcggggctagggtttggattcgtgggtggagcccaaggctagatccagcagggggagggaggtagaggaggggagggaactgctggtggtcggcagtgggcgaaggcgcgacaatccaggatatggattcctgagcgtcacccacccgcccatccacgtcgcgcggtgtagtcatcccctatccgcagccgcctcgctccctctcccacaacaaatccattctcctcctcccactcgacgaggatcgcgaggatgctggaggacgtcgtcgctgtcacgcttgacgttagggcctccgatgcttgacgttagggcctctcgcttgaagaggaacacaaacagagctcatgttttttattttgctctgcattatctactgcttctctgtgggggcgttatttacagtatgtggcctgtttgttgtgttgttcctgcggaagggcgggcgggccgaaggtgtttaagaaaatgttgttgtcaacatcaacctcctggaagggccagaacgcaggcagcgcctcaactcgtcaccccatcagcacggtgagccccttatctggattgttatcatggtacgcggtgcgctgcaagcctgcaagtgacatcaaattggattggtagtcagcgggtgtcatagtgtcagttcgatggaatggttctgcagtgcatgtgcttctgtaatttccgcaagaagcagtcaacttctccctgatatggcactaggacattgtagtgattcccgcacgtttgtggaactcgacaacctaccagagcgccagatgtttcattgagaagagaactcctccagtctggctttccactggtctagtctctcctttaaaccaaatttgataccactcattgaagtcaatagctgggatgtagacatgtgaaaccacacctgtggaactttcagcgtgtgatgactgggtcactggtggaataccgtgttttttgagctgctcgctttcagttcgcggtcatagtcctgtgttttttgccttcagtttcttgatgtagttattgcctaaaatttctatatcttgttcatcgtactggagatgctacttcatgtggagctggtatgtaggatgattatcacgagtacttcaagcgctcattttaggaagacatcgctgcgcaagtgcctcaaggagtggaatggtgagcccctgtccatctactgaacagagaaaataccaggagcaaatgactgcatttttagttaatccttttattcctaaattaattgtgtttgttaatgcttttattcctaaaataagtaaccgagctcgggattcttcgcaatttgatttgcgagatcacccccataaaggcatcatgaatctttatgcctgtaaagacatcccactgtctctttcgttttcgataagatgttttggccgttacataatgcctgtaaggtagaatgccattgcagttgttgcatcagaaagcagccatttaacgccattgtaaagtgagtgatgattaaatacaaccacacttctgtctctcaggtttctgtacatggagtttttattgcacctcttcttccccagcaattagtacttgcagttagactaaatgaatcttgaatgccccttaactgttggctttacatggaactacttttgcatataccagacaactattttgaacttcaatatgtttttcaattccagcaattgatcgaaacatgatatatttgacatattcatgatggatttttgtatttgatgtgtcgctttttcatctatcaatgtaattcttggacataacattgcgcacaggtaccaaattcacacccttgttattgcgagttctgtaaatcatgatgttcacatgtgatggtttgattcagttcaatggttagcaagctatttgaacatgatactatagtagtgcatatttgctgtacaaatggccactgcccagctatttgcataagatattatgtttctcctgtgacattttctatgccacatacatttatatggcatttttgtgcaatttagtaccggtttttggttgatggtgtctggaggtgtgatgagacaaaaccctttgtacgtgatgaatatggactgatcagcaatgaagtgcttgtggaaaacaatgtactacccgttgtgcagccagagccttctatcagaggaactaatatggataagggtaccattttgaaaacagtatgtcttagaagtttaacattatattttcttgttctccatattcctgataactaatggtctgttatttactgtggccttaaataaacaaagatgcccctggagccatcatctcagaacccaagcatgcaaatagcagttatccgccatgtggtctctggaatattattacacaataccatatatgacgttgttcccctttctagcaagggaaccataacaggcatgctcactgcatcagattttgttttaatcttgagaaagttgcagagaaacattcaagttattggcaacgaagagcccatttctgcttggaaagaagcaaagctacagttctatggtgggcctgatggtgctgtcatgcagagaacgccattaatccattttgtacagacaggcaacattgatctcagggccaagaaagaagctcaactcggcatgcttcctgtttgaagcaagggcaacaaacttaccccaccagatctctgtcgccaaagcagggctagtgaataagctgtgtttcctcccggattgtcactgcttttatatttgtgcatttattttgagggaaacattttgcccaaaaaaggcctgcagtgcacgttttaaacaagtcatttgaaccaactcttatgctgaaaactgtatgtgatactgcagaaggcaacacactagcttgataggaaagttggttggcaagcataggtggactctggtgccttcatatatctatatatatattttaagttgacgatcttcgtgatgctgaaactgatgaagacctccgatgaaaaaagagacatgctgcacatgcacgagggtacttgcagatcgatgtcggctctatggacgaacactcgaccaagtcagatgaggagtatgagggcctagccatgcgcgacgtgatggctactggtccgacgatgagcagcaagctgtgagttaaagatgaactcacctgccctggagagtaacatccataggagtgaggcaaaatggctggtaccaccacaacatggacccgttcctgaagatgtccaaggaggtggtagccgacaccataatgtcttgtgtcattgtgtcaccggtcggcaacacactgcgctggtaccggcgggtgttgtgtttcttaggcgtctgcttctgtgctttgagttgtgctatagagtggttgtgccaactactgattttaaaagaaaaaggtgagctgagaatcattgttgaaaacaaacatgtaattgttcgttctcatcagttgtgccaactaccaagcatttcattgatcagaatttatcgttgctcatgagaaccaaaagtaagacacttctcaataacattggatgcaaatttctgctagcttatcttcactatcttttctcgtatcaatataacacacatttatacataatttttgtgttattatatgttttcgttgcaacgcacgggcactcacctagttatagaataaaaat

SEQ ID NO: 77252 - DNA, 3068 bp, Zea Mays
gctgtcaatcgcctccccactgcggcagatccgcaatccgctcctccaccaccgcgctcctcacccacgccagggacaagactgtctacctccacgcccgcctcaccaactccgcggccaccgccaccgccacgcccctcccccatggtcgtcgagtccgagtggtggaaccagcgacgcatgcgcgtcgagggcgacgtgaaataggtgctccaccgcgggcacaacgggcacagtggaggtggaacgagcaccatcgagttctggttccaccgaatccaccgctcgcacaccggatccatcgctcccacatgcccgcacaccggatccaccgctccctcccccgcgatggcctggttccaccgagacaactgcggggctagggtttggattcgtgggtggagcccaaggctagatccagcagggggagggaggtagaggaggggagggaactgctggtggtcggcagtgggcgaaggcgcgacaatccaggatatggattcctgaggatgattatcacgagtacttcaagcgctcattttaggaagacatcgctgcgcaagtgcctcaaggagtggaatggtgagcccctgtccatctactgaacagagaaaataccaggagcaaatgactgcatttttagttaatccttttattcctaaattaattgtgtttgttaatgcttttattcctaaaataagtaaccgagctcgggattcttcgcaatttgatttgcgagatcacccccataaaggcatcatgaatctttatgcctgtaaagacatcccactgtctctttcgttttcgataagatgttttggccgttacataatgcctgtaaggtagaatgccattgcagttgttgcatcagaaagcagccatttaacgccattgtaaagtgagtgatgattaaatacaaccacacttctgtctctcaggtttctgtacatggagtttttattgcacctcttcttccccagcaattagtacttgcagttagactaaatgaatcttgaatgccccttaactgttggctttacatggaactacttttgcatataccagacaactattttgaacttcaatatgtttttcaattccagcaattgatcgaaacatgatatatttgacatattcatgatggatttttgtatttgatgtgtcgctttttcatctatcaatgtaattcttggacataacattgcgcacaggtaccaaattcacacccttgttattgcgagttctgtaaatcatgatgttcacatgtgatggtttgattcagttcaatggttagcaagctatttgaacatgatactatagtagtgcatatttgctgtacaaatggccactgcccagctatttgcataagatattatgtttctcctgtgacattttctatgccacatacatttatatggcatttttgtgcaatttagtaccggtttttggttgatggtgtctggaggtgtgatgagacaaaaccctttgtacgtgatgaatatggactgatcagcaatgaagtgcttgtggaaaacaatgtactacccgttgtgcagccagagccttctatcagaggaactaatatggataaggatgcccctggagccatcatctcagaacccaagcatgcaaatagcagttatccgccatgtggtctctggaatattattacacaataccatatatgacgttgttcccctttctagcaagttaacagttttggacactcagcttcctgttaaacaagcatttaaaataatgcatgatgtgggtcttgctctggttcctttttgggatgaccgtcagggaaccataacaggcatgctcactgcatcagattttgttttaatcttgagaaagttgcagagaaacattcaagttattggcaacgaagagcccatttctgcttggaaagaagcaaagctacagttctatggtgggcctgatggtgctgtcatgcagagaacgccattaatccattttgtacagacaggcaacattgatctcagggccaagaaagaagctcaactcggcatgcttcctgtttgaagcaagggcaacaaacttaccccaccagatctctgtcgccaaagcagggctagtgaataagctgtgtttcctcccggattgtcactgcttttatatttgtgcatttattttgagggaaacattttgcccaaaaaaggcctgcagtgcacgttttaaacaagtcatttgaaccaactcttatgctgaaaactgtatgtgatactgcagaaggcaacacactagcttgataggaaagttggttggcaagcataggtggactctggtgccttcatatatctatatatatattttaagttgacgatcttcgtgatgctgaaactgatgaagacctccgatgaaaaaagagacatgctgcacatgcacgagggtacttgcagatcgatgtcggctctatggacgaacactcgaccaagtcagatgaggagtatgagggcctagccatgcgcgacgtgatggctactggtccgacgatgagcagcaagctgtgagttaaagatgaactcacctgccctggagagtaacatccataggagtgaggcaaaatggctggtaccaccacaacatggacccgttcctgaagatgtccaaggaggtggtagccgacaccataatgtcttgtgtcattgtgtcaccggtcggcaacacactgcgctggtaccggcgggtgttgtgtttcttaggcgtctgcttctgtgctttgagttgtgctatagagtggttgtgccaactactgattttaaaagaaaaaggtgagctgagaatcattgttgaaaacaaacatgtaattgttcgttctcatcagttgtgccaactaccaagcatttcattgatcagaatttatcgttgctcatgagaaccaaaagtaagacacttctcaataacattggatgcaaatttctgctagcttatcttcactatcttttctcgtatcaatataacacacatttatacataatttttgtgttattatatgttttcgttgcaacgcacgggcactcacctagttatagaataaaaat

SEQ ID NO: 77253 - DNA, 3100 bp, Zea Mays
gctgtcaatcgcctccccactgcggcagatccgcaatccgctcctccaccaccgcgctcctcacccacgccagggacaagactgtctacctccacgcccgcctcaccaactccgcggccaccgccaccgccacgcccctcccccatggtcgtcgagtccgagtggtggaaccagcgacgcatgcgcgtcgagggcgacgtgaaataggtgctccaccgcgggcacaacgggcacagtggaggtggaacgagcaccatcgagttctggttccaccgaatccaccgctcgcacaccggatccatcgctcccacatgcccgcacaccggatccaccgctccctcccccgcgatggcctggttccaccgagacaactgcggggctagggtttggattcgtgggtggagcccaaggctagatccagcagggggagggaggtagaggaggggagggaactgctggtggtcggcagtgggcgaaggcgcgacaatccaggatatggattcctgagcgtcacccacccgcccatccacgtcgcgcggtgtagtcatcccctatccgcagccgcctcgctccctctcccacaacaaatccattctcctcctcccactcgacgaggatcgcgaggatgctggaggacgtcgtcgctgtcacgcttgacgttagggcctccgatgcttgacgttagggcctctcgcttgaagaggaacacaaacagagctcatgttttttattttgctctgcattatctactgcttctctgtgggggcgttatttacagtatgtggcctgtttgttgtgttgttcctgcggaagggcgggcgggccgaaggtgtttaagaaaatgttgttgtcaacatcaacctcctggaagggccagaacgcaggcagcgcctcaactcgtcaccccatcagcacggtgagccccttatctggattgttatcatggtacgcggtgcgctgcaagcctgcaagtgacatcaaattggattggtagtcagcgggtgtcatagtgtcagttcgatggaatggttctgcagtgcatgtgcttctgtaatttccgcaagaagcagtcaacttctccctgatatggcactaggacattgtagtgattcccgcacgtttgtggaactcgacaacctaccagagcgccagatgtttcattgagaagagaactcctccagtctggctttccactggtctagtctctcctttaaaccaaatttgataccactcattgaagtcaatagctgggatgtagacatgtgaaaccacacctgtggaactttcagcgtgtgatgactgggtcactggtggaataccgtgttttttgagctgctcgctttcagttcgcggtcatagtcctgtgttttttgccttcagtttcttgatgtagttattgcctaaaatttctatatcttgttcatcgtactggagatgctacttcatgtggagctggtatgtaggatgattatcacgagtacttcaagcgctcattttaggaagacatcgctgcgcaagtgcctcaaggagtggaatgtaccggtttttggttgatggtgtctggaggtgtgatgagacaaaaccctttgtacgtgatgaatatggactgatcagcaatgaagtgcttgtggaaaacaatgtactacccgttgtgcagccagagccttctatcagaggaactaatatggataaggatgcccctggagccatcatctcagaacccaagcatgcaaatagcagttatccgccatgtggtctctggaatattattacacaataccatatatgacgttgttcccctttctagcaagggtcttgctctggttcctttttgggatgaccgtcagggaaccataacaggcatgctcactgcatcagattttgttttaatcttgagaaagttgcagagaaacattcaagttattggcaacgaagagcccatttctgcttggaaagaagcaaagctacagttctatggtgggcctgatggtgctgtcatgcagagaacgccattaatccatacaggcaacattgatctcagggccaagaaagaagctcaactcggcatgcttcctgtttgaagcaagggcaacaaacttaccccaccagatctctgtcgccaaagcagggctagtgaataagctgtgtttcctcccggattgtcactgcttttatatttgtgcatttattttgagggaaacattttgcccaaaaaaggcctgcagtgcacgttttaaacaagtcatttgaaccaactcttatgctgaaaactgtatgtgatactgcagaaggcaacacactagcttgataggaaagttggttggcaagcataggtggactctggtgccttcatatatctatatatatattttaagttgacgatcttcgtgatgctgaaactgatgaagacctccgatgaaaaaagagacatgctgcacatgcacgagggtacttgcagatcgatgtcggctctatggacgaacactcgaccaagtcagatgaggagtatgagggcctagccatgcgcgacgtgatggctactggtccgacgatgagcagcaagctgtgagttaaagatgaactcacctgccctggagagtaacatccataggagtgaggcaaaatggctggtaccaccacaacatggacccgttcctgaagatgtccaaggaggtggtagccgacaccataatgtcttgtgtcattgtgtcaccggtcggcaacacactgcgctggtaccggcgggtgttgtgtttcttaggcgtctgcttctgtgctttgagttgtgctatagagtggttgtgccaactactgattttaaaagaaaaaggtgagctgagaatcattgttgaaaacaaacatgtaattgttcgttctcatcagttgtgccaactaccaagcatttcattgatcagaatttatcgttgctcatgagaaccaaaagtaagacacttctcaataacattggatgcaaatttctgctagcttatcttcactatcttttctcgtatcaatataacacacatttatacataatttttgtgttattatatgttttcgttgcaacgcacgggcactcacctagttatagaataaaaat

SEQ ID NO: 77254 - DNA, 3980 bp, Zea Mays
gctgtcaatcgcctccccactgcggcagatccgcaatccgctcctccaccaccgcgctcctcacccacgccagggacaagactgtctacctccacgcccgcctcaccaactccgcggccaccgccaccgccacgcccctcccccatggtcgtcgagtccgagtggtggaaccagcgacgcatgcgcgtcgagggcgacgtgaaataggtgctccaccgcgggcacaacgggcacagtggaggtggaacgagcaccatcgagttctggttccaccgaatccaccgctcgcacaccggatccatcgctcccacatgcccgcacaccggatccaccgctccctcccccgcgatggcctggttccaccgagacaactgcggggctagggtttggattcgtgggtggagcccaaggctagatccagcagggggagggaggtagaggaggggagggaactgctggtggtcggcagtgggcgaaggcgcgacaatccaggatatggattcctgagcgtcacccacccgcccatccacgtcgcgcggtgtagtcatcccctatccgcagccgcctcgctccctctcccacaacaaatccattctcctcctcccactcgacgaggatcgcgaggatgctggaggacgtcgtcgctgtcacgcttgacgttagggcctccgatgcttgacgttagggcctctcgcttgaagaggaacacaaacagagctcatgttttttattttgctctgcattatctactgcttctctgtgggggcgttatttacagtatgtggcctgtttgttgtgttgttcctgcggaagggcgggcgggccgaaggtgtttaagaaaatgttgttgtcaacatcaacctcctggaagggccagaacgcaggcagcgcctcaactcgtcaccccatcagcacggtgagccccttatctggattgttatcatggtacgcggtgcgctgcaagcctgcaagtgacatcaaattggattggtagtcagcgggtgtcatagtgtcagttcgatggaatggttctgcagtgcatgtgcttctgtaatttccgcaagaagcagtcaacttctccctgatatggcactaggacattgtagtgattcccgcacgtttgtggaactcgacaacctaccagagcgccagatgtttcattgagaagagaactcctccagtctggctttccactggtctagtctctcctttaaaccaaatttgataccactcattgaagtcaatagctgggatgtagacatgtgaaaccacacctgtggaactttcagcgtgtgatgactgggtcactggtggaataccgtgttttttgagctgctcgctttcagttcgcggtcatagtcctgtgttttttgccttcagtttcttgatgtagttattgcctaaaatttctatatcttgttcatcgtactggagatgctacttcatgtggagctggtatgtaggatgattatcacgagtacttcaagcgctcattttaggaagacatcgctgcgcaagtgcctcaaggagtggaatggtgagcccctgtccatctactgaacagagaaaataccaggagcaaatgactgcatttttagttaatccttttattcctaaattaattgtgtttgttaatgcttttattcctaaaataagtaaccgagctcgggattcttcgcaatttgatttgcgagatcacccccataaaggcatcatgaatctttatgcctgtaaagacatcccactgtctctttcgttttcgataagatgttttggccgttacataatgcctgtaaggtagaatgccattgcagttgttgcatcagaaagcagccatttaacgccattgtaaagtgagtgatgattaaatacaaccacacttctgtctctcaggtttctgtacatggagtttttattgcacctcttcttccccagcaattagtacttgcagttagactaaatgaatcttgaatgccccttaactgttggctttacatggaactacttttgcatataccagacaactattttgaacttcaatatgtttttcaattccagcaattgatcgaaacatgatatatttgacatattcatgatggatttttgtatttgatgtgtcgctttttcatctatcaatgtaattcttggacataacattgcgcacaggtaccaaattcacacccttgttattgcgagttctgtaaatcatgatgttcacatgtgatggtttgattcagttcaatggttagcaagctatttgaacatgatactatagtagtgcatatttgctgtacaaatggccactgcccagctatttgcataagatattatgtttctcctgtgacattttctatgccacatacatttatatggcatttttgtgcaatttagtaccggtttttggttgatggtgtctggaggtgtgatgagacaaaaccctttgtacgtgatgaatatggactgatcagcaatgaagtgcttgtggaaaacaatgtactacccgttgtgcagccagagccttctatcagaggaactaatatggataaggatgcccctggagccatcatctcagaacccaagcatgcaaatagcagttatccgccatgtggtctctggaatattattacacaataccatatatgacgttgttcccctttctagcaagggtcttgctctggttcctttttgggatgaccgtcagggaaccataacaggcatgctcactgcatcagattttgttttaatcttgagaaagttgcagagaaacattcaagttattggcaacgaagagcccatttctgcttggaaagaagcaaagctacagttctatggtgggcctgatggtgctgtcatgcagagaacgccattaatccattttgtacagacaggcaacattgatctcagggccaagaaagaagctcaactcggcatgcttcctgtttgaagcaagggcaacaaacttaccccaccagatctctgtcgccaaagcagggctagtgaataagctgtgtttcctcccggattgtcactgcttttatatttgtgcatttattttgagggaaacattttgcccaaaaaaggcctgcagtgcacgttttaaacaagtcatttgaaccaactcttatgctgaaaactgtatgtgatactgcagaaggcaacacactagcttgataggaaagttggttggcaagcatagtctggttctcatggcaggtggactctggtgccttcatatatctatatatatattttaagttgacgatcttcgtgatgctgaaactgatgaagacctccgatgaaaaaagagacatgctgcacatgcacgagggtacttgcagatcgatgtcggctctatggacgaacactcgaccaagtcagatgaggagtatgagggcctagccatgcgcgacgtgatggctactggtccgacgatgagcagcaagctgtgagttaaagatgaactcacctgccctggagagtaacatccataggagtgaggcaaaatggctggtaccaccacaacatggacccgttcctgaagatgtccaaggaggtggtagccgacaccataatgtcttgtgtcattgtgtcaccggtcggcaacacactgcgctggtaccggcgggtgttgtgtttcttaggcgtctgcttctgtgctttgagttgtgctatagagtggttgtgccaactactgattttaaaagaaaaaggtgagctgagaatcattgttgaaaacaaacatgtaattgttcgttctcatcagttgtgccaactaccaagcatttcattgatcagaatttatcgttgctcatgagaaccaaaagtaagacacttctcaataacattggatgcaaatttctgctagcttatcttcactatcttttctcgtatcaatataacacacatttatacataatttttgtgttattatatgttttcgttgcaacgcacgggcactcacctagttatagaataaaaat

SEQ ID NO: 77255 - DNA, 2608 bp, Zea Mays
gctgtcaatcgcctccccactgcggcagatccgcaatccgctcctccaccaccgcgctcctcacccacgccagggacaagactgtctacctccacgcccgcctcaccaactccgcggccaccgccaccgccacgcccctcccccatggtcgtcgagtccgagtggtggaaccagcgacgcatgcgcgtcgagggcgacgtgaaataggtgctccaccgcgggcacaacgggcacagtggaggtggaacgagcaccatcgagttctggttccaccgaatccaccgctcgcacaccggatccatcgctcccacatgcccgcacaccggatccaccgctccctcccccgcgatggcctggttccaccgagacaactgcggggctagggtttggattcgtgggtggagcccaaggctagatccagcagggggagggaggtagaggaggggagggaactgctggtggtcggcagtgggcgaaggcgcgacaatccaggatatggattcctgagcgtcacccacccgcccatccacgtcgcgcggtgtagtcatcccctatccgcagccgcctcgctccctctcccacaacaaatccattctcctcctcccactcgacgaggatcgcgaggatgctggaggacgtcgtcgctgtcacgcttgacgttagggcctccgatgcttgacgttagggcctctcgcttgaagaggaacacaaacagagctcatgttttttattttgctctgcattatctactgcttctctgtgggggcgttatttacagtatgtggcctgtttgttgtgttgttcctgcggaagggcgggcgggccgaaggtgtttaagaaaatgttgttgtcaacatcaacctcctggaagggccagaacgcaggcagcgcctcaactcgtcaccccatcagcacgatgctacttcatgtggagctggtatgtaggatgattatcacgagtacttcaagcgctcattttaggaagacatcgctgcgcaagtgcctcaaggagtggaatgtaccggtttttggttgatggtgtctggaggtgtgatgagacaaaaccctttgtacgtgatgaatatggactgatcagcaatgaagtgcttgtggaaaacaatgtactacccgttgtgcagccagagccttctatcagaggaactaatatggataagggtaccattttgaaaacaatgcccctggagccatcatctcagaacccaagcatgcaaatagcagttatccgccatgtggtctctggaatattattacacaataccatatatgacgttgttcccctttctagcaagggtcttgctctggttcctttttgggatgaccgtcagggaaccataacaggcatgctcactgcatcagattttgttttaatcttgagaaagttgcagagaaacattcaagttattggcaacgaagagcccatttctgcttggaaagaagcaaagctacagttctatggtgggcctgatggtgctgtcatgcagagaacgccattaatccattttgtacagacaggcaacattgatctcagggccaagaaagaagctcaactcggcatgcttcctgtttgaagcaagggcaacaaacttaccccaccagatctctgtcgccaaagcagggctagtgaataagctgtgtttcctcccggattgtcactgcttttatatttgtgcatttattttgagggaaacattttgcccaaaaaaggcctgcagtgcacgttttaaacaagtcatttgaaccaactcttatgctgaaaactgtatgtgatactgcagaaggcaacacactagcttgataggaaagttggttggcaagcataggtggactctggtgccttcatatatctatatatatattttaagttgacgatcttcgtgatgctgaaactgatgaagacctccgatgaaaaaagagacatgctgcacatgcacgagggtacttgcagatcgatgtcggctctatggacgaacactcgaccaagtcagatgaggagtatgagggcctagccatgcgcgacgtgatggctactggtccgacgatgagcagcaagctgtgagttaaagatgaactcacctgccctggagagtaacatccataggagtgaggcaaaatggctggtaccaccacaacatggacccgttcctgaagatgtccaaggaggtggtagccgacaccataatgtcttgtgtcattgtgtcaccggtcggcaacacactgcgctggtaccggcgggtgttgtgtttcttaggcgtctgcttctgtgctttgagttgtgctatagagtggttgtgccaactactgattttaaaagaaaaaggtgagctgagaatcattgttgaaaacaaacatgtaattgttcgttctcatcagttgtgccaactaccaagcatttcattgatcagaatttatcgttgctcatgagaaccaaaagtaagacacttctcaataacattggatgcaaatttctgctagcttatcttcactatcttttctcgtatcaatataacacacatttatacataatttttgtgttattatatgttttcgttgcaacgcacgggcactcacctagttatagaataaaaat

SEQ ID NO: 77256 - DNA, 3811 bp, Zea Mays
gctgtcaatcgcctccccactgcggcagatccgcaatccgctcctccaccaccgcgctcctcacccacgccagggacaagactgtctacctccacgcccgcctcaccaactccgcggccaccgccaccgccacgcccctcccccatggtcgtcgagtccgagtggtggaaccagcgacgcatgcgcgtcgagggcgacgtgaaataggtgctccaccgcgggcacaacgggcacagtggaggtggaacgagcaccatcgagttctggttccaccgaatccaccgctcgcacaccggatccatcgctcccacatgcccgcacaccggatccaccgctccctcccccgcgatggcctggttccaccgagacaactgcggggctagggtttggattcgtgggtggagcccaaggctagatccagcagggggagggaggtagaggaggggagggaactgctggtggtcggcagtgggcgaaggcgcgacaatccaggatatggattcctgagcgtcacccacccgcccatccacgtcgcgcggtgtagtcatcccctatccgcagccgcctcgctccctctcccacaacaaatccattctcctcctcccactcgacgaggatcgcgaggatgctggaggacgtcgtcgctgtcacgcttgacgttagggcctccgatgcttgacgttagggcctctcgcttgaagaggaacacaaacagagctcatgttttttattttgctctgcattatctactgcttctctgtgggggcgttatttacagtatgtggcctgtttgttgtgttgttcctgcggaagggcgggcgggccgaaggtgtttaagaaaatgttgttgtcaacatcaacctcctggaagggccagaacgcaggcagcgcctcaactcgtcaccccatcagcacggatgattatcacgagtacttcaagcgctcattttaggaagacatcgctgcgcaagtgcctcaaggagtggaatggtgagcccctgtccatctactgaacagagaaaataccaggagcaaatgactgcatttttagttaatccttttattcctaaattaattgtgtttgttaatgcttttattcctaaaataagtaaccgagctcgggattcttcgcaatttgatttgcgagatcacccccataaaggcatcatgaatctttatgcctgtaaagacatcccactgtctctttcgttttcgataagatgttttggccgttacataatgcctgtaaggtagaatgccattgcagttgttgcatcagaaagcagccatttaacgccattgtaaagtgagtgatgattaaatacaaccacacttctgtctctcaggtttctgtacatggagtttttattgcacctcttcttccccagcaattagtacttgcagttagactaaatgaatcttgaatgccccttaactgttggctttacatggaactacttttgcatataccagacaactattttgaacttcaatatgtttttcaattccagcaattgatcgaaacatgatatatttgacatattcatgatggatttttgtatttgatgtgtcgctttttcatctatcaatgtaattcttggacataacattgcgcacaggtaccaaattcacacccttgttattgcgagttctgtaaatcatgatgttcacatgtgatggtttgattcagttcaatggttagcaagctatttgaacatgatactatagtagtgcatatttgctgtacaaatggccactgcccagctatttgcataagatattatgtttctcctgtgacattttctatgccacatacatttatatggcatttttgtgcaatttagtaccggtttttggttgatggtgtctggaggtgtgatgagacaaaaccctttgtacgtgatgaatatggactgatcagcaatgaagtgcttgtggaaaacaatgtactacccgttgtgcagccagagccttctatcagaggaactaatatggataagggtaccattttgaaaacaatgcccctggagccatcatctcagaacccaagcatgcaaatagcagttatccgccatgtggtctctggaatattattacacaataccatatatgacgttgttcccctttctagcaagttaacagttttggacactcagcttcctgttaaacaagcatttaaaataatgcatgatgtgggtcttgctctggttcctttttgggatgaccgtcagggaaccataacaggcatgctcactgcatcagattttgttttaatcttgagaaagttgcagagaaacattcaagttattggcaacgaagagcccatttctgcttggaaagaagcaaagctacagttctatggtgggcctgatggtgctgtcatgcagagaacgccattaatccatgtacttctccatatatttgctgattctttcatttgattcaatgtgtaagcagttgcaagatcagcactttcataatataaatatattacttgtatgaaattctagatatggtctccaatacaacattaagcttaatgtcgtttgtgttaaaaaattacaaatcatcttatgtcttgaaataaggagaaattgtttgggtttctcctccccaactttcagaattacctatttctattgtatgtttgatcatttggacttccattccatcaacaattttggtttattcagtgaggaactatgtttttaaccactctgtagtttgtacagacaggcaacattgatctcagggccaagaaagaagctcaactcggcatgcttcctgtttgaagcaagggcaacaaacttaccccaccagatctctgtcgccaaagcagggctagtgaataagctgtgtttcctcccggattgtcactgcttttatatttgtgcatttattttgagggaaacattttgcccaaaaaaggcctgcagtgcacgttttaaacaagtcatttgaaccaactcttatgctgaaaactgtatgtgatactgcagaaggcaacacactagcttgataggaaagttggttggcaagcataggtggactctggtgccttcatatatctatatatatattttaagttgacgatcttcgtgatgctgaaactgatgaagacctccgatgaaaaaagagacatgctgcacatgcacgagggtacttgcagatcgatgtcggctctatggacgaacactcgaccaagtcagatgaggagtatgagggcctagccatgcgcgacgtgatggctactggtccgacgatgagcagcaagctgtgagttaaagatgaactcacctgccctggagagtaacatccataggagtgaggcaaaatggctggtaccaccacaacatggacccgttcctgaagatgtccaaggaggtggtagccgacaccataatgtcttgtgtcattgtgtcaccggtcggcaacacactgcgctggtaccggcgggtgttgtgtttcttaggcgtctgcttctgtgctttgagttgtgctatagagtggttgtgccaactactgattttaaaagaaaaaggtgagctgagaatcattgttgaaaacaaacatgtaattgttcgttctcatcagttgtgccaactaccaagcatttcattgatcagaatttatcgttgctcatgagaaccaaaagtaagacacttctcaataacattggatgcaaatttctgctagcttatcttcactatcttttctcgtatcaatataacacacatttatacataatttttgtgttattatatgttttcgttgcaacgcacgggcactcacctagttatagaataaaaat

SEQ ID NO: 77257 - DNA, 3484 bp, Zea Mays
gctgtcaatcgcctccccactgcggcagatccgcaatccgctcctccaccaccgcgctcctcacccacgccagggacaagactgtctacctccacgcccgcctcaccaactccgcggccaccgccaccgccacgcccctcccccatggtcgtcgagtccgagtggtggaaccagcgacgcatgcgcgtcgagggcgacgtgaaataggtgctccaccgcgggcacaacgggcacagtggaggtggaacgagcaccatcgagttctggttccaccgaatccaccgctcgcacaccggatccatcgctcccacatgcccgcacaccggatccaccgctccctcccccgcgatggcctggttccaccgagacaactgcggggctagggtttggattcgtgggtggagcccaaggctagatccagcagggggagggaggtagaggaggggagggaactgctggtggtcggcagtgggcgaaggcgcgacaatccaggatatggattcctgagcgtcacccacccgcccatccacgtcgcgcggtgtagtcatcccctatccgcagccgcctcgctccctctcccacaacaaatccattctcctcctcccactcgacgaggatcgcgaggatgctggaggacgtcgtcgctgtcacgcttgacgttagggcctccgatgcttgacgttagggcctctcgcttgaagaggaacacaaacagagctcatgttttttattttgctctgcattatctactgcttctctgtgggggcgttatttacagtatgtggcctgtttgttgtgttgttcctgcggaagggcgggcgggccgaaggtgtttaagaaaatgttgttgtcaacatcaacctcctggaagggccagaacgcaggcagcgcctcaactcgtcaccccatcagcacggatgattatcacgagtacttcaagcgctcattttaggaagacatcgctgcgcaagtgcctcaaggagtggaatggtgagcccctgtccatctactgaacagagaaaataccaggagcaaatgactgcatttttagttaatccttttattcctaaattaattgtgtttgttaatgcttttattcctaaaataagtaaccgagctcgggattcttcgcaatttgatttgcgagatcacccccataaaggcatcatgaatctttatgcctgtaaagacatcccactgtctctttcgttttcgataagatgttttggccgttacataatgcctgtaaggtagaatgccattgcagttgttgcatcagaaagcagccatttaacgccattgtaaagtgagtgatgattaaatacaaccacacttctgtctctcaggtttctgtacatggagtttttattgcacctcttcttccccagcaattagtacttgcagttagactaaatgaatcttgaatgccccttaactgttggctttacatggaactacttttgcatataccagacaactattttgaacttcaatatgtttttcaattccagcaattgatcgaaacatgatatatttgacatattcatgatggatttttgtatttgatgtgtcgctttttcatctatcaatgtaattcttggacataacattgcgcacaggtaccaaattcacacccttgttattgcgagttctgtaaatcatgatgttcacatgtgatggtttgattcagttcaatggttagcaagctatttgaacatgatactatagtagtgcatatttgctgtacaaatggccactgcccagctatttgcataagatattatgtttctcctgtgacattttctatgccacatacatttatatggcatttttgtgcaatttagtaccggtttttggttgatggtgtctggaggtgtgatgagacaaaaccctttgtacgtgatgaatatggactgatcagcaatgaagtgcttgtggaaaacaatgtactacccgttgtgcagccagagccttctatcagaggaactaatatggataagggtaccattttgaaaacaatgcccctggagccatcatctcagaacccaagcatgcaaatagcagttatccgccatgtggtctctggaatattattacacaataccatatatgacgttgttcccctttctagcaagttaacagttttggacactcagcttcctgttaaacaagcatttaaaataatgcatgatgtgggtcttgctctggttcctttttgggatgaccgtcagggaaccataacaggcatgctcactgcatcagattttgttttaatcttgagaaagttgcagagaaacattcaagttattggcaacgaagagcccatttctgcttggaaagaagcaaagctacagttctatggtgggcctgatggtgctgtcatgcagagaacgccattaatccatacaggcaacattgatctcagggccaagaaagaagctcaactcggcatgcttcctgtttgaagcaagggcaacaaacttaccccaccagatctctgtcgccaaagcagggctagtgaataagctgtgtttcctcccggattgtcactgcttttatatttgtgcatttattttgagggaaacattttgcccaaaaaaggcctgcagtgcacgttttaaacaagtcatttgaaccaactcttatgctgaaaactgtatgtgatactgcagaaggcaacacactagcttgataggaaagttggttggcaagcataggtggactctggtgccttcatatatctatatatatattttaagttgacgatcttcgtgatgctgaaactgatgaagacctccgatgaaaaaagagacatgctgcacatgcacgagggtacttgcagatcgatgtcggctctatggacgaacactcgaccaagtcagatgaggagtatgagggcctagccatgcgcgacgtgatggctactggtccgacgatgagcagcaagctgtgagttaaagatgaactcacctgccctggagagtaacatccataggagtgaggcaaaatggctggtaccaccacaacatggacccgttcctgaagatgtccaaggaggtggtagccgacaccataatgtcttgtgtcattgtgtcaccggtcggcaacacactgcgctggtaccggcgggtgttgtgtttcttaggcgtctgcttctgtgctttgagttgtgctatagagtggttgtgccaactactgattttaaaagaaaaaggtgagctgagaatcattgttgaaaacaaacatgtaattgttcgttctcatcagttgtgccaactaccaagcatttcattgatcagaatttatcgttgctcatgagaaccaaaagtaagacacttctcaataacattggatgcaaatttctgctagcttatcttcactatcttttctcgtatcaatataacacacatttatacataatttttgtgttattatatgttttcgttgcaacgcacgggcactcacctagttatagaataaaaat

SEQ ID NO: 77258 - DNA, 3182 bp, Zea Mays
gctgtcaatcgcctccccactgcggcagatccgcaatccgctcctccaccaccgcgctcctcacccacgccagggacaagactgtctacctccacgcccgcctcaccaactccgcggccaccgccaccgccacgcccctcccccatggtcgtcgagtccgagtggtggaaccagcgacgcatgcgcgtcgagggcgacgtgaaataggtgctccaccgcgggcacaacgggcacagtggaggtggaacgagcaccatcgagttctggttccaccgaatccaccgctcgcacaccggatccatcgctcccacatgcccgcacaccggatccaccgctccctcccccgcgatggcctggttccaccgagacaactgcggggctagggtttggattcgtgggtggagcccaaggctagatccagcagggggagggaggtagaggaggggagggaactgctggtggtcggcagtgggcgaaggcgcgacaatccaggatatggattcctgagcgtcacccacccgcccatccacgtcgcgcggtgtagtcatcccctatccgcagccgcctcgctccctctcccacaacaaatccattctcctcctcccactcgacgaggatcgcgaggatgctggaggacgtcgtcgctgtcacgcttgacgttagggcctccgatgcttgacgttagggcctctcgcttgaagaggaacacaaacagagctcatgttttttattttgctctgcattatctactgcttctctgtgggggcgttatttacagtatgtggcctgtttgttgtgttgttcctgcggaagggcgggcgggccgaaggtgtttaagaaaatgttgttgtcaacatcaacctcctggaagggccagaacgcaggcagcgcctcaactcgtcaccccatcagcacggatgattatcacgagtacttcaagcgctcattttaggaagacatcgctgcgcaagtgcctcaaggagtggaatggtgagcccctgtccatctactgaacagagaaaataccaggagcaaatgactgcatttttagttaatccttttattcctaaattaattgtgtttgttaatgcttttattcctaaaataagtaaccgagctcgggattcttcgcaatttgatttgcgagatcacccccataaaggcatcatgaatctttatgcctgtaaagacatcccactgtctctttcgttttcgataagatgttttggccgttacataatgcctgtaaggtagaatgccattgcagttgttgcatcagaaagcagccatttaacgccattgtaaagtgagtgatgattaaatacaaccacacttctgtctctcaggtttctgtacatggagtttttattgcacctcttcttccccagcaattagtacttgcagttagactaaatgaatcttgaatgccccttaactgttggctttacatggaactacttttgcatataccagacaactattttgaacttcaatatgtttttcaattccagcaattgatcgaaacatgatatatttgacatattcatgatggatttttgtatttgatgtgtcgctttttcatctatcaatgtaattcttggacataacattgcgcacagtaccggtttttggttgatggtgtctggaggtgtgatgagacaaaaccctttgtacgtgatgaatatggactgatcagcaatgaagtgcttgtggaaaacaatgtactacccgttgtgcagccagagccttctatcagaggaactaatatggataaggatgcccctggagccatcatctcagaacccaagcatgcaaatagcagttatccgccatgtggtctctggaatattattacacaataccatatatgacgttgttcccctttctagcaagggtcttgctctggttcctttttgggatgaccgtcagggaaccataacaggcatgctcactgcatcagattttgttttaatcttgagaaagttgcagagaaacattcaagttattggcaacgaagagcccatttctgcttggaaagaagcaaagctacagttctatggtgggcctgatggtgctgtcatgcagagaacgccattaatccatacaggcaacattgatctcagggccaagaaagaagctcaactcggcatgcttcctgtttgaagcaagggcaacaaacttaccccaccagatctctgtcgccaaagcagggctagtgaataagctgtgtttcctcccggattgtcactgcttttatatttgtgcatttattttgagggaaacattttgcccaaaaaaggcctgcagtgcacgttttaaacaagtcatttgaaccaactcttatgctgaaaactgtatgtgatactgcagaaggcaacacactagcttgataggaaagttggttggcaagcataggtggactctggtgccttcatatatctatatatatattttaagttgacgatcttcgtgatgctgaaactgatgaagacctccgatgaaaaaagagacatgctgcacatgcacgagggtacttgcagatcgatgtcggctctatggacgaacactcgaccaagtcagatgaggagtatgagggcctagccatgcgcgacgtgatggctactggtccgacgatgagcagcaagctgtgagttaaagatgaactcacctgccctggagagtaacatccataggagtgaggcaaaatggctggtaccaccacaacatggacccgttcctgaagatgtccaaggaggtggtagccgacaccataatgtcttgtgtcattgtgtcaccggtcggcaacacactgcgctggtaccggcgggtgttgtgtttcttaggcgtctgcttctgtgctttgagttgtgctatagagtggttgtgccaactactgattttaaaagaaaaaggtgagctgagaatcattgttgaaaacaaacatgtaattgttcgttctcatcagttgtgccaactaccaagcatttcattgatcagaatttatcgttgctcatgagaaccaaaagtaagacacttctcaataacattggatgcaaatttctgctagcttatcttcactatcttttctcgtatcaatataacacacatttatacataatttttgtgttattatatgttttcgttgcaacgcacgggcactcacctagttatagaataaaaat

SEQ ID NO: 77259 - DNA, 2897 bp, Zea Mays
gctgtcaatcgcctccccactgcggcagatccgcaatccgctcctccaccaccgcgctcctcacccacgccagggacaagactgtctacctccacgcccgcctcaccaactccgcggccaccgccaccgccacgcccctcccccatggtcgtcgagtccgagtggtggaaccagcgacgcatgcgcgtcgagggcgacgtgaaataggtgctccaccgcgggcacaacgggcacagtggaggtggaacgagcaccatcgagttctggttccaccgaatccaccgctcgcacaccggatccatcgctcccacatgcccgcacaccggatccaccgctccctcccccgcgatggcctggttccaccgagacaactgcggggctagggtttggattcgtgggtggagcccaaggctagatccagcagggggagggaggtagaggaggggagggaactgctggtggtcggcagtgggcgaaggcgcgacaatccaggatatggattcctgagcgtcacccacccgcccatccacgtcgcgcggtgtagtcatcccctatccgcagccgcctcgctccctctcccacaacaaatccattctcctcctcccactcgacgaggatcgcgaggatgctggaggacgtcgtcgctgtcacgcttgacgttagggcctccgatgcttgacgttagggcctctcgcttgaagaggaacacaaacagagctcatgttttttattttgctctgcattatctactgcttctctgtgggggcgttatttacagtatgtggcctgtttgttgtgttgttcctgcggaagggcgggcgggccgaaggtgtttaagaaaatgttgttgtcaacatcaacctcctggaagggccagaacgcaggcagcgcctcaactcgtcaccccatcagcacggatgattatcacgagtacttcaagcgctcattttaggaagacatcgctgcgcaagtgcctcaaggagtggaatgtaccggtttttggttgatggtgtctggaggtgtgatgagacaaaaccctttgtacgtgatgaatatggactgatcagcaatgaagtgcttgtggaaaacaatgtactacccgttgtgcagccagagccttctatcagaggaactaatatggataagggtaccattttgaaaacaatgcccctggagccatcatctcagaacccaagcatgcaaatagcagttatccgccatgtggtctctggaatattattacacaataccatatatgacgttgttcccctttctagcaagggtcttgctctggttcctttttgggatgaccgtcagggaaccataacaggcatgctcactgcatcagattttgttttaatcttgagaaagttgcagagaaacattcaagttattggcaacgaagagcccatttctgcttggaaagaagcaaagctacagttctatggtgggcctgatggtgctgtcatgcagagaacgccattaatccatgtacttctccatatatttgctgattctttcatttgattcaatgtgtaagcagttgcaagatcagcactttcataatataaatatattacttgtatgaaattctagatatggtctccaatacaacattaagcttaatgtcgtttgtgttaaaaaattacaaatcatcttatgtcttgaaataaggagaaattgtttgggtttctcctccccaactttcagaattacctatttctattgtatgtttgatcatttggacttccattccatcaacaattttggtttattcagtgaggaactatgtttttaaccactctgtagtttgtacagacaggcaacattgatctcagggccaagaaagaagctcaactcggcatgcttcctgtttgaagcaagggcaacaaacttaccccaccagatctctgtcgccaaagcagggctagtgaataagctgtgtttcctcccggattgtcactgcttttatatttgtgcatttattttgagggaaacattttgcccaaaaaaggcctgcagtgcacgttttaaacaagtcatttgaaccaactcttatgctgaaaactgtatgtgatactgcagaaggcaacacactagcttgataggaaagttggttggcaagcataggtggactctggtgccttcatatatctatatatatattttaagttgacgatcttcgtgatgctgaaactgatgaagacctccgatgaaaaaagagacatgctgcacatgcacgagggtacttgcagatcgatgtcggctctatggacgaacactcgaccaagtcagatgaggagtatgagggcctagccatgcgcgacgtgatggctactggtccgacgatgagcagcaagctgtgagttaaagatgaactcacctgccctggagagtaacatccataggagtgaggcaaaatggctggtaccaccacaacatggacccgttcctgaagatgtccaaggaggtggtagccgacaccataatgtcttgtgtcattgtgtcaccggtcggcaacacactgcgctggtaccggcgggtgttgtgtttcttaggcgtctgcttctgtgctttgagttgtgctatagagtggttgtgccaactactgattttaaaagaaaaaggtgagctgagaatcattgttgaaaacaaacatgtaattgttcgttctcatcagttgtgccaactaccaagcatttcattgatcagaatttatcgttgctcatgagaaccaaaagtaagacacttctcaataacattggatgcaaatttctgctagcttatcttcactatcttttctcgtatcaatataacacacatttatacataatttttgtgttattatatgttttcgttgcaacgcacgggcactcacctagttatagaataaaaat

SEQ ID NO: 77260 - DNA, 3333 bp, Zea Mays
gctgtcaatcgcctccccactgcggcagatccgcaatccgctcctccaccaccgcgctcctcacccacgccagggacaagactgtctacctccacgcccgcctcaccaactccgcggccaccgccaccgccacgcccctcccccatggtcgtcgagtccgagtggtggaaccagcgacgcatgcgcgtcgagggcgacgtgaaataggtgctccaccgcgggcacaacgggcacagtggaggtggaacgagcaccatcgagttctggttccaccgaatccaccgctcgcacaccggatccatcgctcccacatgcccgcacaccggatccaccgctccctcccccgcgatggcctggttccaccgagacaactgcggggctagggtttggattcgtgggtggagcccaaggctagatccagcagggggagggaggtagaggaggggagggaactgctggtggtcggcagtgggcgaaggcgcgacaatccaggatatggattcctgagcgtcacccacccgcccatccacgtcgcgcggtgtagtcatcccctatccgcagccgcctcgctccctctcccacaacaaatccattctcctcctcccactcgacgaggatcgcgaggatgctggaggacgtcgtcgctgtcacgcttgacgttagggcctccgatgcttgacgttagggcctctcgcttgaagaggaacacaaacagagctcatgttttttattttgctctgcattatctactgcttctctgtgggggcgttatttacagtatgtggcctgtttgttgtgttgttcctgcggaagggcgggcgggccgaaggtgtttaagaaaatgttgttgtcaacatcaacctcctggaagggccagaacgcaggcagcgcctcaactcgtcaccccatcagcacggatgattatcacgagtacttcaagcgctcattttaggaagacatcgctgcgcaagtgcctcaaggagtggaatggtgagcccctgtccatctactgaacagagaaaataccaggagcaaatgactgcatttttagttaatccttttattcctaaattaattgtgtttgttaatgcttttattcctaaaataagtaaccgagctcgggattcttcgcaatttgatttgcgagatcacccccataaaggcatcatgaatctttatgcctgtaaagacatcccactgtctctttcgttttcgataagatgttttggccgttacataatgcctgtaaggtagaatgccattgcagttgttgcatcagaaagcagccatttaacgccattgtaaagtgagtgatgattaaatacaaccacacttctgtctctcaggtttctgtacatggagtttttattgcacctcttcttccccagcaattagtacttgcagttagactaaatgaatcttgaatgccccttaactgttggctttacatggaactacttttgcatataccagacaactattttgaacttcaatatgtttttcaattccagcaattgatcgaaacatgatatatttgacatattcatgatggatttttgtatttgatgtgtcgctttttcatctatcaatgtaattcttggacataacattgcgcacaggtaccaaattcacacccttgttattgcgagttctgtaaatcatgatgttcacatgtgatggtttgattcagttcaatgtaccggtttttggttgatggtgtctggaggtgtgatgagacaaaaccctttgtacgtgatgaatatggactgatcagcaatgaagtgcttgtggaaaacaatgtactacccgttgtgcagccagagccttctatcagaggaactaatatggataagggtaccattttgaaaacaatgcccctggagccatcatctcagaacccaagcatgcaaatagcagttatccgccatgtggtctctggaatattattacacaataccatatatgacgttgttcccctttctagcaagttaacagttttggacactcagcttcctgttaaacaagcatttaaaataatgcatgatgtgggtcttgctctggttcctttttgggatgaccgtcagggaaccataacaggcatgctcactgcatcagattttgttttaatcttgagaaagttgcagagaaacattcaagttattggcaacgaagagcccatttctgcttggaaagaagcaaagctacagttctatggtgggcctgatggtgctgtcatgcagagaacgccattaatccatgcaacattgatctcagggccaagaaagaagctcaactcggcatgcttcctgtttgaagcaagggcaacaaacttaccccaccagatctctgtcgccaaagcagggctagtgaataagctgtgtttcctcccggattgtcactgcttttatatttgtgcatttattttgagggaaacattttgcccaaaaaaggcctgcagtgcacgttttaaacaagtcatttgaaccaactcttatgctgaaaactgtatgtgatactgcagaaggcaacacactagcttgataggaaagttggttggcaagcataggtggactctggtgccttcatatatctatatatatattttaagttgacgatcttcgtgatgctgaaactgatgaagacctccgatgaaaaaagagacatgctgcacatgcacgagggtacttgcagatcgatgtcggctctatggacgaacactcgaccaagtcagatgaggagtatgagggcctagccatgcgcgacgtgatggctactggtccgacgatgagcagcaagctgtgagttaaagatgaactcacctgccctggagagtaacatccataggagtgaggcaaaatggctggtaccaccacaacatggacccgttcctgaagatgtccaaggaggtggtagccgacaccataatgtcttgtgtcattgtgtcaccggtcggcaacacactgcgctggtaccggcgggtgttgtgtttcttaggcgtctgcttctgtgctttgagttgtgctatagagtggttgtgccaactactgattttaaaagaaaaaggtgagctgagaatcattgttgaaaacaaacatgtaattgttcgttctcatcagttgtgccaactaccaagcatttcattgatcagaatttatcgttgctcatgagaaccaaaagtaagacacttctcaataacattggatgcaaatttctgctagcttatcttcactatcttttctcgtatcaatataacacacatttatacataatttttgtgttattatatgttttcgttgcaacgcacgggcactcacctagttatagaataaaaat

SEQ ID NO: 77261 - DNA, 3858 bp, Zea Mays
gctgtcaatcgcctccccactgcggcagatccgcaatccgctcctccaccaccgcgctcctcacccacgccagggacaagactgtctacctccacgcccgcctcaccaactccgcggccaccgccaccgccacgcccctcccccatggtcgtcgagtccgagtggtggaaccagcgacgcatgcgcgtcgagggcgacgtgaaataggtgctccaccgcgggcacaacgggcacagtggaggtggaacgagcaccatcgagttctggttccaccgaatccaccgctcgcacaccggatccatcgctcccacatgcccgcacaccggatccaccgctccctcccccgcgatggcctggttccaccgagacaactgcggggctagggtttggattcgtgggtggagcccaaggctagatccagcagggggagggaggtagaggaggggagggaactgctggtggtcggcagtgggcgaaggcgcgacaatccaggatatggattcctgagcgtcacccacccgcccatccacgtcgcgcggtgtagtcatcccctatccgcagccgcctcgctccctctcccacaacaaatccattctcctcctcccactcgacgaggatcgcgaggatgctggaggacgtcgtcgctgtcacgcttgacgttagggcctccgatgcttgacgttagggcctctcgcttgaagaggaacacaaacagagctcatgttttttattttgctctgcattatctactgcttctctgtgggggcgttatttacagtatgtggcctgtttgttgtgttgttcctgcggaagggcgggcgggccgaaggtgtttaagaaaatgttgttgtcaacatcaacctcctggaagggccagaacgcaggcagcgcctcaactcgtcaccccatcagcacggtgagccccttatctggattgttatcatggtacgcggtgcgctgcaagcctgcaagtgacatcaaattggattggtagtcagcgggtgtcatagtgtcagttcgatggaatggttctgcagtgcatgtgcttctgtaatttccgcaagaagcagtcaacttctccctgatatggcactaggacattgtagtgattcccgcacgtttgtggaactcgacaacctaccagagcgccagatgtttcattgagaagagaactcctccagtctggctttccactggtctagtctctcctttaaaccaaatttgataccactcattgaagtcaatagctgggatgtagacatgtgaaaccacacctgtggaactttcagcgtgtgatgactgggtcactggtggaataccgtgttttttgagctgctcgctttcagttcgcggtcatagtcctgtgttttttgccttcagtttcttgatgtagttattgcctaaaatttctatatcttgttcatcgtactggagatgctacttcatgtggagctggtatgtaggatgattatcacgagtacttcaagcgctcattttaggaagacatcgctgcgcaagtgcctcaaggagtggaatggtgagcccctgtccatctactgaacagagaaaataccaggagcaaatgactgcatttttagttaatccttttattcctaaattaattgtgtttgttaatgcttttattcctaaaataagtaaccgagctcgggattcttcgcaatttgatttgcgagatcacccccataaaggcatcatgaatctttatgcctgtaaagacatcccactgtctctttcgttttcgataagatgttttggccgttacataatgcctgtaaggtagaatgccattgcagttgttgcatcagaaagcagccatttaacgccattgtaaagtgagtgatgattaaatacaaccacacttctgtctctcaggtttctgtacatggagtttttattgcacctcttcttccccagcaattagtacttgcagttagactaaatgaatcttgaatgccccttaactgttggctttacatggaactacttttgcatataccagacaactattttgaacttcaatatgtttttcaattccagcaattgatcgaaacatgatatatttgacatattcatgatggatttttgtatttgatgtgtcgctttttcatctatcaatgtaattcttggacataacattgcgcacaggtaccaaattcacacccttgttattgcgagttctgtaaatcatgatgttcacatgtgatggtttgattcagttcaatggttagcaagctatttgaacatgatactatagtagtgcatatttgctgtacaaatggccactgcccagctatttgcataagatattatgtttctcctgtgacattttctatgccacatacatttatatggcatttttgtgcaatttagtaccggtttttggttgatggtgtctggaggtgtgatgagacaaaaccctttgtacgtgatgaatatggactgatcagcaatgaagtgcttgtggaaaacaatgtactacccgttgtgcagccagagccttctatcagaggaactaatatggataaggatgcccctggagccatcatctcagaacccaagcatgcaaatagcagttatccgccatgtggtctctggaatattattacacaataccatatatgacgttgttcccctttctagcaagagaaacattcaagttattggcaacgaagagcccatttctgcttggaaagaagcaaagctacagttctatggtgggcctgatggtgctgtcatgcagagaacgccattaatccatacaggcaacattgatctcagggccaagaaagaagctcaactcggcatgcttcctgtttgaagcaagggcaacaaacttaccccaccagatctctgtcgccaaagcagggctagtgaataagctgtgtttcctcccggattgtcactgcttttatatttgtgcatttattttgagggaaacattttgcccaaaaaaggcctgcagtgcacgttttaaacaagtcatttgaaccaactcttatgctgaaaactgtatgtgatactgcagaaggcaacacactagcttgataggaaagttggttggcaagcataggtggactctggtgccttcatatatctatatatatattttaagttgacgatcttcgtgatgctgaaactgatgaagacctccgatgaaaaaagagacatgctgcacatgcacgagggtacttgcagatcgatgtcggctctatggacgaacactcgaccaagtcagatgaggagtatgagggcctagccatgcgcgacgtgatggctactggtccgacgatgagcagcaagctgtgagttaaagatgaactcacctgccctggagagtaacatccataggagtgaggcaaaatggctggtaccaccacaacatggacccgttcctgaagatgtccaaggaggtggtagccgacaccataatgtcttgtgtcattgtgtcaccggtcggcaacacactgcgctggtaccggcgggtgttgtgtttcttaggcgtctgcttctgtgctttgagttgtgctatagagtggttgtgccaactactgattttaaaagaaaaaggtgagctgagaatcattgttgaaaacaaacatgtaattgttcgttctcatcagttgtgccaactaccaagcatttcattgatcagaatttatcgttgctcatgagaaccaaaagtaagacacttctcaataacattggatgcaaatttctgctagcttatcttcactatcttttctcgtatcaatataacacacatttatacataatttttgtgttattatatgttttcgttgcaacgcacgggcactcacctagttatagaataaaaat

SEQ ID NO: 77262 - DNA, 3433 bp, Zea Mays
gctgtcaatcgcctccccactgcggcagatccgcaatccgctcctccaccaccgcgctcctcacccacgccagggacaagactgtctacctccacgcccgcctcaccaactccgcggccaccgccaccgccacgcccctcccccatggtcgtcgagtccgagtggtggaaccagcgacgcatgcgcgtcgagggcgacgtgaaataggtgctccaccgcgggcacaacgggcacagtggaggtggaacgagcaccatcgagttctggttccaccgaatccaccgctcgcacaccggatccatcgctcccacatgcccgcacaccggatccaccgctccctcccccgcgatggcctggttccaccgagacaactgcggggctagggtttggattcgtgggtggagcccaaggctagatccagcagggggagggaggtagaggaggggagggaactgctggtggtcggcagtgggcgaaggcgcgacaatccaggatatggattcctgagcgtcacccacccgcccatccacgtcgcgcggtgtagtcatcccctatccgcagccgcctcgctccctctcccacaacaaatccattctcctcctcccactcgacgaggatcgcgaggatgctggaggacgtcgtcgctgtcacgcttgacgttagggcctccgatgcttgacgttagggcctctcgcttgaagaggaacacaaacagagctcatgttttttattttgctctgcattatctactgcttctctgtgggggcgttatttacagtatgtggcctgtttgttgtgttgttcctgcggaagggcgggcgggccgaaggtgtttaagaaaatgttgttgtcaacatcaacctcctggaagggccagaacgcaggcagcgcctcaactcgtcaccccatcagcacggatgattatcacgagtacttcaagcgctcattttaggaagacatcgctgcgcaagtgcctcaaggagtggaatggtgagcccctgtccatctactgaacagagaaaataccaggagcaaatgactgcatttttagttaatccttttattcctaaattaattgtgtttgttaatgcttttattcctaaaataagtaaccgagctcgggattcttcgcaatttgatttgcgagatcacccccataaaggcatcatgaatctttatgcctgtaaagacatcccactgtctctttcgttttcgataagatgttttggccgttacataatgcctgtaaggtagaatgccattgcagttgttgcatcagaaagcagccatttaacgccattgtaaagtgagtgatgattaaatacaaccacacttctgtctctcaggtttctgtacatggagtttttattgcacctcttcttccccagcaattagtacttgcagttagactaaatgaatcttgaatgccccttaactgttggctttacatggaactacttttgcatataccagacaactattttgaacttcaatatgtttttcaattccagcaattgatcgaaacatgatatatttgacatattcatgatggatttttgtatttgatgtgtcgctttttcatctatcaatgtaattcttggacataacattgcgcacaggtaccaaattcacacccttgttattgcgagttctgtaaatcatgatgttcacatgtgatggtttgattcagttcaatggttagcaagctatttgaacatgatactatagtagtgcatatttgctgtacaaatggccactgcccagctatttgcataagatattatgtttctcctgtgacattttctatgccacatacatttatatggcatttttgtgcaatttagtaccggtttttggttgatggtgtctggaggtgtgatgagacaaaaccctttgtacgtgatgaatatggactgatcagcaatgaagtgcttgtggaaaacaatgtactacccgttgtgcagccagagccttctatcagaggaactaatatggataagggtaccattttgaaaacaatgcccctggagccatcatctcagaacccaagcatgcaaatagcagttatccgccatgtggtctctggaatattattacacaataccatatatgacgttgttcccctttctagcaagggtcttgctctggttcctttttgggatgaccgtcagggaaccataacaggcatgctcactgcatcagattttgttttaatcttgagaaagttgcagagaaacattcaagttattggcaacgaagagcccatttctgcttggaaagaagcaaagctacagttctatggtgggcctgatggtgctgtcatgcagagaacgccattaatccattttgtacagacaggcaacattgatctcagggccaagaaagaagctcaactcggcatgcttcctgtttgaagcaagggcaacaaacttaccccaccagatctctgtcgccaaagcagggctagtgaataagctgtgtttcctcccggattgtcactgcttttatatttgtgcatttattttgagggaaacattttgcccaaaaaaggcctgcagtgcacgttttaaacaagtcatttgaaccaactcttatgctgaaaactgtatgtgatactgcagaaggcaacacactagcttgataggaaagttggttggcaagcataggtggactctggtgccttcatatatctatatatatattttaagttgacgatcttcgtgatgctgaaactgatgaagacctccgatgaaaaaagagacatgctgcacatgcacgagggtacttgcagatcgatgtcggctctatggacgaacactcgaccaagtcagatgaggagtatgagggcctagccatgcgcgacgtgatggctactggtccgacgatgagcagcaagctgtgagttaaagatgaactcacctgccctggagagtaacatccataggagtgaggcaaaatggctggtaccaccacaacatggacccgttcctgaagatgtccaaggaggtggtagccgacaccataatgtcttgtgtcattgtgtcaccggtcggcaacacactgcgctggtaccggcgggtgttgtgtttcttaggcgtctgcttctgtgctttgagttgtgctatagagtggttgtgccaactactgattttaaaagaaaaaggtgagctgagaatcattgttgaaaacaaacatgtaattgttcgttctcatcagttgtgccaactaccaagcatttcattgatcagaatttatcgttgctcatgagaaccaaaagtaagacacttctcaataacattggatgcaaatttctgctagcttatcttcactatcttttctcgtatcaatataacacacatttatacataatttttgtgttattatatgttttcgttgcaacgcacgggcactcacctagttatagaataaaaat

SEQ ID NO: 77263 - DNA, 4028 bp, Zea Mays
gctgtcaatcgcctccccactgcggcagatccgcaatccgctcctccaccaccgcgctcctcacccacgccagggacaagactgtctacctccacgcccgcctcaccaactccgcggccaccgccaccgccacgcccctcccccatggtcgtcgagtccgagtggtggaaccagcgacgcatgcgcgtcgagggcgacgtgaaataggtgctccaccgcgggcacaacgggcacagtggaggtggaacgagcaccatcgagttctggttccaccgaatccaccgctcgcacaccggatccatcgctcccacatgcccgcacaccggatccaccgctccctcccccgcgatggcctggttccaccgagacaactgcggggctagggtttggattcgtgggtggagcccaaggctagatccagcagggggagggaggtagaggaggggagggaactgctggtggtcggcagtgggcgaaggcgcgacaatccaggatatggattcctgagcgtcacccacccgcccatccacgtcgcgcggtgtagtcatcccctatccgcagccgcctcgctccctctcccacaacaaatccattctcctcctcccactcgacgaggatcgcgaggatgctggaggacgtcgtcgctgtcacgcttgacgttagggcctccgatgcttgacgttagggcctctcgcttgaagaggaacacaaacagagctcatgttttttattttgctctgcattatctactgcttctctgtgggggcgttatttacagtatgtggcctgtttgttgtgttgttcctgcggaagggcgggcgggccgaaggtgtttaagaaaatgttgttgtcaacatcaacctcctggaagggccagaacgcaggcagcgcctcaactcgtcaccccatcagcacggtgagccccttatctggattgttatcatggtacgcggtgcgctgcaagcctgcaagtgacatcaaattggattggtagtcagcgggtgtcatagtgtcagttcgatggaatggttctgcagtgcatgtgcttctgtaatttccgcaagaagcagtcaacttctccctgatatggcactaggacattgtagtgattcccgcacgtttgtggaactcgacaacctaccagagcgccagatgtttcattgagaagagaactcctccagtctggctttccactggtctagtctctcctttaaaccaaatttgataccactcattgaagtcaatagctgggatgtagacatgtgaaaccacacctgtggaactttcagcgtgtgatgactgggtcactggtggaataccgtgttttttgagctgctcgctttcagttcgcggtcatagtcctgtgttttttgccttcagtttcttgatgtagttattgcctaaaatttctatatcttgttcatcgtactggagatgctacttcatgtggagctggtatgtaggatgattatcacgagtacttcaagcgctcattttaggaagacatcgctgcgcaagtgcctcaaggagtggaatggtgagcccctgtccatctactgaacagagaaaataccaggagcaaatgactgcatttttagttaatccttttattcctaaattaattgtgtttgttaatgcttttattcctaaaataagtaaccgagctcgggattcttcgcaatttgatttgcgagatcacccccataaaggcatcatgaatctttatgcctgtaaagacatcccactgtctctttcgttttcgataagatgttttggccgttacataatgcctgtaaggtagaatgccattgcagttgttgcatcagaaagcagccatttaacgccattgtaaagtgagtgatgattaaatacaaccacacttctgtctctcaggtttctgtacatggagtttttattgcacctcttcttccccagcaattagtacttgcagttagactaaatgaatcttgaatgccccttaactgttggctttacatggaactacttttgcatataccagacaactattttgaacttcaatatgtttttcaattccagcaattgatcgaaacatgatatatttgacatattcatgatggatttttgtatttgatgtgtcgctttttcatctatcaatgtaattcttggacataacattgcgcacaggtaccaaattcacacccttgttattgcgagttctgtaaatcatgatgttcacatgtgatggtttgattcagttcaatggttagcaagctatttgaacatgatactatagtagtgcatatttgctgtacaaatggccactgcccagctatttgcataagatattatgtttctcctgtgacattttctatgccacatacatttatatggcatttttgtgcaatttagtaccggtttttggttgatggtgtctggaggtgtgatgagacaaaaccctttgtacgtgatgaatatggactgatcagcaatgaagtgcttgtggaaaacaatgtactacccgttgtgcagccagagccttctatcagaggaactaatatggataagggtaccattttgaaaacagtatgtcttagaagtttaacattatattttcttgttctccatattcctgataactaatggtctgttatttactgtggccttaaataaacaaagatgcccctggagccatcatctcagaacccaagcatgcaaatagcagttatccgccatgtggtctctggaatattattacacaataccatatatgacgttgttcccctttctagcaagggaaccataacaggcatgctcactgcatcagattttgttttaatcttgagaaagttgcagagaaacattcaagttattggcaacgaagagcccatttctgcttggaaagaagcaaagctacagttctatggtgggcctgatggtgctgtcatgcagagaacgccattaatccatacaggcaacattgatctcagggccaagaaagaagctcaactcggcatgcttcctgtttgaagcaagggcaacaaacttaccccaccagatctctgtcgccaaagcagggctagtgaataagctgtgtttcctcccggattgtcactgcttttatatttgtgcatttattttgagggaaacattttgcccaaaaaaggcctgcagtgcacgttttaaacaagtcatttgaaccaactcttatgctgaaaactgtatgtgatactgcagaaggcaacacactagcttgataggaaagttggttggcaagcataggtggactctggtgccttcatatatctatatatatattttaagttgacgatcttcgtgatgctgaaactgatgaagacctccgatgaaaaaagagacatgctgcacatgcacgagggtacttgcagatcgatgtcggctctatggacgaacactcgaccaagtcagatgaggagtatgagggcctagccatgcgcgacgtgatggctactggtccgacgatgagcagcaagctgtgagttaaagatgaactcacctgccctggagagtaacatccataggagtgaggcaaaatggctggtaccaccacaacatggacccgttcctgaagatgtccaaggaggtggtagccgacaccataatgtcttgtgtcattgtgtcaccggtcggcaacacactgcgctggtaccggcgggtgttgtgtttcttaggcgtctgcttctgtgctttgagttgtgctatagagtggttgtgccaactactgattttaaaagaaaaaggtgagctgagaatcattgttgaaaacaaacatgtaattgttcgttctcatcagttgtgccaactaccaagcatttcattgatcagaatttatcgttgctcatgagaaccaaaagtaagacacttctcaataacattggatgcaaatttctgctagcttatcttcactatcttttctcgtatcaatataacacacatttatacataatttttgtgttattatatgttttcgttgcaacgcacgggcactcacctagttatagaataaaaat

SEQ ID NO: 77264 - DNA, 3487 bp, Zea Mays
gctgtcaatcgcctccccactgcggcagatccgcaatccgctcctccaccaccgcgctcctcacccacgccagggacaagactgtctacctccacgcccgcctcaccaactccgcggccaccgccaccgccacgcccctcccccatggtcgtcgagtccgagtggtggaaccagcgacgcatgcgcgtcgagggcgacgtgaaataggtgctccaccgcgggcacaacgggcacagtggaggtggaacgagcaccatcgagttctggttccaccgaatccaccgctcgcacaccggatccatcgctcccacatgcccgcacaccggatccaccgctccctcccccgcgatggcctggttccaccgagacaactgcggggctagggtttggattcgtgggtggagcccaaggctagatccagcagggggagggaggtagaggaggggagggaactgctggtggtcggcagtgggcgaaggcgcgacaatccaggatatggattcctgagcgtcacccacccgcccatccacgtcgcgcggtgtagtcatcccctatccgcagccgcctcgctccctctcccacaacaaatccattctcctcctcccactcgacgaggatcgcgaggatgctggaggacgtcgtcgctgtcacgcttgacgttagggcctccgatgcttgacgttagggcctctcgcttgaagaggaacacaaacagagctcatgttttttattttgctctgcattatctactgcttctctgtgggggcgttatttacagtatgtggcctgtttgttgtgttgttcctgcggaagggcgggcgggccgaaggtgtttaagaaaatgttgttgtcaacatcaacctcctggaagggccagaacgcaggcagcgcctcaactcgtcaccccatcagcacggtgagccccttatctggattgttatcatggtacgcggtgcgctgcaagcctgcaagtgacatcaaattggattggtagtcagcgggtgtcatagtgtcagttcgatggaatggttctgcagtgcatgtgcttctgtaatttccgcaagaagcagtcaacttctccctgatatggcactaggacattgtagtgattcccgcacgtttgtggaactcgacaacctaccagagcgccagatgtttcattgagaagagaactcctccagtctggctttccactggtctagtctctcctttaaaccaaatttgataccactcattgaagtcaatagctgggatgtagacatgtgaaaccacacctgtggaactttcagcgtgtgatgactgggtcactggtggaataccgtgttttttgagctgctcgctttcagttcgcggtcatagtcctgtgttttttgccttcagtttcttgatgtagttattgcctaaaatttctatatcttgttcatcgtactggagatgctacttcatgtggagctggtatgtaggatgattatcacgagtacttcaagcgctcattttaggaagacatcgctgcgcaagtgcctcaaggagtggaatgtaccggtttttggttgatggtgtctggaggtgtgatgagacaaaaccctttgtacgtgatgaatatggactgatcagcaatgaagtgcttgtggaaaacaatgtactacccgttgtgcagccagagccttctatcagaggaactaatatggataaggatgcccctggagccatcatctcagaacccaagcatgcaaatagcagttatccgccatgtggtctctggaatattattacacaataccatatatgacgttgttcccctttctagcaagttaacagttttggacactcagcttcctgttaaacaagcatttaaaataatgcatgatgtgggtcttgctctggttcctttttgggatgaccgtcagggaaccataacaggcatgctcactgcatcagattttgttttaatcttgagaaagttgcagagaaacattcaagttattggcaacgaagagcccatttctgcttggaaagaagcaaagctacagttctatggtgggcctgatggtgctgtcatgcagagaacgccattaatccatgtacttctccatatatttgctgattctttcatttgattcaatgtgtaagcagttgcaagatcagcactttcataatataaatatattacttgtatgaaattctagatatggtctccaatacaacattaagcttaatgtcgtttgtgttaaaaaattacaaatcatcttatgtcttgaaataaggagaaattgtttgggtttctcctccccaactttcagaattacctatttctattgtatgtttgatcatttggacttccattccatcaacaattttggtttattcagtgaggaactatgtttttaaccactctgtagtttgtacagacaggcaacattgatctcagggccaagaaagaagctcaactcggcatgcttcctgtttgaagcaagggcaacaaacttaccccaccagatctctgtcgccaaagcagggctagtgaataagctgtgtttcctcccggattgtcactgcttttatatttgtgcatttattttgagggaaacattttgcccaaaaaaggcctgcagtgcacgttttaaacaagtcatttgaaccaactcttatgctgaaaactgtatgtgatactgcagaaggcaacacactagcttgataggaaagttggttggcaagcataggtggactctggtgccttcatatatctatatatatattttaagttgacgatcttcgtgatgctgaaactgatgaagacctccgatgaaaaaagagacatgctgcacatgcacgagggtacttgcagatcgatgtcggctctatggacgaacactcgaccaagtcagatgaggagtatgagggcctagccatgcgcgacgtgatggctactggtccgacgatgagcagcaagctgtgagttaaagatgaactcacctgccctggagagtaacatccataggagtgaggcaaaatggctggtaccaccacaacatggacccgttcctgaagatgtccaaggaggtggtagccgacaccataatgtcttgtgtcattgtgtcaccggtcggcaacacactgcgctggtaccggcgggtgttgtgtttcttaggcgtctgcttctgtgctttgagttgtgctatagagtggttgtgccaactactgattttaaaagaaaaaggtgagctgagaatcattgttgaaaacaaacatgtaattgttcgttctcatcagttgtgccaactaccaagcatttcattgatcagaatttatcgttgctcatgagaaccaaaagtaagacacttctcaataacattggatgcaaatttctgctagcttatcttcactatcttttctcgtatcaatataacacacatttatacataatttttgtgttattatatgttttcgttgcaacgcacgggcactcacctagttatagaataaaaat

SEQ ID NO: 77265 - DNA, 4004 bp, Zea Mays
gctgtcaatcgcctccccactgcggcagatccgcaatccgctcctccaccaccgcgctcctcacccacgccagggacaagactgtctacctccacgcccgcctcaccaactccgcggccaccgccaccgccacgcccctcccccatggtcgtcgagtccgagtggtggaaccagcgacgcatgcgcgtcgagggcgacgtgaaataggtgctccaccgcgggcacaacgggcacagtggaggtggaacgagcaccatcgagttctggttccaccgaatccaccgctcgcacaccggatccatcgctcccacatgcccgcacaccggatccaccgctccctcccccgcgatggcctggttccaccgagacaactgcggggctagggtttggattcgtgggtggagcccaaggctagatccagcagggggagggaggtagaggaggggagggaactgctggtggtcggcagtgggcgaaggcgcgacaatccaggatatggattcctgagcgtcacccacccgcccatccacgtcgcgcggtgtagtcatcccctatccgcagccgcctcgctccctctcccacaacaaatccattctcctcctcccactcgacgaggatcgcgaggatgctggaggacgtcgtcgctgtcacgcttgacgttagggcctccgatgcttgacgttagggcctctcgcttgaagaggaacacaaacagagctcatgttttttattttgctctgcattatctactgcttctctgtgggggcgttatttacagtatgtggcctgtttgttgtgttgttcctgcggaagggcgggcgggccgaaggtgtttaagaaaatgttgttgtcaacatcaacctcctggaagggccagaacgcaggcagcgcctcaactcgtcaccccatcagcacggtgagccccttatctggattgttatcatggtacgcggtgcgctgcaagcctgcaagtgacatcaaattggattggtagtcagcgggtgtcatagtgtcagttcgatggaatggttctgcagtgcatgtgcttctgtaatttccgcaagaagcagtcaacttctccctgatatggcactaggacattgtagtgattcccgcacgtttgtggaactcgacaacctaccagagcgccagatgtttcattgagaagagaactcctccagtctggctttccactggtctagtctctcctttaaaccaaatttgataccactcattgaagtcaatagctgggatgtagacatgtgaaaccacacctgtggaactttcagcgtgtgatgactgggtcactggtggaataccgtgttttttgagctgctcgctttcagttcgcggtcatagtcctgtgttttttgccttcagtttcttgatgtagttattgcctaaaatttctatatcttgttcatcgtactggagatgctacttcatgtggagctggtatgtaggatgattatcacgagtacttcaagcgctcattttaggaagacatcgctgcgcaagtgcctcaaggagtggaatggtgagcccctgtccatctactgaacagagaaaataccaggagcaaatgactgcatttttagttaatccttttattcctaaattaattgtgtttgttaatgcttttattcctaaaataagtaaccgagctcgggattcttcgcaatttgatttgcgagatcacccccataaaggcatcatgaatctttatgcctgtaaagacatcccactgtctctttcgttttcgataagatgttttggccgttacataatgcctgtaaggtagaatgccattgcagttgttgcatcagaaagcagccatttaacgccattgtaaagtgagtgatgattaaatacaaccacacttctgtctctcaggtttctgtacatggagtttttattgcacctcttcttccccagcaattagtacttgcagttagactaaatgaatcttgaatgccccttaactgttggctttacatggaactacttttgcatataccagacaactattttgaacttcaatatgtttttcaattccagcaattgatcgaaacatgatatatttgacatattcatgatggatttttgtatttgatgtgtcgctttttcatctatcaatgtaattcttggacataacattgcgcacaggtaccaaattcacacccttgttattgcgagttctgtaaatcatgatgttcacatgtgatggtttgattcagttcaatggttagcaagctatttgaacatgatactatagtagtgcatatttgctgtacaaatggccactgcccagctatttgcataagatattatgtttctcctgtgacattttctatgccacatacatttatatggcatttttgtgcaatttagtaccggtttttggttgatggtgtctggaggtgtgatgagacaaaaccctttgtacgtgatgaatatggactgatcagcaatgaagtgcttgtggaaaacaatgtactacccgttgtgcagccagagccttctatcagaggaactaatatggataagggtaccattttgaaaacaatgcccctggagccatcatctcagaacccaagcatgcaaatagcagttatccgccatgtggtctctggaatattattacacaataccatatatgacgttgttcccctttctagcaagttaacagttttggacactcagcttcctgttaaacaagcatttaaaataatgcatgatgtgggaaccataacaggcatgctcactgcatcagattttgttttaatcttgagaaagttgcagagaaacattcaagttattggcaacgaagagcccatttctgcttggaaagaagcaaagctacagttctatggtgggcctgatggtgctgtcatgcagagaacgccattaatccattttgtacagacaggcaacattgatctcagggccaagaaagaagctcaactcggcatgcttcctgtttgaagcaagggcaacaaacttaccccaccagatctctgtcgccaaagcagggctagtgaataagctgtgtttcctcccggattgtcactgcttttatatttgtgcatttattttgagggaaacattttgcccaaaaaaggcctgcagtgcacgttttaaacaagtcatttgaaccaactcttatgctgaaaactgtatgtgatactgcagaaggcaacacactagcttgataggaaagttggttggcaagcataggtggactctggtgccttcatatatctatatatatattttaagttgacgatcttcgtgatgctgaaactgatgaagacctccgatgaaaaaagagacatgctgcacatgcacgagggtacttgcagatcgatgtcggctctatggacgaacactcgaccaagtcagatgaggagtatgagggcctagccatgcgcgacgtgatggctactggtccgacgatgagcagcaagctgtgagttaaagatgaactcacctgccctggagagtaacatccataggagtgaggcaaaatggctggtaccaccacaacatggacccgttcctgaagatgtccaaggaggtggtagccgacaccataatgtcttgtgtcattgtgtcaccggtcggcaacacactgcgctggtaccggcgggtgttgtgtttcttaggcgtctgcttctgtgctttgagttgtgctatagagtggttgtgccaactactgattttaaaagaaaaaggtgagctgagaatcattgttgaaaacaaacatgtaattgttcgttctcatcagttgtgccaactaccaagcatttcattgatcagaatttatcgttgctcatgagaaccaaaagtaagacacttctcaataacattggatgcaaatttctgctagcttatcttcactatcttttctcgtatcaatataacacacatttatacataatttttgtgttattatatgttttcgttgcaacgcacgggcactcacctagttatagaataaaaat

SEQ ID NO: 77266 - DNA, 3967 bp, Zea Mays
gctgtcaatcgcctccccactgcggcagatccgcaatccgctcctccaccaccgcgctcctcacccacgccagggacaagactgtctacctccacgcccgcctcaccaactccgcggccaccgccaccgccacgcccctcccccatggtcgtcgagtccgagtggtggaaccagcgacgcatgcgcgtcgagggcgacgtgaaataggtgctccaccgcgggcacaacgggcacagtggaggtggaacgagcaccatcgagttctggttccaccgaatccaccgctcgcacaccggatccatcgctcccacatgcccgcacaccggatccaccgctccctcccccgcgatggcctggttccaccgagacaactgcggggctagggtttggattcgtgggtggagcccaaggctagatccagcagggggagggaggtagaggaggggagggaactgctggtggtcggcagtgggcgaaggcgcgacaatccaggatatggattcctgagcgtcacccacccgcccatccacgtcgcgcggtgtagtcatcccctatccgcagccgcctcgctccctctcccacaacaaatccattctcctcctcccactcgacgaggatcgcgaggatgctggaggacgtcgtcgctgtcacgcttgacgttagggcctccgatgcttgacgttagggcctctcgcttgaagaggaacacaaacagagctcatgttttttattttgctctgcattatctactgcttctctgtgggggcgttatttacagtatgtggcctgtttgttgtgttgttcctgcggaagggcgggcgggccgaaggtgtttaagaaaatgttgttgtcaacatcaacctcctggaagggccagaacgcaggcagcgcctcaactcgtcaccccatcagcacggtgagccccttatctggattgttatcatggtacgcggtgcgctgcaagcctgcaagtgacatcaaattggattggtagtcagcgggtgtcatagtgtcagttcgatggaatggttctgcagtgcatgtgcttctgtaatttccgcaagaagcagtcaacttctccctgatatggcactaggacattgtagtgattcccgcacgtttgtggaactcgacaacctaccagagcgccagatgtttcattgagaagagaactcctccagtctggctttccactggtctagtctctcctttaaaccaaatttgataccactcattgaagtcaatagctgggatgtagacatgtgaaaccacacctgtggaactttcagcgtgtgatgactgggtcactggtggaataccgtgttttttgagctgctcgctttcagttcgcggtcatagtcctgtgttttttgccttcagtttcttgatgtagttattgcctaaaatttctatatcttgttcatcgtactggagatgctacttcatgtggagctggtatgtaggatgattatcacgagtacttcaagcgctcattttaggaagacatcgctgcgcaagtgcctcaaggagtggaatggtgagcccctgtccatctactgaacagagaaaataccaggagcaaatgactgcatttttagttaatccttttattcctaaattaattgtgtttgttaatgcttttattcctaaaataagtaaccgagctcgggattcttcgcaatttgatttgcgagatcacccccataaaggcatcatgaatctttatgcctgtaaagacatcccactgtctctttcgttttcgataagatgttttggccgttacataatgcctgtaaggtagaatgccattgcagttgttgcatcagaaagcagccatttaacgccattgtaaagtgagtgatgattaaatacaaccacacttctgtctctcaggtttctgtacatggagtttttattgcacctcttcttccccagcaattagtacttgcagttagactaaatgaatcttgaatgccccttaactgttggctttacatggaactacttttgcatataccagacaactattttgaacttcaatatgtttttcaattccagcaattgatcgaaacatgatatatttgacatattcatgatggatttttgtatttgatgtgtcgctttttcatctatcaatgtaattcttggacataacattgcgcacaggtaccaaattcacacccttgttattgcgagttctgtaaatcatgatgttcacatgtgatggtttgattcagttcaatggttagcaagctatttgaacatgatactatagtagtgcatatttgctgtacaaatggccactgcccagctatttgcataagatattatgtttctcctgtgacattttctatgccacatacatttatatggcatttttgtgcaatttagtaccggtttttggttgatggtgtctggaggtgtgatgagacaaaaccctttgtacgtgatgaatatggactgatcagcaatgaagtgcttgtggaaaacaatgtactacccgttgtgcagccagagccttctatcagaggaactaatatggataagggtaccattttgaaaacaatgcccctggagccatcatctcagaacccaagcatgcaaatagcagttatccgccatgtggtctctggaatattattacacaataccatatatgacgttgttcccctttctagcaagggtcttgctctggttcctttttgggatgaccgtcagggaaccataacaggcatgctcactgcatcagattttgttttaatcttgagaaagttgcagagaaacattcaagttattggcaacgaagagcccatttctgcttggaaagaagcaaagctacagttctatggtgggcctgatggtgctgtcatgcagagaacgccattaatccatgcaacattgatctcagggccaagaaagaagctcaactcggcatgcttcctgtttgaagcaagggcaacaaacttaccccaccagatctctgtcgccaaagcagggctagtgaataagctgtgtttcctcccggattgtcactgcttttatatttgtgcatttattttgagggaaacattttgcccaaaaaaggcctgcagtgcacgttttaaacaagtcatttgaaccaactcttatgctgaaaactgtatgtgatactgcagaaggcaacacactagcttgataggaaagttggttggcaagcataggtggactctggtgccttcatatatctatatatatattttaagttgacgatcttcgtgatgctgaaactgatgaagacctccgatgaaaaaagagacatgctgcacatgcacgagggtacttgcagatcgatgtcggctctatggacgaacactcgaccaagtcagatgaggagtatgagggcctagccatgcgcgacgtgatggctactggtccgacgatgagcagcaagctgtgagttaaagatgaactcacctgccctggagagtaacatccataggagtgaggcaaaatggctggtaccaccacaacatggacccgttcctgaagatgtccaaggaggtggtagccgacaccataatgtcttgtgtcattgtgtcaccggtcggcaacacactgcgctggtaccggcgggtgttgtgtttcttaggcgtctgcttctgtgctttgagttgtgctatagagtggttgtgccaactactgattttaaaagaaaaaggtgagctgagaatcattgttgaaaacaaacatgtaattgttcgttctcatcagttgtgccaactaccaagcatttcattgatcagaatttatcgttgctcatgagaaccaaaagtaagacacttctcaataacattggatgcaaatttctgctagcttatcttcactatcttttctcgtatcaatataacacacatttatacataatttttgtgttattatatgttttcgttgcaacgcacgggcactcacctagttatagaataaaaat

SEQ ID NO: 77267 - DNA, 2560 bp, Zea Mays
cagagccgctgtcaatcgcctccccactgcggcagatccgcaatccgctcctccaccaccgcgctcctcacccacgccagggacaagactgtctacctccacgcccgcctcaccaactccgcggccaccgccaccgccacgcccctcccccatggtcgtcgagtccgagtggtggaaccagcgacgcatgcgcgtcgagggcgacgtgaaataggtgctccaccgcgggcacaacgggcacagtggaggtggaacgagcaccatcgagttctggttccaccgaatccaccgctcgcacaccggatccatcgctcccacatgcccgcacaccggatccaccgctccctcccccgcgatggcctggttccaccgagacaactgcggggctagggtttggattcgtgggtggagcccaaggctagatccagcagggggagggaggtagaggaggggagggaactgctggtggtcggcagtgggcgaaggcgcgacaatccaggatatggattcctgagcgtcacccacccgcccatccacgtcgcgcggtgtagtcatcccctatccgcagccgcctcgctccctctcccacaacaaatccattctcctcctcccactcgacgaggatcgcgaggatgctggaggacgtcgtcgctgtcacgcttgacgttagggcctccgatgcttgacgttagggcctctcgcttgaagaggaacacaaacagagctcatgttttttattttgctctgcattatctactgcttctctgtgggggcgttatttacagtatgtggcctgtttgttgtgttgttcctgcggaagggcgggcgggccgaaggtgtttaagaaaatgttgttgtcaacatcaacctcctggaagggccagaacgcaggcagcgcctcaactcgtcaccccatcagcacggatgattatcacgagtacttcaagcgctcattttaggaagacatcgctgcgcaagtgcctcaaggagtggaatgtaccggtttttggttgatggtgtctggaggtgtgatgagacaaaaccctttgtacgtgatgaatatggactgatcagcaatgaagtgcttgtggaaaacaatgtactacccgttgtgcagccagagccttctatcagaggaactaatatggataaggatgcccctggagccatcatctcagaacccaagcatgcaaatagcagttatccgccatgtggtctctggaatattattacacaataccatatatgacgttgttcccctttctagcaagggtcttgctctggttcctttttgggatgaccgtcagggaaccataacaggcatgctcactgcatcagattttgttttaatcttgagaaagttgcagagaaacattcaagttattggcaacgaagagcccatttctgcttggaaagaagcaaagctacagttctatggtgggcctgatggtgctgtcatgcagagaacgccattaatccatacaggcaacattgatctcagggccaagaaagaagctcaactcggcatgcttcctgtttgaagcaagggcaacaaacttaccccaccagatctctgtcgccaaagcagggctagtgaataagctgtgtttcctcccggattgtcactgcttttatatttgtgcatttattttgagggaaacattttgcccaaaaaaggcctgcagtgcacgttttaaacaagtcatttgaaccaactcttatgctgaaaactgtatgtgatactgcagaaggcaacacactagcttgataggaaagttggttggcaagcataggtggactctggtgccttcatatatctatatatatattttaagttgacgatcttcgtgatgctgaaactgatgaagacctccgatgaaaaaagagacatgctgcacatgcacgagggtacttgcagatcgatgtcggctctatggacgaacactcgaccaagtcagatgaggagtatgagggcctagccatgcgcgacgtgatggctactggtccgacgatgagcagcaagctgtgagttaaagatgaactcacctgccctggagagtaacatccataggagtgaggcaaaatggctggtaccaccacaacatggacccgttcctgaagatgtccaaggaggtggtagccgacaccataatgtcttgtgtcattgtgtcaccggtcggcaacacactgcgctggtaccggcgggtgttgtgtttcttaggcgtctgcttctgtgctttgagttgtgctatagagtggttgtgccaactactgattttaaaagaaaaaggtgagctgagaatcattgttgaaaacaaacatgtaattgttcgttctcatcagttgtgccaactaccaagcatttcattgatcagaatttatcgttgctcatgagaaccaaaagtaagacacttctcaataacattggatgcaaatttctgctagcttatcttcactatcttttctcgtatcaatataacacacatttatacataatttttgtgttattatatgttttcgttgcaacgcacgggcactcacctagttatagaataaaaat

SEQ ID NO: 77268 - DNA, 1473 bp, Zea Mays
gctgtcaatcgcctccccactgcggcagatccgcaatccgctcctccaccaccgcgctcctcacccacgccagggacaagactgtctacctccacgcccgcctcaccaactccgcggccaccgccaccgccacgcccctcccccatggtcgtcgagtccgagtggtggaaccagcgacgcatgcgcgtcgagggcgacgtgaaataggtgctccaccgcgggcacaacgggcacagtggaggtggaacgagcaccatcgagttctggttccaccgaatccaccgctcgcacaccggatccatcgctcccacatgcccgcacaccggatccaccgctccctcccccgcgatggcctggttccaccgagacaactgcggggctagggtttggattcgtgggtggagcccaaggctagatccagcagggggagggaggtagaggaggggagggaactgctggtggtcggcagtgggcgaaggcgcgacaatccaggatatggattcctgagcgtcacccacccgcccatccacgtcgcgcggtgtagtcatcccctatccgcagccgcctcgctccctctcccacaacaaatccattctcctcctcccactcgacgaggatcgcgaggatgctggaggacgtcgtcgctgtcacgcttgacgttagggcctccgatgcttgacgttagggcctctcgcttgaagaggaacacaaacagagctcatgttttttattttgctctgcattatctactgcttctctgtgggggcgttatttacagtatgtggcctgtttgttgtgttgttcctgcggaagggcgggcgggccgaaggtgtttaagaaaatgttgttgtcaacatcaacctcctggaagggccagaacgcaggcagcgcctcaactcgtcaccccatcagcacggatgattatcacgagtacttcaagcgctcattttaggaagacatcgctgcgcaagtgcctcaaggagtggaatgtaccggtttttggttgatggtgtctggaggtgtgatgagacaaaaccctttgtacgtgatgaatatggactgatcagcaatgaagtgcttgtggaaaacaatgtactacccgttgtgcagccagagccttctatcagaggaactaatatggataaggatgcccctggagccatcatctcagaacccaagcatgcaaatagcagttatccgccatgtggtctctggaatattattacacaataccatatatgacgttgttcccctttctagcaagggtcttgctctggttcctttttgggatgaccgtcagggaaccataacaggcatgctcactgcatcagattttgttttaatcttgagaaagttgcagagaaacattcaagttattggcaacgaagagcccatttctgcttggaaagaagcaaagctacagttctatggtgggcctgatggtgctgtcatgcagagaacgccattaatcca

SEQ ID NO: 77269 - DNA, 2208 bp, Zea Mays
gctgtcaatcgcctccccactgcggcagatccgcaatccgctcctccaccaccgcgctcctcacccacgccagggacaagactgtctacctccacgcccgcctcaccaactccgcggccaccgccaccgccacgcccctcccccatggtcgtcgagtccgagtggtggaaccagcgacgcatgcgcgtcgagggcgacgtgaaataggtgctccaccgcgggcacaacgggcacagtggaggtggaacgagcaccatcgagttctggttccaccgaatccaccgctcgcacaccggatccatcgctcccacatgcccgcacaccggatccaccgctccctcccccgcgatggcctggttccaccgagacaactgcggggctagggtttggattcgtgggtggagcccaaggctagatccagcagggggagggaggtagaggaggggagggaactgctggtggtcggcagtgggcgaaggcgcgacaatccaggatatggattcctgagcgtcacccacccgcccatccacgtcgcgcggtgtagtcatcccctatccgcagccgcctcgctccctctcccacaacaaatccattctcctcctcccactcgacgaggatcgcgaggatgctggaggacgtcgtcgctgtcacgcttgacgttagggcctccgatgcttgacgttagggcctctcgcttgaagaggaacacaaacagagctcatgttttttattttgctctgcattatctactgcttctctgtgggggcgttatttacagtatgtggcctgtttgttgtgttgttcctgcggaagggcgggcgggccgaaggtgtttaagaaaatgttgttgtcaacatcaacctcctggaagggccagaacgcaggcagcgcctcaactcgtcaccccatcagcacgatgctacttcatgtggagctggtatgtaggatgattatcacgagtacttcaagcgctcattttaggaagacatcgctgcgcaagtgcctcaaggagtggaatggtgagcccctgtccatctactgaacagagaaaataccaggagcaaatgactgcatttttagttaatccttttattcctaaattaattgtgtttgttaatgcttttattcctaaaataagtaaccgagctcgggattcttcgcaatttgatttgcgagatcacccccataaaggcatcatgaatctttatgcctgtaaagacatcccactgtctctttcgttttcgataagatgttttggccgttacataatgcctgtaaggtagaatgccattgcagttgttgcatcagaaagcagccatttaacgccattgtaaagtgagtgatgattaaatacaaccacacttctgtctctcaggtttctgtacatggagtttttattgcacctcttcttccccagcaattagtacttgcagttagactaaatgaatcttgaatgccccttaactgttggctttacatggaactacttttgcatataccagacaactattttgaacttcaatatgtttttcaattccagcaattgatcgaaacatgatatatttgacatattcatgatggatttttgtatttgatgtgtcgctttttcatctatcaatgtaattcttggacataacattgcgcacaggtaccaaattcacacccttgttattgcgagttctgtaaatcatgatgttcacatgtgatggtttgattcagttcaatggttagcaagctatttgaacatgatactatagtagtgcatatttgctgtacaaatggccactgcccagctatttgcataagatattatgtttctcctgtgacattttctatgccacatacatttatatggcatttttgtgcaatttagtaccggtttttggttgatggtgtctggaggtgtgatgagacaaaaccctttgtacgtgatgaatatggactgatcagcaatgaagtgcttgtggaaaacaatgtactacccgttgtgcagccagagccttctatcagaggaactaatatggataaggatgcccctggagccatcatctcagaacccaagcatgcaaatagcagttatccgccatgtggtctctggaatattattacacaataccatatatgacgttgttcccctttctagcaagttttggacactcagcttcctgttaaacaagcatttaaaataatgcatgatgtgcttcgaac

SEQ ID NO: 77270 - DNA, 439 bp, Zea Mays
gacacacacggctggctcgctgcccgccggcctttaagagctcgctaggacagtaggacgcgaacgagtctgcggccagccagcaagcagtgcgagtacaggcatgggggctgccggcggacgcgcggttgcggtggcagccatggtggcggtggcggcggcgctgcctctgctcgcgtgtggcggttacgcggagtgctacgactactgcttcaaggactgcatctccaaggacaagtccatgagagactactgcagctacgcctgcgacaagacctgcgcgcccgacgcccggcggcggcgccccgcggtcgtccccatgaactgccagctcgcctgcgtcagggagtcctgccaccgtcgccgcgcggctggaggataaccgtacgtacctacgtacgtacgtgtccgtcggatgtgcgcgcatggttgctttgcg

SEQ ID NO: 77271 - DNA, 966 bp, Zea Mays
gacgatattaccctcgaccctcgaggtctcgagtcttgaccaacccatacgcacccaccctccgccgccgtttttctctccccatctcgcccgccgttttcgtccttatcgatctcctcgcacctcgtggcggcacctctccccttcgatccaccaagggtttaggatcggcggcgatggcggcgaggctggcacagctgcgcgctcaggcggtgcaggcggcggagttcgcctcgaagcacggcggctcctactacaaggagctcatggagaagaacaagcagtacgtcgtgcagccccccaccatcgagaaatgccaggagctctccaagcagctcttctacacccgcctcgcaagggccctggtgctaactaatactccctatgtttccaaattcctaccaggtcggtatgagtcattctggaaggagcttgatggtgtcaagcaggtatggaagaacaggaaggacctcaaggttgaggaccttgggattgcgactttatttggagttgagctttatgcatggttctgcgtaggcgagattgttggcagaggtttcaccttaaccggctataaggtctagttgatttccagtgatttaagacctgctttataaatcgacactttagctgatgcttgtcgaaacgacgatgatacctgccttccttcacaattttgtttcttgtaagagtctacctagtgctgaatgccagcaaagacgggcacatggttgcaacattgcctcaataatttgcccgcgcaattcttgattttgatgcatgtaattctttgtcagttgcatgtgctgcagtccctgcgtgcagactcatttcgtgtctttcgttctgcccacaaaataaattctttctgcgttacatatgatcgttttggatgaactgaacaaccaattgctgagtgtgtgaacggatgaaacattatgctccattttgatgtcgatattggag

SEQ ID NO: 77272 - DNA, 751 bp, Zea Mays
tgaaccaaaactacaaaatgaattgacgatattaccctcgaccctcgaggtctcgagtcttgaccaacccatacgcacccaccctccgccgccgtttttctctccccatctcgcccgccgttttcgtccttatcgatctcctcgcacctcgtggcggcacctctccccttcgatccaccaagcctaccaggtcggtatgagtcattctggaaggagcttgatggtgtcaagcaggtatggaagaacaggaaggacctcaaggttgaggaccttgggattgcgactttatttggagttgagctttatgcatggttctgcgtaggcgagattgttggcagaggtttcaccttaaccggctataaggtctagttgatttccagtgatttaagacctgctttataaatcgacactttagctgatgcttgtcgaaacgacgatgatacctgccttccttcacaattttgtttcttgtaagagtctacctagtgctgaatgccagcaaagacgggcacatggttgcaacattgcctcaataatttgcccgcgcaattcttgattttgatgcatgtaattctttgtcagttgcatgtgctgcagtccctgcgtgcagactcatttcgtgtctttcgttctgcccacaaaataaattctttctgcgttacatatgatcgttttggatgaactgaacaaccaattgctgagtgtgtgaacggatgaaacattatgctccattttgatgtcgatattggag

SEQ ID NO: 77273 - DNA, 998 bp, Zea Mays
acacgatgacatacaaatccatctccaaatccatctcttgtgagttctgaaccaaaactacaaaatgaattgacgatattaccctcgaccctcgaggtctcgagtcttgaccaacccatacgcacccaccctccgccgccgtttttctctccccatctcgcccgccgttttcgtccttatcgatctcctcgcacctcgtggcggcacctctccccttcgatccaccaagggtttaggatcggcggcgatggcggcgaggctggcacagctgcgcgctcaggcggtgcaggcggcggagttcgcctcgaagcacggcggctcctactacaaggagctcatggagaagaacaagcagtacgtcgtgcagccccccaccatcgagaaatgccaggagctctccaagcagctcttctacacccgcctcgcaagcctaccaggtcggtatgagtcattctggaaggagcttgatggtgtcaagcaggtatggaagaacaggaaggacctcaaggttgaggaccttgggattgcgactttatttggagttgagctttatgcatggttctgcgtaggcgagattgttggcagaggtttcaccttaaccggctataaggtctagttgatttccagtgatttaagacctgctttataaatcgacactttagctgatgcttgtcgaaacgacgatgatacctgccttccttcacaattttgtttcttgtaagagtctacctagtgctgaatgccagcaaagacgggcacatggttgcaacattgcctcaataatttgcccgcgcaattcttgattttgatgcatgtaattctttgtcagttgcatgtgctgcagtccctgcgtgcagactcatttcgtgtctttcgttctgcccacaaaataaattctttctgcgttacatatgatcgttttggatgaactgaacaaccaattgctgagtgtgtgaacggatgaaacattatgctccattttgatgtcgatattggag

SEQ ID NO: 77274 - DNA, 511 bp, Zea Mays
tccccttcatgcaagtggtcaagctacattccgtgctattcaaaggccctaaggatgactgccccaaaactgtaagacttgtccaacaaagatcatatgggttttagcaatgacaatgactatctaccaatggacatcgtggagctatcttccgatcatttgatagaggacaaagtttctgatgaggttgtattcaaggccatggggagggctatcaataagactgttatggttgtggaattgatcaagaggaggattgttggcctccatcagaataccaccactggatctactgatattactgatatgtgggagcgcattggaagaaggcctacttccgtaagtgacttgtttttattctaggatagaactataactgcacatgaacccgtaattttggagttcaagattatatctctctgcaggcttgagacaacaagacatgtctctatgatcactataactctttcaaagaaggagctggacacatcatctatcgggtatgcatact

SEQ ID NO: 77275 - DNA, 1330 bp, Zea Mays
agaaaatggtggatgatgtcatctctcaaaaaacaaggaacgaggtcgcgcagcaaagtagcaaactcctgcgaccctacccaccgcacctaccattctggagaggagaggaacagagccaagaaacaagcccggaagatggcaggcggcggagtggtgaagcacatcctgctggcaagcttcaaggaggaggtgacgcaggagcgcctggacgagctcatccgaggatacgccgcgctcgtcggcgtggtcccctccatgaaggcgttccactggggaactgatgtgagcatagaaaacatgcatcaagggttcacgcacgtcttcgagtccacgtttgaaagcacggaaggaatcaaggagtacattgagcaccctgcacacgtcgaattcgcaagtgtgttcttgcctgtgctggagaaggtcctcataatcgactacaaaccgacgtcggccaattagcggtagaacatgctctgtactggttcctcggaggatccagtttgattctactctttattttgctaaataaactcggtctgctttgtcccttgttaagaatgagctttgagttttctgtagtgcaattgttgtagcttcgcatgttttcatatgggaattacgttcctaaagaccgtatttgccacttggaagcagcaaactgcttgaacttcttggagattggacgctggtttgtttcttggttcggaaagaggaagtaggtggatggcgtgagactgctctagttattttttttgtcggattatttactcgttaatatagctcccatcctaaaatataattcgttttagattagacatatatttattaattagtatatgattgtagtttgtatgtatatctatattcactattattcgttcgaatgtggagtgaaaaaatgctagaaaaaactatatttcaagggttagtttggaaactcattttttccaagtgatttctgttttcctaagaaaaaataaactatttctccttaaaaatggaaataccttaagaaaacaaggttttcaaactagccctaagaaaaacagagttcccaaacttcccaaactatggaggaagtgtaaccgtggtttttttgggtttacttgtaaatactgtcgttcttcgttattgtattatgtggggaaaatatcctatgcaatcacttatcctggtgcaagcatgcaatcaagcgatctggtgcatccgatctagatctaatgatgactgttattttatatttaaccccttccacctaaaacatagtacctattttacttttaaccccttccatatgaaaccgttggatctagattggatgctctgg

SEQ ID NO: 77276 - DNA, 1445 bp, Zea Mays
atcgacggtgcagactctctgcacagccacgccgatgagctctcctctgtcgtcgtggacatgcttcacgatccccttgccatatgattcacggttcctcgcctcgcgactgcaacaagtcgtggtggtggctggtgtgctctaggtgctcgacgaaaggtcgcgcagcaaagtagcaaactcctgcgaccctacccaccgcacctaccattctggagaggagaggaacagagccaagaaacaagcccggaagatggcaggcggcggagtggtgaagcacatcctgctggcaagcttcaaggaggaggtgacgcaggagcgcctggacgagctcatccgaggatacgccgcgctcgtcggcgtggtcccctccatgaaggcgttccactggggaactgatgtgagcatagaaaacatgcatcaagggttcacgcacgtcttcgagtccacgtttgaaagcacggaaggaatcaaggagtacattgagcaccctgcacacgtcgaattcgcaagtgtgttcttgcctgtgctggagaaggtcctcataatcgactacaaaccgacgtcggccaattagcggtagaacatgctctgtactggttcctcggaggatccagtttgattctactctttattttgctaaataaactcggtctgctttgtcccttgttaagaatgagctttgagttttctgtagtgcaattgttgtagcttcgcatgttttcatatgggaattacgttcctaaagaccgtatttgccacttggaagcagcaaactgcttgaacttcttggagattggacgctggtttgtttcttggttcggaaagaggaagtaggtggatggcgtgagactgctctagttattttttttgtcggattatttactcgttaatatagctcccatcctaaaatataattcgttttagattagacatatatttattaattagtatatgattgtagtttgtatgtatatctatattcactattattcgttcgaatgtggagtgaaaaaatgctagaaaaaactatatttcaagggttagtttggaaactcattttttccaagtgatttctgttttcctaagaaaaaataaactatttctccttaaaaatggaaataccttaagaaaacaaggttttcaaactagccctaagaaaaacagagttcccaaacttcccaaactatggaggaagtgtaaccgtggtttttttgggtttacttgtaaatactgtcgttcttcgttattgtattatgtggggaaaatatcctatgcaatcacttatcctggtgcaagcatgcaatcaagcgatctggtgcatccgatctagatctaatgatgactgttattttatatttaaccccttccacctaaaacatagtacctattttacttttaaccccttccatatgaaaccgttggatctagattggatgctctgg

SEQ ID NO: 77277 - DNA, 1624 bp, Zea Mays
gctgtctccaacaacagtctgtaaactgtcttgtccgctaaatttggaagactgagagctcattttcacttccagcaaggttctccaatccgtccgctaaattttacgggcgtcgccagagccgctaattgtggcggatcttcggacgtccgctacacgccgattcactccctctctcgcgctggggcggaaacttctcccttgcgtcttcccatcgcgaaggtcttgtccatgccgacagctagttcccgacggactttctcggaggcggtcagcaccgacgacgaggaggctgcgcggggaggcaaggtcggacgaccctcgccgcctcgctgctcgtcgcgcagcaaagtagcaaactcctgcgaccctacccaccgcacctaccattctggagaggagaggaacagagccaagaaacaagcccggaagatggcaggcggcggagtggtgaagcacatcctgctggcaagcttcaaggaggaggtgacgcaggagcgcctggacgagctcatccgaggatacgccgcgctcgtcggcgtggtcccctccatgaaggcgttccactggggaactgatgtgagcatagaaaacatgcatcaagggttcacgcacgtcttcgagtccacgtttgaaagcacggaaggaatcaaggagtacattgagcaccctgcacacgtcgaattcgcaagtgtgttcttgcctgtgctggagaaggtcctcataatcgactacaaaccgacgtcggccaattagcggtagaacatgctctgtactggttcctcggaggatccagtttgattctactctttattttgctaaataaactcggtctgctttgtcccttgttaagaatgagctttgagttttctgtagtgcaattgttgtagcttcgcatgttttcatatgggaattacgttcctaaagaccgtatttgccacttggaagcagcaaactgcttgaacttcttggagattggacgctggtttgtttcttggttcggaaagaggaagtaggtggatggcgtgagactgctctagttattttttttgtcggattatttactcgttaatatagctcccatcctaaaatataattcgttttagattagacatatatttattaattagtatatgattgtagtttgtatgtatatctatattcactattattcgttcgaatgtggagtgaaaaaatgctagaaaaaactatatttcaagggttagtttggaaactcattttttccaagtgatttctgttttcctaagaaaaaataaactatttctccttaaaaatggaaataccttaagaaaacaaggttttcaaactagccctaagaaaaacagagttcccaaacttcccaaactatggaggaagtgtaaccgtggtttttttgggtttacttgtaaatactgtcgttcttcgttattgtattatgtggggaaaatatcctatgcaatcacttatcctggtgcaagcatgcaatcaagcgatctggtgcatccgatctagatctaatgatgactgttattttatatttaaccccttccacctaaaacatagtacctattttacttttaaccccttccatatgaaaccgttggatctagattggatgctctgg

SEQ ID NO: 77278 - DNA, 1319 bp, Zea Mays
aaatttggctcggccacgatccaaatcggcttcaatatgtgaggcgtggcaacggtcggatctcccccaccgatggccgcctcccagtcagccacgctcctccttctcgccgtcgtcctcgccgccgtcgcaccaggcccctccagcgcgcgccacgtcatcaatttcgccccttcccgcgccgtcaaccccgcgtccctcgcttgggaccctacggcgcagcacttcgtcgtcgcaggcggcggtgatgccgtcctttgcgtctccgacgctggggtcaccgagtcgatcgtctcctctggcgcctcctccgtcgccgtcgacgaccgccgacgccgcctgctcgtcgcttccccgggatccgtctccgccttcgacctccggtccccgcgcccgcaccgcctcatcctctccacgccggtcccggaccccgcccctccgggcggcatcgctgttgacccgcacacagggaacgcgttcctcaccgtgggcgcccgaatctacaagctgtccgtagagggcgacctcgccacgctcgccaccgcgccggcgctcggctcggagcccctagcctcgctcaccgcgcacgtgagccgaggcttcctgctcgtgggccagcccggcacgggcagcatcctccgcgtcgacatggaggacggcgccacgaggaccgtgtcctgcgccctcacgcccccgacgccgatggccgtggcggtccggaccgatggggcggtggcggtgggcggggccgcggggctgcgcctcgtcgtgagcaacgacgggtgggcgtcgtgcggggtgcgggacgaggctgcgcccgcgcccgacggtctcgtggccgcggtggcggtgcgggagcggcgacgggtgtacgcgctggtggaggcggaggcggtgaacggggttaacaagtggcagatcgaggaggcctcgtggaaatcggagtcggagggggagatggtggtggtgctcgtctttgtcggcgtcgcccttgccatcttcatgttctggaggttccagatgcggcagctggccggcaacatgaacaagaagatcagatagtagtaacaacgcaatgtctccttccttctttatgcaagtgcgtttgtcatgctgccgtagttggtgtagctagatacttgtggattaggcacgttacttgtatctatatatttatgagatcttagttggatagttcttgataagtgaaggcaaaaatcaggagaaccattgctcctcgttagccactgtacctgcaaatttacacaaatatcgtaccttacaggtttgttcttacggcgaattgcacttgattcagt

SEQ ID NO: 77279 - DNA, 1910 bp, Zea Mays
attcttcagcagaagtcgtttatacataatcaacagcaattgcagcagcaaatccagatgctgactccacagcagcagcagcagcttatgctgcatgctcagcaaaatatgtcttcaccaacatctagtgatgtcgacaacagaagattgaggatgatgctaaatagaaatgctgttcttggccgggatgggcagacaaacagtggtagtgatattattccaaatattggctctcctagtcaaagtggtggcgatatagatatgcttataaagaagaaacttgctcagcagcagcaactattacaacagcaaagcaatagccaacagctcccacagcaacatcagcttcagcaacctgctgtctctagccagcaatctcaaagttcaaatcaacatcttcaacaagaaaagccaggaattggaagtatgcctgctgatgggggcataccaaattcatttgggggagctgaacagacagcaaagaagagaaagaagccaggctcatcctctggtagagctaatagttcaggcacagccaatactgctggtccctctccaagttctgcaccatcgacaccttccactcatacaccaggagacgtgatgtctgtgccacagctgcagcagaatggcggttcagctaaacccatggatgacatggatcctagggacaacttggggcgatgcatggatgctagtaaagggtttggtttttctgaggttgccaaagcacgcgcaagcacagccaaagttgtctgttgccacttctcagctgatggtaaactgcttgctactggtggtcatgataaaaaggtcactttgtggtgtacagattctctgaaccctaaatcttatctggaagagcactcgtttcttatcactgatgttagatttagcccaagcatgtcacgccttgctacatcctcctttgacaaaactgtgcgggtttgggatgcagataatactgactattcactacgaactttcacgggccattcagcaactgttatgtcacttgattttcatccaaataaagaggatatgatatgctcctgtgatagtgatggggaagtgcgcagctggagcataaataatggtagctgtttgacatgtgttaagggaggtgctactcagatgagatttcaacctcgtaagggaaagtatctagcagcggcctcagataaagctatctacatacttgatggggagacacaacatgcttgtagaagtcccttgcaggggcacaataagaatattcaatcgctttgttgggattctgctggcgaatatctcgcttctgtcagtgaagactcggtcagaatatggtcattcagttctggacgtgaaggtgaatttgtgcatgaattgaatcgcagcggaaatcaattccactcgtgtgttttccacccaacttatcagtcattgctagtgattggttgttacgagtctttggaactttgggacataagggagaagaacaccatgaccttcaacaatgcgcatgacggtttggttgcagccctggcatcatccagtgctacagggaaggttgcctcagtaagccatgatagaactctcaagctctggaaatgactttataatagcgatcggtgtgaagacgattttctaccaaaaatgaccacatgacgcacatgacgaaaaggtagctgacaagatactctggagccgcgtgggctcaagaactaacggtggtttgtgttgtggttcttgtatgctgttcaatatgctattgaagtttgtaactcctaatagaaacgttcagtcaagactccaagattgtacctcggacaagtagcaaatatttattccccaaaaaaatctgcattttgttttttaccgtgtattttaacgtcgccgagcctgtttggaagctagttttaatgttttgc

SEQ ID NO: 77280 - DNA, 3410 bp, Zea Mays
gtctctattccccaattgcccctcacctccattaccttccccgtctccctcgtacattcgacattccccttcccctgccattcggtcccgctcccgccgcctccgccgcgattccactctcccttccgcctccgccgcgattccactctcccttccgcctccgccgcgattcttgtctcccttccgcctccgccgcttaccgccgcggccacgccgcaagcgtttcgtctcgggatccccacttcgtctcgctcgagcggtagagccacgctcccaccgcccaggcgtccgccgcggaggcgtcggtggcctatctgagcaggctctcctcgtcgggcttttttgctttagagggagagacttcctggtcggcgcgccgcgagaagagcaccagccatgtcgcaaactaactgggaggcggacaagatgctggatgtatacatatatgattattttatgaagagaaatttgcaggcaactgcaaaggccttccaagcagagggaaaggtctcttcggatccagttgcaattgacgcacctggtggatttcttttcgagtggtggtcggttttttgggatatattcatagcaagaactaatgagaagcattcagatgttgcagcctcatatattgagactcagctcatgaaagccagggagcaacaacatcaacagcagcaacagatccctcaacagaggcagcagcagccacagcatatacaaatgcaacaaatgctgttgcaaagagctgtgcagcagcagcagcagcagcagcaacaacaacaacaacaacaacaacaacaacaacaacaacaacaacaacaacaacctcagcagcagcagcagcagcagctgcaacagcaacagctgcaacagcagcgtagagatggttctcatcttctcaatggttctgcaaatggaatttctggaaacaatcctttaatgcggcaaaaccaaagtactgcaaatgttatggcaacaaaaatgtacgaggaaaggttaaaggtaccttccgagagagactctttggaagaggcatcattgaagcaaaggtacggagagaatgctgggcaactacttgattcaaatgaagcatcattgttgaaagcagcttcaagcgcgcaatcctcagggcaaattttgcatggaactgttggtggcttgtcaggcactctgcaacaagttcaggccaggagccctcaacttcctggtcctgctcagggtatcaagacagagattaatcccattctgacccccagagctgcaggcccagaagggtcatttataggtgctcaaggatctaatcaagctgggaacaatttgactctgaaaggatggccactcacgggacttgagcaacttaggtcaggaattcttcagcagaagtcgtttatacataatcaacagcaattgcagcagcaaatccagatgctgactccacagcagcagcagcagcttatgctgcatgctcagcaaaatatgtcttcaccaacatctagtgatgtcgacaacagaagattgaggatgatgctaaatagaaatgctgttcttggccgggatgggcagacaaacagtggtagtgatattattccaaatattggctctcctagtcaaagtggtggcgatatagatatgcttataaagaagaaacttgctcagcagcagcaactattacaacagcaaagcaatagccaacagctcccacagcaacatcagcttcagcaacctgctgtctctagccagcaatctcaaagttcaaatcaacatcttcaacaagaaaagccaggaattggaagtatgcctgctgatgggggcataccaaattcatttgggggagctgaacagacagcaaagaagagaaagaagccaggctcatcctctggtagagctaatagttcaggcacagccaatactgctggtccctctccaagttctgcaccatcgacaccttccactcatacaccaggagacgtgatgtctgtgccacagctgcagcagaatggcggttcagctaaacccatggtaatgtttggctctgacggaactgggagcttgacatctccagcaaacccattggatgatgttgaccgcttgctagaagatggctcattggatgataatgttgaatcttttctatcacaggatgacatggatcctagggacaacttggggcgatgcatggatgctagtaaagggtttggtttttctgaggttgccaaagcacgcgcaagcacagccaaagttgtctgttgccacttctcagctgatggtaaactgcttgctactggtggtcatgataaaaaggtcactttgtggtgtacagattctctgaaccctaaatcttatctggaagagcactcgtttcttatcactgatgttagatttagcccaagcatgtcacgccttgctacatcctcctttgacaaaactgtgcgggtttgggatgcagataatactgactattcactacgaactttcacgggccattcagcaactgttatgtcacttgattttcatccaaataaagaggatatgatatgctcctgtgatagtgatggggaagtgcgcagctggagcataaataatggtagctgtttgacatgtgttaaggtgtttaagggaggtgctactcagatgagatttcaacctcgtaagggaaagtatctagcagcggcctcagataaagctatctacatacttgatggggagacacaacatgcttgtagaagtcccttgcaggggcacaataagaatattcaatcgctttgttgggattctgctggcgaatatctcgcttctgtcagtgaagactcggtcagaatatggtcattcagttctggacgtgaaggtgaatttgtgcatgaattgaatcgcagcggaaatcaattccactcgtgtgttttccacccaacttatcagtcattgctagtgattggttgttacgagtctttggaactttgggacataagggagaagaacaccatgaccttcaacaatgcgcatgacggtttggttgcagccctggcatcatccagtgctacagggaaggttgcctcagtaagccatgatagaactctcaagctctggaaatgactttataatagcgatcggtgtgaagacgattttctaccaaaaatgaccacatgacgcacatgacgaaaaggtagctgacaagatactctggagccgcgtgggctcaagaactaacggtggtttgtgttgtggttcttgtatgctgttcaatatgctattgaagtttgtaactcctaatagaaacgttcagtcaagactccaagattgtacctcggacaagtagcaaatatttattccccaaaaaaatctgcattttgttttttaccgtgtattttaacgtcgccgagcctgtttggaagctagttttaatgttttgc

SEQ ID NO: 77281 - DNA, 1330 bp, Zea Mays
gtctctattccccaattgcccctcacctccattaccttccccgtctccctcgtacattcgacattccccttcccctgccattcggtcccgctcccgccgcctccgccgcgattccactctcccttccgcctccgccgcgattccactctcccttccgcctccgccgcgattcttgtctcccttccgcctccgccgcttaccgccgcggccacgccgcaagcgtttcgtctcgggatccccacttcgtctcgctcgagcggtagagccacgctcccaccgcccaggcgtccgccgcggaggcgtcggtggcctatctgagcaggctctcctcgtcgggcttttttgctttagagggagagacttcctggtcggcgcgccgcgagaagagcaccagccatgtcgcaaactaactgggaggcggacaagatgctggatgtatacatatatgattattttatgaagagaaatttgcaggcaactgcaaaggccttccaagcagagggaaaggtctcttcggatccagttgcaattgacgcacctggtggatttcttttcgagtggtggtcggttttttgggatatattcatagcaagaactaatgagaagcattcagatgttgcagcctcatatattgagactcagctcatgaaagccagggagcaacaacatcaacagcagcaacagatccctcaacagaggcagcagcagccacagcatatacaaatgcaacaaatgctgttgcaaagagctgtgcagcagcagcagcagcagcagcaacaacaacaacaacaacaacaacaacaacaacaacaacaacaacaacaacaacctcagcagcagcagcagcagcagctgcaacagcaacagctgcaacagcagcgtagagatggttctcatcttctcaatggttctgcaaatggaatttctggaaacaatcctttaatgcggcaaaaccaaagtactgcaaatgttatggcaacaaaaatgtacgaggaaaggttaaaggtaccttccgagagagactctttggaagaggcatcattgaagcaaaggtacggagagaatgctgggcaactacttgattcaaatgaagcatcattgttgaaagcagcttcaagcgcgcaatcctcagggcaaattttgcatggaactgttggtggcttgtcaggcactctgcaacaagttcaggccaggagccctcaacttcctggtcctgctcagggtatcaagacagagattaatcccattctgacccccagagctgcaggcccagaagggtcatttataggtgctcaagctttgcagtaaaaaaatgtgcttggcgtattca

SEQ ID NO: 77282 - DNA, 3759 bp, Zea Mays
tgaagctgacgatggcgccaagaagactgatattcagaagtttcaggcgtggcggatgccttggaagcacaggcgaagaccatggcaacgcaagctcagttgttgcagcaaatctgcgatcggttggacgtccaggatcgccattgggaagcgctcgagcacaccgttgctcgcaacgctgcctccatcaacaccttgaccaagcaggttcaggagaagggcgtcgctgtctcgcccgcggaggtggccaaggcgttgtcgacgcagttcgagtcgaaggtggccgagttccagtcgagaacctgggaacggatcgaagaagtagatgggtcactttccaagcgtgtcgctgtgcttgagtcttggaggccttttgtcgagcactcagtggtcgcggcccagtcggctgttgatgcgctgcgtgctgatatatctcgcgtgcccagccacatcgacggtgatcatcgcgcgtcgccttccgttcatcatcatgctggtattctcggagcatatggatcaatgggggggcggccacctgctacctcgccgcttgccgatggccctcgtgggcaccgtggtgcacatcatcgtcgggaggacagccacgggccaagggtctatgctacaagtgtgggttgccattttccaagggacatcgttgtgcagaaacagttcagctacatgttgttgatgaattgtgccagttcctgcaagcgcctcagcaggatgacgattgtcaatcagtggtttccggggaacttcatgtgatgaatctgtctcaagctgcaatagagaaggcacaacctcctaagaccatgcagtttttgggcaacatccggggtatggaccttttggtgttgctggactctggaagttctcactgttttctcagtactcaagttgctgatcagctgcaagggctaacacctttgccacaggtgttgtcagtacaagtggcaaatgggtctaaacttcagtgtactcatgagttggtgcaagcttcttggtctcttggtggctgtgagtttcagtcgacgttgcgtatattgccccttcagacttacgacttgattgttggcatggactggcttgaacagtttagtcctatgtgggtgcattgggcagacaaatggctgaccattacttataaaggttcaccaaagcagttatttggattgcattcgcccaagggacagtattcagttgttgaactgtgtcatattgctgaattgccagacaaggatcattctattctatctgcattgccagctgatcttcagaccttgttgtacaagtttcagtctgtttttgcagtacctaaaggactgccacctccccgagattgtgaccatcatatcaatcttctacctggtgcacaacccttccatatgaggccttatcgatatgcaccagccctcaaatctgaggttgaaaaacaagtggaagagatgttggctgcaggaatcattcaacccagtcagagtgcattttcttcctcagtcatattggtcaagaagaaggatgacacatatcgtttttgtgtggactacaggcatctgaatgctataactgttaaaactcgatttcctattcctgtggtggatgagtttcttgatgagctacatggtgctgcttggttctcaactctagacttgcgtgccggatttcatcaaatacgtatggctcctgacgatcagcacaagacagcgtttcaaacacataacggccattatgagtttcgtgttatgtcgtttggacttactggagcacctgctacgtttcagggcgccatgaacaagacattgtcatctcttctccggaaatgtgtcttggtgttcttcgatgatattcttgtatatagtcatacttgggaagaccacttgctacatatagagttggtgttgcagctattggttcaagattgttggcaagttaagctgtctaagtgctcctttggccgtcaagagatctcttacttgggtcatattattagccaagctggagtggctactgacccatctaaagtagctgctgtgtcttcctggcctgcccctaagacatgcaaagagctgagaggatttttgggtcttgccggctattataggaagtttgtcaaaaattttggtatattggctaaaccactaaccaatctgctcaagaagcacactgtttttgtatggactgaggttcaggattcagccttccaagctattaaacaggctttgtcttctgcgccagttttggccttgcccaactttcataggtcgtttgctattgagaccgatgcctcaggaacgggtattggtgctgtgcttcaacaggacgggcatcccttggcatttgtcagcaaggccttgggggtggctcatttgggactttcagcatacgaaaaagaatacttggccattcttctagctgtggatcaatggagatcttatttacagcatgctgaattcttaatactcaccgatcatcgcagtttgtctcacttaaatgagcaacgtcttcacacgtcttggcaacaaaaggtgttcaccaagttacttggcttgcaatatcgaattgtttataagaaaggtgtggacaatgctgctgcggatgcactctctcgtcgcccacaccatgaagatcttgagtgttgtgctctgtcagtggcttcaccgagctggttacaggatgtagtggctggttacaacaatgattctgaagctctgaagttgttgactgcattatcagtgggttctcagcctccatacagcctgcacaatggtattatccggtataaaaatcgtgtttggttgggcaataattctgagttacacaacaaagtggtcgctgctttgcattctagtgccttggggggtcactccggatttcctgttacatatcgtcgcattaagcagcttttctattggccacatatgaagcagactattaaggaccttgttgatgcttgttcagtttgtcatcaagctaagcccgaccgttctcggtatcctggactcctgcagccccttccggtaccacaacatgcttggcaggcgatttccttagatttcattgaaggattaccacggtccggggtctacaatacaatattggtggttgtggacagattgtccaagtatgctcactttgtggcaatgcatcatccttttacagcactgaaagttgccaagattttcatgacatcggtataccgtctccatggcatgcctgaatccattgtgtctgatacggatcgaatatttaccagtgcgttatggaaggagctgtttcagttgtcaggtacatgcctccatatgagctcttcataccacccccaaacggatggacaaactgagcgggtaaatcagtgtgtggagacatatttgcgctgttttgttcaatcttgtccctccaaatggtcttcatggcttccaatggctgagtattggtataattgctgcttccatacttctctgggtcggtctcctttcgaagtattgtatggccattctcctcggcactttggtctgtcagttgatgattcggtgaaccatgctgatcttaagctctggctgtctcaacgtgagctcatgttacgagctgtgcagcaacatcttcttcgggcacaacaacgaatgaagaatcaggctgataagcgtcggtccgaacgcgagtatcaagtgggcgatatggtgtatttgaagctgcagccttatgttcagacatctgtggctttgcgtgctaatcacaaacttgcttacaagtactttg

SEQ ID NO: 77283 - DNA, 4652 bp, Zea Mays
atggacgcggcgggggacattcagaaggtggcgagtatgcggcgaggggacagcggctccatgtggcggcgaggcgacgacgtgttctcacgctcgtcaagggaggaggacgacgaggaggcgctccgctgggccgcgctagagaaactgcccacctacgaccgcatccgccgcgcaatcgtcccgctcggcctcggcgacgaggcgcccggcagcaaggggctcgtggacgtcgacgtgctcagcctcggcccgcgcgagaggcgggcgctgctggagcgcctggtccgcgtcgccgacgaggacaacgagcgattcctactcaagctcaaggaccgcatcgacagggtcggtatcgacatgcccacgatcgaggtgcggttccagaaccttgaggcggaggcggaggtgcgcgtcggcagcagcggcctccctaccgtcctcaactccgtcgtcaacacggtcgaggaagcggcgaacgcgttgcacatactgcccagtaggaagcagatcatgcctattctccacgacgtcagcgggattatcaagcctcgcaggttaacacttttgttgggtccgcctggatctgggaagaccactttgttgctcgctttggccggaaggcttgacaaagatctcaagttttcaggcaaagtgacctataatggtcacgagatgacagagtttgttcctgagaggacggccgcatacatcagtcagcatgacctccacataggagagatgactgtgagggagacgcttgcattctctgcacgctgccagggtgttggctcccgtttgggtacaattccaaccaattaatacacgatacatgcatatgctgactgagctgtcgaggcgagagaaggctgccaatatcaagcctgatgctgatattgatgcattcatgaaggcggctgcactgggtgggcaagatgctaatgtggtcactgactatattctgaagatattaggactagatatatgtgcagacacaatggtaggggatgagatgctcaggggcatatctggtggacaacggaagcgtgttacaactggtgagatgctggttgggccagccagggcgcttttcatggacgagatctcaactgggcttgatagttcgactacatttcaaattgtgaactcgctgaggcagtccattcacatcctcggtggcacagctgttatctccctactgcagccggcacctgagacttataacttgttcgatgacatcatactcctctcagatggtcaggttgtctatcagggtcccagagaagaagtggttgagtttttcgagtctgtaggtttcagatgccctgagaggaagggtgtcgctgatttcctgcaagaagtgacttcgaaaaaagatcagaaacagtactgggcgcgacctgatgagccctacaggtttgtgtctgtgaaggaacttgcgactgcattcaagtcatcccacacagggagagctttagcaaatgagcttgccgttccgttcgataagagcaaaagccacccagccgcactaaccaccacaaggtatggtgtgagtggcaaggagctgctcaaagcaaacatagaccgggagatccttctcatgaagaggaactcttttgtctacatgttcagaaccttccagctgatggtgatgtcaatcattgcaatgactctcttcttccgtacgaagatgaagcatgacacagtgaatgacgggggtatctatatgggcgcactcttctttggtgtgcttatgatcatgttcaatggcttatctgagctggcgctaactgtcttcaagctgcctgtattcttcaagcagagggatctccttttctttccggcatggtcctacactatacctgcatggatcctcaaggtacccatcacatttatcgaggttggcggttatgtattcttgacatactatgtcattgggttcgacccaaatgtcggcaggttcttcaagcagtatctgcttctgctagcagtcaatcagatgacagcagcactcttccggtttgttggtggggtatcgaggaacatgattgttgctaatgtcttcgcatcgttcatgttgctggttgtcatggtgttgggaggatttattctacaaagagataaagtgaaaaaatggtggatctggggctactggatctccccaatgatgtatgcacaaaatgcaatttcagtgaatgagatgttgggtcacagctgggacaaaatattgaatagcactgcatccaacgagaccctaggtgtgcaagtccttaagtcccgtggagtattcccagaagcaaagtggtactggattggctttggtgctatggttgggttcaccatactcttcaacgctcttttcactcttgcccttacataccttaagccatatggcaactcccggccatctgtatccaaagaagagctgaaggagaagcatgcaaacatcaaaggggaggttgtggatggcaatcacttggtatcagtcaaccctgtaactgattcagcaatcatggaagatgattctgcctcgactaaaaagggaatgatcctcccatttgtcccgctctcggtcacctttgacaacatcaaatactctgtcgacatgccacaggaaatgaaaggacaaggtgtacaagaagatcgtttggagctcctgaaaagtatcagtggatcttttaggcctggtgtgctgactgcactgatgggcgtcagtggtgcaggaaaaactactttgatggatgtgttagctgggagaaagacaggtggctacattgaaggagacatccgcatttcaggatacccgaagaaacaagagacctttgcacgtgtatcaggatactgtgagcaaaatgatatccactcgccacaggtgacagtctatgagtccctgcttttctcagcatggctccggcttcccaaggacgtcgattcaaacaaaagaaagatcttcattgaggaggtgatggagctcgtggagctcaaaccactgagaaatgctttggttggacttcctggagtgaatggtctgtcaactgagcagaggaaaaggcttaccattgctgtggaacttgttgcgaatccatcaatcatctttatggatgagccaacctcagggcttgatgcccgagcagctgcaattgtgatgcggacggtgaggaacactgttgatactggtagaactgtggtctgcacgatacatcagcctagcattgacatatttgaagcatttgatgagcttttcctaatgaagcgtggtggggaagagatctatgctggtccacttggacataattcttcagaactaatcaagtattttgaggagattcaaggggtcagcaaaattaaagatggctacaatccagcaacatggatgctggaagtgaccacaatttctcaggaacagattctaggtgttgatttcagtgacatatacaagaaatctgaactctaccagaggaacaaggccttgataaaggaattgagccaaccagcaccaggttcaactgacctgcatttctctagcaagtacgcgcagtctttcaatacacaatgcgtggcttgcctgtggaagcagaacctgtcatactggaggaaccctccttataataccgtgaggttctttttcactggcataattgctctcctccttggcaccatcttttgggacctaggcagcaaagtgtatacatcacaagatttgttaaatgccatgggatcaatgtactctgcggtgctgttcatcggggtcatgaattgtacctcagttcagccagtggtggccgtggagcggacagtcttttaccgtgaaagagctgccggcatgtactcagctttcccatatgcatttggccaggttgtcattgagctcccatacgcactggctcaggatatcttatacgctgtcatagtgtactccatgatcgggtttgagtggacagttgctaagttcttctggtacctcttctttgggtacttcacgctgctctacttcacattctatggaatgatgaccgtcgggctgacgcctaactaccacatcgctgcgatcgtctccgcggcattctacgccatctggaacctcttctccggattcgtcatcccccgaccgaaagtgccgatctggtggaggtggtactgctggatatgccccgtggcgtggacgctgtacgggcttgtggtgtcacagtacggtgacatcatgacggagatggacgacaaaaggaccgtgaaggtgttcgttgaggattacttcgacttcaagcacagctggctggggtgggtggccgccgtggtggtggcattcggggtgctctttgctaccctgtttgcctttgccatcatgaagcttaacttccagaagagataacgacgataggagatcggaaatcacctcctggataagtgattttgcattggttgggtcgtgcatgtagattgggcttgtgcatattctgctccttttctgggaggatgatggtgtagtattttgtaaagaatagtttgcgcatctagtaaattctgtaagcgtgtagtcccttacaaaggatcagttggagaaggcgaggaaatacctcgtgcgttgctgttgacttaagcgtacaagtactacctccgttctcgaatatttgattatcgctcgttaatttatt

SEQ ID NO: 77284 - DNA, 1071 bp, Zea Mays
atggctgcaatgtcagagccctttctacaggagtctcagtagaattcatttcagcaaacagcaagcacgaactagttattagtatttacacttgctattgggttgatatactacatatccctgtgttttcttaccactataggtatgggccattttggacatgcaccaccctgattttcgttgctgcatctattgctacttttgtcacctacctatcccacaaatggcacaagaaggaatggaactatgatatcaacttggttacctggtctgctgggttattctatggctacgtgacatttgttcctcttcttttatatgttattctcaagtacttgtcagcacctgctggtttggtgcaattgtggtgcctatatggatattctctgttcatattcattccagcatcgcttctgtctattgtgccaatagaaatattcagatgggtgattgctggtgttgctggtttcatgtctgctactttcgttgctgtaaatctccgcgcacacattgtaaattccggcgagcgatggttcctgatcgttgcagggatattcttgttgcagttggggcttgctgttttgctgaaactatatttcttcacgataactgtatagggttatttacatctaatgatcgtactagtcaagaatacacacaattttccatgtggaatcacttccatgttcattgaacattgatgtaatttttccatgtatacatctttcttacacgtagaattgagaagcccctgaaattgaattacagcagccaaacaagtacacatgtgattgatatgggtgaagagtctgatctgtagtctattctgtgttccactgcttgaggtgaattttgaatgagaaatcgctgtgttctccactcgtcttagcagagatggcaacagtcacgaacctgctgggtattgttaacccaacttcatatctgcgaacataaaatctgttgactaaaaaaatccatgacctgtcgtgtgttttgtttttaggactatgggttgtttggttctgcttttagaacctgtttttcttaaaaaaagtagaaatctgaatcaaa

SEQ ID NO: 77285 - DNA, 1551 bp, Zea Mays
ttcagataaagctacacttcctagccctgttttcttggggaacattcaaacgctcactgctagtgacttagacaaatacaaggcacatgcatggcttctttctcctccatgccagccatacacacgacaagaagcattcagctgatgctcgtgcattttcgttcatcaagattcttaacctcatgcaagacatgagctatcctccacaaatgttatttgtggaaaacgtagttggatttgaggtgtctgatacacatgaccagttgctggaggtcctttcaagtctcaattttaacacgcaagaattcatcctaagccccttacagtttggtgtcccatattctagacctcgctacttctgtttggcgaaacgtgaacctgtgcggtttcgacatgcattcgtcaacaataagttgctccagacacctatgtgcctgagcctgacactgagcagtacatcacagggtagcgaccaccagactgaagaagagctagagccagtttgtaagccaataaaagatttccttgtcaaggaggctgatggaggcactccagatgagacagttttgcaggattatatggtcccagtaaacttgattgagcggtggggcaatgctatggatattgtataccctgaatttaagcggtgctgctgtttcactaaaagctactatcgttatgtgaaggggacaggctctttgttggctacatctaaaaacctcaatgttcctgaagagaagctccaaatttcttccctgaaggagttgggcctacgatttttcacccctcgtgaggtggctgcccttttacacttatgtttaaatccttccccaggctcttgatgttgttcataatttttcaggttgccaatttccattccttcccttcaaatttctgcttcccggatcacataagccttaggcaacagtatgctatgctgggtaacagtctgagtatagcagttgtgggtcctttgctgcattatctctttgctgaggcctgagtcatagagaagtccagtcagccctggtgacattagcatggcacaaacactgtggctgcgatctgccaaaatttcttcatacgtgatttaagcaaggttggtatttaagtatggttttggggactacagtttggccatttgatgagcacaccgtgtaggcacaacctcacaatgtatcaacaaaagtgtaccatacagtagagaagctgtttctgcgcatacttcctccccctcatgcctatgctgtcatggtgaatgaattttggaattgtgatccgttgatgtgtgcatggatgaggctgtcgtaacgattgttgatctgagctttaagtaacttggaacctacttactccgagcaattccaattctattcttagctaacccatttaaagtttgacaatatttatgatgtaaaatatgtatagcaagtataaaatatactcaatgaagaatctatatcataaatattgacactttttttatataaacatcgtgaaactcaagattctttgacttggtattatgtttgaattgtattttgttttcgg

SEQ ID NO: 77286 - DNA, 1706 bp, Zea Mays
tgaagattcagtctggaaccttggctctcagctctgctacctgatgttcagataaagctacacttcctagccctgttttcttggggaacattcaaacgctcactgctagtgacttagacaaatacaaggcacatgcatggcttctttctcctccatgccagccatacacacgacaaggacttcagaagcattcagctgatgctcgtgcattttcgttcatcaagattcttaacctcatgcaagacatgagctatcctccacaaatgttatttgtggaaaacgtagttggatttgaggtgtctgatacacatgaccagttgctggaggtcctttcaagtctcaattttaacacgcaagaattcatcctaagccccttacagtttggtgtcccatattctagacctcgctacttctgtttggcgaaacgtgaacctgtgcggtttcgacatgcattcgtcaacaataagttgctccagacacctatgtgcctgagcctgacactgagcagtacatcacagggtagcgaccaccagactgaagaagagctagagccagtttgtaagccaataaaagatttccttgtcaaggaggctgatggaggcactccagatgagacagttttgcaggattatatggtcccagtaaacttgattgagcggtggggcaatgctatggatattgtataccctgaatttaagcggtgctgctgtttcactaaaagctactatcgttatgtgaaggggacaggctctttgttggctacatctaaaaacctcaatgttcctgaagagaagctccaaatttcttccctgaaggagttgggcctacgatttttcacccctcgtgaggttgccaatttccattccttcccttcaaatttctgcttcccggatcacataagccttaggcaacagtgagtttaagttccattatacacttctggttatctttagtaagcgacaagggcatttgaattgcagtacatataagaaacatgagagatgaggctatgctgggtaactatctgaatagtgtttatagttataggttaccatatatcttttgaaaccctcttgttgcaggtatgctatgctgggtaacagtctgagtatagcagttgtgggtcctttgctgcattatctctttgctgaggcctgagtcatagagaagtccagtcagccctggtgacattagcatggcacaaacactgtggctgcgatctgccaaaatttcttcatacgtgatttaagcaaggttggtatttaagtatggttttggggactacagtttggccatttgatgagcacaccgtgtaggcacaacctcacaatgtatcaacaaaagtgtaccatacagtagagaagctgtttctgcgcatacttcctccccctcatgcctatgctgtcatggtgaatgaattttggaattgtgatccgttgatgtgtgcatggatgaggctgtcgtaacgattgttgatctgagctttaagtaacttggaacctacttactccgagcaattccaattctattcttagctaacccatttaaagtttgacaatatttatgatgtaaaatatgtatagcaagtataaaatatactcaatgaagaatctatatcataaatattgacactttttttatataaacatcgtgaaactcaagattctttgacttggtattatgtttgaattgtattttgttttcgg

SEQ ID NO: 77287 - DNA, 1701 bp, Zea Mays
tgcaaggcaaaaagttgcatttgtgatgatcatctgaagattcagtctggaaccttggctctcagctctgctacctgatgttcagataaagctacacttcctagccctgttttcttggggaacattcaaacgctcactgctagtgacttagacaaatacaaggcacatgcatggcttctttctcctccatgccagccatacacacgacaagaagcattcagctgatgctcgtgcattttcgttcatcaagattcttaacctcatgcaagacatgagctatcctccacaaatgttatttgtggaaaacgtagttggatttgaggtgtctgatacacatgaccagttgctggaggtcctttcaagtctcaattttaacacgcaagaattcatcctaagccccttacagtttggtgtcccatattctagacctcgctacttctgtttgggtagcgaccaccagactgaagaagagctagagccagtttgtaagccaataaaagatttccttgtcaaggaggctgatggaggcactccagatgagacagttttgcaggattatatggtcccagtaaacttgattgagcggtggggcaatgctatggatattgtataccctgaatttaagcggtgctgctgtttcactaaaagctactatcgttatgtgaaggggacaggctctttgttggctacatctaaaaacctcaatgttcctgaagagaagctccaaatttcttccctgaaggagttgggcctacgatttttcacccctcgtgaggtggctgcccttttacacttatgtttaaatccttccccaggctcttgatgttgttcataatttttcaggttgccaatttccattccttcccttcaaatttctgcttcccggatcacataagccttaggcaacagtgagtttaagttccattatacacttctggttatctttagtaagcgacaagggcatttgaattgcagtacatataagaaacatgagagatgaggctatgctgggtaactatctgaatagtgtttatagttataggttaccatatatcttttgaaaccctcttgttgcaggtatgctatgctgggtaacagtctgagtatagcagttgtgggtcctttgctgcattatctctttgctgaggcctgagtcatagagaagtccagtcagccctggtgacattagcatggcacaaacactgtggctgcgatctgccaaaatttcttcatacgtgatttaagcaaggttggtatttaagtatggttttggggactacagtttggccatttgatgagcacaccgtgtaggcacaacctcacaatgtatcaacaaaagtgtaccatacagtagagaagctgtttctgcgcatacttcctccccctcatgcctatgctgtcatggtgaatgaattttggaattgtgatccgttgatgtgtgcatggatgaggctgtcgtaacgattgttgatctgagctttaagtaacttggaacctacttactccgagcaattccaattctattcttagctaacccatttaaagtttgacaatatttatgatgtaaaatatgtatagcaagtataaaatatactcaatgaagaatctatatcataaatattgacactttttttatataaacatcgtgaaactcaagattctttgacttggtattatgtttgaattgtattttgttttcgg

SEQ ID NO: 77288 - DNA, 1605 bp, Zea Mays
tgctgtttacttttaaaaaaactagtgcaagcgattatgggtgcgcctaggtgcaaggcaaaaagttgcatttgtgatgatcatctgaagattcagtctggaaccttggctctcagctctgctacctgatgttcagataaagctacacttcctagccctgttttcttggggaacattcaaacgctcactgctagtgacttagacaaatacaaggcacatgcatggcttctttctcctccatgccagccatacacacgacaaggacttcagaagcattcagctgatgctcgtgcattttcgttcatcaagattcttaacctcatgcaagacatgagctatcctccacaaatgttatttgtggaaaacgtagttggatttgaggtgtctgatacacatgaccagttgctggaggtcctttcaagtctcaattttaacacgcaagaattcatcctaagccccttacagtttggtgtcccatattctagacctcgctacttctgtttggcgaaacgtgaacctgtgcggtttcgacatgcattcgtcaacaataagttgctccagacacctatgtgcctgagcctgacactgagcagtacatcacagggtagcgaccaccagactgaagaagagctagagccagtttgtaagccaataaaagatttccttgtcaaggaggctgatggaggcactccagatgagacagttttgcaggattatatggtcccagtaaacttgattgagcggtggggcaatgctatggatattgtataccctgaatttaagcggtgctgctgtttcactaaaagctactatcgttatgtgaaggggacaggctctttgttggctacatctaaaaacctcaatgttcctgaagagaagctccaaatttcttccctgaaggagttgggcctacgatttttcacccctcgtgaggttgccaatttccattccttcccttcaaatttctgcttcccggatcacataagccttaggcaacagtatgctatgctgggtaacagtctgagtatagcagttgtgggtcctttgctgcattatctctttgctgaggcctgagtcatagagaagtccagtcagccctggtgacattagcatggcacaaacactgtggctgcgatctgccaaaatttcttcatacgtgatttaagcaaggttttggggactacagtttggccatttgatgagcacaccgtgtaggcacaacctcacaatgtatcaacaaaagtgtaccatacagtagagaagctgtttctgcgcatacttcctccccctcatgcctatgctgtcatggtgaatgaattttggaattgtgatccgttgatgtgtgcatggatgaggctgtcgtaacgattgttgatctgagctttaagtaacttggaacctacttactccgagcaattccaattctattcttagctaacccatttaaagtttgacaatatttatgatgtaaaatatgtatagcaagtataaaatatactcaatgaagaatctatatcataaatattgacactttttttatataaacatcgtgaaactcaagattctttgacttggtattatgtttgaattgtattttgttttcgg

SEQ ID NO: 77289 - DNA, 1877 bp, Zea Mays
gaactctccgactcacagagtcacagtcacaggctcagccaacataagggaaccggggttccaaacagttgctgcagcctagcacgggccgcgcgactgccggaggcgatggaggcgccggcaccttggagagtgctcgagttctacagcggcatcggaggcctgaggtactcgctgatggcgtcgggcgtgcgggcggaggtggtggaagccttcgacatcaacgacgtcgccaatgacgtctatgagcacaacttcggccaccgcccctgccaggggaacattcaaacgctcactgctagtgacttagacaaatacaaggcacatgcatggcttctttctcctccatgccagccatacacacgacaaggacttcagaagcattcagctgatgctcgtgcattttcgttcatcaagattcttaacctcatgcaagacatgagctatcctccacaaatgttatttgtggaaaacgtagttggatttgaggtgtctgatacacatgaccagttgctggaggtcctttcaagtctcaattttaacacgcaagaattcatcctaagccccttacagtttggtgtcccatattctagacctcgctacttctgtttggcgaaacgtgaacctgtgcggtttcgacatgcattcgtcaacaataagttgctccagacacctatgtgcctgagcctgacactgagcagtacatcacagggtagcgaccaccagactgaagaagagctagagccagtttgtaagccaataaaagatttccttggaggctgatggaggcactccagatgagacagttttgcaggattatatggtcccagtaaacttgattgagcggtggggcaatgctatggatattgtataccctgaatttaagcggtgctgctgtttcactaaaagctactatcgttatgtgaaggggacaggctctttgttggctacatctaaaaacctcaatgttcctgaagagaagctccaaatttcttccctgaaggagttgggcctacgatttttcacccctcgtgaggttgccaatttccattccttcccttcaaatttctgcttcccggatcacataagccttaggcaacagtgagtttaagttccattatacacttctggttatctttagtaagcgacaagggcatttgaattgcagtacatataagaaacatgagagatgaggctatgctgggtaactatctgaatagtgtttatagttataggttaccatatatcttttgaaaccctcttgttgcaggtatgctatgctgggtaacagtctgagtatagcagttgtgggtcctttgctgcattatctctttgctgaggcctgagtcatagagaagtccagtcagccctggtgacattagcatggcacaaacactgtggctgcgatctgccaaaatttcttcatacgtgatttaagcaaggttttggggactacagtttggccatttgatgagcacaccgtgtaggcacaacctcacaatgtatcaacaaaagtgtaccatacagtagagaagctgtttctgcgcatacttcctccccctcatgcctatgctgtcatggtgaatgaattttggaattgtgatccgttgatgtgtgcatggatgaggctgtcgtaacgattgttgatctgagctttaagtaacttggaacctacttactccgagcaattccaattctattcttagctaacccatttaaagtttgacaatatttatgatgtaaaatatgtatagcaagtataaaatatactcaatgaagaatctatatcataaatattgacactttttttatataaacatcgtgaaactcaagattctttgacttggtattatgtttgaattgtattttgttttcgg

SEQ ID NO: 77290 - DNA, 1517 bp, Zea Mays
gaactctccgactcacagagtcacagtcacaggctcagccaacataagggaaccggggttccaaacagttgctgcagcctagcacgggccgcgcgactgccggaggcgatggaggcgccggcaccttggagagtgctcgagttctacagcggcatcggaggcctgaggtactcgctgatggcgtcgggcgtgcgggcggaggtggtggaagccttcgacatcaacgacgtcgccaatgacgtctatgagcacaacttcggccaccgcccctgccaggtgtctgatacacatgaccagttgctggaggtcctttcaagtctcaattttaacacgcaagaattcatcctaagccccttacagtttggtgtcccatattctagacctcgctacttctgtttggcgaaacgtgaacctgtgcggtttcgacatgcattcgtcaacaataagttgctccagacacctatgtgcctgagcctgacactgagcagtacatcacagggtagcgaccaccagactgaagaagagctagagccagtttgtaagccaataaaagatttccttgtcaaggaggctgatggaggcactccagatgagacagttttgcaggattatatggtcccagtaaacttgattgagcggtggggcaatgctatggatattgtataccctgaatttaagcggtgctgctgtttcactaaaagctactatcgttatgtgaaggggacaggctctttgttggctacatctaaaaacctcaatgttcctgaagagaagctccaaatttcttccctgaaggagttgggcctacgatttttcacccctcgtgaggttgccaatttccattccttcccttcaaatttctgcttcccggatcacataagccttaggcaacagtatgctatgctgggtaacagtctgagtatagcagttgtgggtcctttgctgcattatctctttgctgaggcctgagtcatagagaagtccagtcagccctggtgacattagcatggcacaaacactgtggctgcgatctgccaaaatttcttcatacgtgatttaagcaaggttggtatttaagtatggttttggggactacagtttggccatttgatgagcacaccgtgtaggcacaacctcacaatgtatcaacaaaagtgtaccatacagtagagaagctgtttctgcgcatacttcctccccctcatgcctatgctgtcatggtgaatgaattttggaattgtgatccgttgatgtgtgcatggatgaggctgtcgtaacgattgttgatctgagctttaagtaacttggaacctacttactccgagcaattccaattctattcttagctaacccatttaaagtttgacaatatttatgatgtaaaatatgtatagcaagtataaaatatactcaatgaagaatctatatcataaatattgacactttttttatataaacatcgtgaaactcaagattctttgacttggtattatgtttgaattgtattttgttttcgg

SEQ ID NO: 77291 - DNA, 1816 bp, Zea Mays
gaactctccgactcacagagtcacagtcacaggctcagccaacataagggaaccggggttccaaacagttgctgcagcctagcacgggccgcgcgactgccggaggcgatggaggcgccggcaccttggagagtgctcgagttctacagcggcatcggaggcctgaggtactcgctgatggcgtcgggcgtgcgggcggaggtggtggaagccttcgacatcaacgacgtcgccaatgacgtctatgagcacaacttcggccaccgcccctgccaggggaacattcaaacgctcactgctagtgacttagacaaatacaaggcacatgcatggcttctttctcctccatgccagccatacacacgacaaggacttcagaagcattcagctgatgctcgtgcattttcgttcatcaagattcttaacctcatgcaagacatgagctatcctccacaaatgttatttgtggaaaacgtagttggatttgaggtgtctgatacacatgaccagttgctggaggtcctttcaagtctcaattttaacacgcaagaattcatcctaagccccttacagtttggtgtcccatattctagacctcgctacttctgtttggcgaaacgtgaacctgtgcggtttcgacatgcattcgtcaacaataagttgctccagacacctatgtgcctgagcctgacactgagcagtacatcacagggtagcgaccaccagactgaagaagagctagagccagtttgtaagccaataaaagatttccttgtcaaggaggctgatggaggcactccagatgagacagttttgcaggattatatggtcccagtaaacttgattgagcggtggggcaatgctatggatattgtataccctgaatttaagcggtgctgctgtttcactaaaagctactatcgttatgtgaaggggacaggctctttgttggctacatctaaaaacctcaatgttcctgaagagaagctccaaatttcttccctgaaggagttgggcctacgatttttcacccctcgtgaggttgccaatttccattccttcccttcaaatttctgcttcccggatcacataagccttaggcaacagtgagtttaagttccattatacacttctggttatctttagtaagcgacaagggcatttgaattgcagtacatataagaaacatgagagatgaggctatgctgggtatgctatgctgggtaacagtctgagtatagcagttgtgggtcctttgctgcattatctctttgctgaggcctgagtcatagagaagtccagtcagccctggtgacattagcatggcacaaacactgtggctgcgatctgccaaaatttcttcatacgtgatttaagcaaggttttggggactacagtttggccatttgatgagcacaccgtgtaggcacaacctcacaatgtatcaacaaaagtgtaccatacagtagagaagctgtttctgcgcatacttcctccccctcatgcctatgctgtcatggtgaatgaattttggaattgtgatccgttgatgtgtgcatggatgaggctgtcgtaacgattgttgatctgagctttaagtaacttggaacctacttactccgagcaattccaattctattcttagctaacccatttaaagtttgacaatatttatgatgtaaaatatgtatagcaagtataaaatatactcaatgaagaatctatatcataaatattgacactttttttatataaacatcgtgaaactcaagattctttgacttggtattatgtttgaattgtattttgttttcgg

SEQ ID NO: 77292 - DNA, 1722 bp, Zea Mays
gaactctccgactcacagagtcacagtcacaggctcagccaacataagggaaccggggttccaaacagttgctgcagcctagcacgggccgcgcgactgccggaggcgatggaggcgccggcaccttggagagtgctcgagttctacagcggcatcggaggcctgaggtactcgctgatggcgtcgggcgtgcgggcggaggtggtggaagccttcgacatcaacgacgtcgccaatgacgtctatgagcacaacttcggccaccgcccctgccaggggaacattcaaacgctcactgctagtgacttagacaaatacaaggcacatgcatggcttctttctcctccatgccagccatacacacgacaagaagcattcagctgatgctcgtgcattttcgttcatcaagattcttaacctcatgcaagacatgagctatcctccacaaatgttatttgtggaaaacgtagttggatttgaggtgtctgatacacatgaccagttgctggaggtcctttcaagtctcaattttaacacgcaagaattcatcctaagccccttacagtttggtgtcccatattctagacctcgctacttctgtttggcgaaacgtgaacctgtgcggtttcgacatgcattcgtcaacaataagttgctccagacacctatgtgcctgagcctgacactgagcagtacatcacagggtagcgaccaccagactgaagaagagctagagccagtttgtaagccaataaaagatttccttgtcaaggaggctgatggaggcactccagatgagacagttttgcaggattatatggtcccagtaaacttgattgagcggtggggcaatgctatggatattgtataccctgaatttaagcggtgctgctgtttcactaaaagctactatcgttatgtgaaggggacaggctctttgttggctacatctaaaaacctcaatgttcctgaagagaagctccaaatttcttccctgaaggagttgggcctacgatttttcacccctcgtgaggttgccaatttccattccttcccttcaaatttctgcttcccggatcacataagccttaggcaacagtatgctatgctgggtaacagtctgagtatagcagttgtgggtcctttgctgcattatctctttgctgaggcctgagtcatagagaagtccagtcagccctggtgacattagcatggcacaaacactgtggctgcgatctgccaaaatttcttcatacgtgatttaagcaaggttggtatttaagtatggttttggggactacagtttggccatttgatgagcacaccgtgtaggcacaacctcacaatgtatcaacaaaagtgtaccatacagtagagaagctgtttctgcgcatacttcctccccctcatgcctatgctgtcatggtgaatgaattttggaattgtgatccgttgatgtgtgcatggatgaggctgtcgtaacgattgttgatctgagctttaagtaacttggaacctacttactccgagcaattccaattctattcttagctaacccatttaaagtttgacaatatttatgatgtaaaatatgtatagcaagtataaaatatactcaatgaagaatctatatcataaatattgacactttttttatataaacatcgtgaaactcaagattctttgacttggtattatgtttgaattgtattttgttttcgg

SEQ ID NO: 77293 - DNA, 1673 bp, Zea Mays
ctcagaactctccgactcacagagtcacagtcacaggctcagccaacataagggaaccggggttccaaacagttgctgcagcctagcacgggccgcgcgactgccggaggcgatggaggcgccggcaccttggagagtgctcgagttctacagcggcatcggaggcctgaggtactcgctgatggcgtcgggcgtgcgggcggaggtggtggaagccttcgacatcaacgacgtcgccaatgacgtctatgagcacaacttcggccaccgcccctgccaggtgtctgatacacatgaccagttgctggaggtcctttcaagtctcaattttaacacgcaagaattcatcctaagccccttacagtttggtgtcccatattctagacctcgctacttctgtttggcgaaacgtgaacctgtgcggtttcgacatgcattcgtcaacaataagttgctccagacacctatgtgcctgagcctgacactgagcagtacatcacagggtagcgaccaccagactgaagaagagctagagccagtttgtaagccaataaaagatttccttgtcaaggaggctgatggaggcactccagatgagacagttttgcaggattatatggtcccagtaaacttgattgagcggtggggcaatgctatggatattgtataccctgaatttaagcggtgctgctgtttcactaaaagctactatcgttatgtgaaggggacaggctctttgttggctacatctaaaaacctcaatgttcctgaagagaagctccaaatttcttccctgaaggagttgggcctacgatttttcacccctcgtgaggttgccaatttccattccttcccttcaaatttctgcttcccggatcacataagccttaggcaacagtgagtttaagttccattatacacttctggttatctttagtaagcgacaagggcatttgaattgcagtacatataagaaacatgagagatgaggctatgctgggtaactatctgaatagtgtttatagttataggttaccatatatcttttgaaaccctcttgttgcaggtatgctatgctgggtaacagtctgagtatagcagttgtgggtcctttgctgcattatctctttgctgaggcctgagtcatagagaagtccagtcagccctggtgacattagcatggcacaaacactgtggctgcgatctgccaaaatttcttcatacgtgatttaagcaaggttttggggactacagtttggccatttgatgagcacaccgtgtaggcacaacctcacaatgtatcaacaaaagtgtaccatacagtagagaagctgtttctgcgcatacttcctccccctcatgcctatgctgtcatggtgaatgaattttggaattgtgatccgttgatgtgtgcatggatgaggctgtcgtaacgattgttgatctgagctttaagtaacttggaacctacttactccgagcaattccaattctattcttagctaacccatttaaagtttgacaatatttatgatgtaaaatatgtatagcaagtataaaatatactcaatgaagaatctatatcataaatattgacactttttttatataaacatcgtgaaactcaagattctttgacttggtattatgtttgaattgtattttgttttcgg

SEQ ID NO: 77294 - DNA, 1856 bp, Zea Mays
acgggaggcggaccggacagtgagtccgcgaccgtaatttgactctcagaactctccgactcacagagtcacagtcacaggctcagccaacataagggaaccggggttccaaacagttgctgcagcctagcacgggccgcgcgactgccggaggcgatggaggcgccggcaccttggagagtgctcgagttctacagcggcatcggaggcctgaggtactcgctgatggcgtcgggcgtgcgggcggaggtggtggaagccttcgacatcaacgacgtcgccaatgacgtctatgagcacaacttcggccaccgcccctgccaggggaacattcaaacgctcactgctagtgacttagacaaatacaaggcacatgcatggcttctttctcctccatgccagccatacacacgacaagaagcattcagctgatgctcgtgcattttcgttcatcaagattcttaacctcatgcaagacatgagctatcctccacaaatgttatttgtggaaaacgtagttggatttgaggtgtctgatacacatgaccagttgctggaggtcctttcaagtctcaattttaacacgcaagaattcatcctaagccccttacagtttggtgtcccatattctagacctcgctacttctgtttggcgaaacgtgaacctgtgcggtttcgacatgcattcgtcaacaataagttgctccagacacctatgtgcctgagcctgacactgagcagtacatcacagggtagcgaccaccagactgaagaagagctagagccagtttgtaagccaataaaagatttccttgtcaaggaggctgatggaggcactccagatgagacagttttgcaggattatatggtcccagtaaacttgattgagcggtggggcaatgctatggatattgtataccctgaatttaagcggtgctgctgtttcactaaaagctactatcgttatgtgaaggggacaggctctttgttggctacatctaaaaacctcaatgttcctgaagagaagctccaaatttcttccctgaaggagttgggcctacgatttttcacccctcgtgaggttgccaatttccattccttcccttcaaatttctgcttcccggatcacataagccttaggcaacagtgagtttaagttccattatacacttctggttatctttagtaagcgacaagggcatttgaattgcagtacatataagaaacatgagagatgaggctatgctgggtatgctatgctgggtaacagtctgagtatagcagttgtgggtcctttgctgcattatctctttgctgaggcctgagtcatagagaagtccagtcagccctggtgacattagcatggcacaaacactgtggctgcgatctgccaaaatttcttcatacgtgatttaagcaaggttttggggactacagtttggccatttgatgagcacaccgtgtaggcacaacctcacaatgtatcaacaaaagtgtaccatacagtagagaagctgtttctgcgcatacttcctccccctcatgcctatgctgtcatggtgaatgaattttggaattgtgatccgttgatgtgtgcatggatgaggctgtcgtaacgattgttgatctgagctttaagtaacttggaacctacttactccgagcaattccaattctattcttagctaacccatttaaagtttgacaatatttatgatgtaaaatatgtatagcaagtataaaatatactcaatgaagaatctatatcataaatattgacactttttttatataaacatcgtgaaactcaagattctttgacttggtattatgtttgaattgtattttgttttcgg

SEQ ID NO: 77295 - DNA, 634 bp, Zea Mays
aaagaagtttgcaatgagggtgtctgaatggaggaaccagctgtcattgagtcatactataacaagcggatagtcggttgtcctggtggcgagggtgaggacgaacatgatgttgtatggttctggttgaaaaaagacgagccgcatgagtgtccagtctgctcgcaatactttcttaaggtaattggtgatggtggagatccagatggccatgacgatgaagatgatggacatcactaaggatgccttgtggttctgaaaataagaatctgatgaggcagatgagtccatcacacttcttttttcttgaaccagactgcacggcatccttgtttatgaacagacatttggccatcaagcgggtggtagttaatcacctagggattttgtccagacaaaagcttattgagatttgacccatgcatttctttaagagcatcatcgaataaaagatgactgcatcagattgctttcttttgttaccgtatggccatcgggtgtgatggacatgtaatattcagtcatggaatggaacagacccatttctttattcagtgtgctggggaatttgcaaaaggtctcctatatctcttacaagtttcaagccagaggttgatccttcagttttatgact

SEQ ID NO: 77296 - DNA, 649 bp, Zea Mays
cgatcatctaagaaagaagtttgcaatgagggtgtctgaatggaggaaccagctgtcattgagtcatactataacaagcggatagtcggttgtcctggtggcgagggtgaggacgaacatgatgttgtatggttctggttgaaaaaagacgagccgcatgagtgtccagtctgctcgcaatactttgtgcttaaggtaattggtgatggtggagatccagatggccatgacgatgaagatgatggacatcactaaggatgccttgtggttctgaaaataagaatctgatgaggcagatgagtccatcacacttcttttttcttgaaccagactgcacggcatccttgtttatgaacagacatttggccatcaagcgggtggtagttaatcacctagggattttgtccagacaaaagcttattgagatttgacccatgcatttctttaagagcatcatcgaataaaagatgactgcatcagattgctttcttttgttaccgtatggccatcgggtgtgatggacatgtaatattcagtcatggaatggaacagacccatttctttattcagtgtgctggggaatttgcaaaaggtctcctatatctcttacaagtttcaagccagaggttgatccttcagttttatgact

SEQ ID NO: 77297 - DNA, 1011 bp, Zea Mays
ctcgtcccaagttccaaccccgtgggccgctacatcgccaaaccctaactaggtttttttcaagcctccccttccctaccctcgccccccatggatccgttttccaagaagcgcaagcccgacgacaacggcgccgtcactgcttctcccgccggtggggctgccacgctgggtctcacccgcgaggacgtcctccgcctcctcgagccgctctcccgggaccagcttgcggacatcgcggccgccgctgcactcgtctcggcgcacgcgctcgatgccgtgcgcgcagccgccgaccgcgacccggccctgcgcaagctcttcattcgggggctcgggtgggagaccacatccgactcgctccgcgccatcttctccgcctacggtgacctggaggaggccgtcgtcatcactgacaaatccacggggcggtccaagggctacggcttcgtcaccttccgccacgccgattccgccgtcctcgcactcaaggagccatccaagaagatcgacggtcgcatgactgtcacgcagctcgccgccgccggctcggcaggcgggccgtccgttggggctcccggcagtggcggtgctcctgtggctgatgtgtcgctccggaagatcttcgttgggaacgtccctgcagacatgtcgtcggagcgtctccttgcgcactttgcctcctacggcgagattgaggaggggccgctgggatttgacaagcagacgggcaagttccggggctttgcacttttcgtatataagacacctgagggtgcgcaggcctccctggtggactcggtgaaggtaattgatagccaccagcttgtatgcaagcttgccatagatgggaagaaggggaagcaggggcaatcacagcaatctggacctggcaaccagcagcagcaacagcaacagcagatgctgccgggtggtccgcaggaaattcagggaggcctggggcttggttcacaaatgggagcacagtatggtggccctgggagcgagcga

SEQ ID NO: 77298 - DNA, 1459 bp, Zea Mays
ctcgtcccaagttccaaccccgtgggccgctacatcgccaaaccctaactaggtttttttcaagcctccccttccctaccctcgccccccatggatccgttttccaagaagcgcaagcccgacgacaacggcgccgtcactgcttctcccgccggtggggctgccacgctgggtctcacccgcgaggacgtcctccgcctcctcgagccgctctcccgggaccagcttgcggacatcgcggccgccgctgcactcgtctcggcgcacgcgctcgatgccgtgcgcgcagccgccgaccgcgacccggccctgcgcaagctcttcattcgggggctcgggtgggagaccacatccgactcgctccgcgccatcttctccgcctacggtgacctggaggaggccgtcgtcatcactgacaaatccacggggcggtccaagggctacggcttcgtcaccttccgccacgccgattccgccgtcctcgcactcaaggagccatccaagaagatcgacggtcgcatgactgtcacgcagctcgccgccgccggctcggcaggcgggccgtccgttggggctcccggcagtggcggtgctcctgtggctgatgtgtcgctccggaagatcttcgttgggaacgtccctgcagacatgtcgtcggagcgtctccttgcgcactttgcctcctacggcgagattgaggaggggccgctgggatttgacaagcagacgggcaagttccggggctttgcacttttcgtatataagacacctgagggtgcgcaggcctccctggtggactcggtgaaggtaattgatagccaccagcttgtatgcaagcttgccatagatgggaagaaggggaagcaggggcaatcacagcaatctggacctggcaaccagcagcagcaacagcaacagcagatgctgccgggtggtccgcaggaaattcagggaggcctggggcttggttcacaaatgggagcacagtatggtggccctgggagtggtatgccttcgtttggttttggtggcgttggcggtgggtttgggggtccaaacccttatgctaacatgccatcttccatgggtggaggaggcgcaggtgggttagggtcggtgggaggccaggtgcccactgggttggctggtgctggtggatttgggcctgggggattgggtggtggctcatttgggggatcatctcagtttggtgctgctgggatgggggcatatggtggccttggaatgggtggaggctccatgtaccgcatgcaacagggagcaggtgggctgcctgcaggcgcatttggtgaaggaggaaactaccctcttccaggttctggtttccgaggccacgaccctcaaggtggaatgtctcctcctgggccaggtggcagggctcctcctatgtatcccaacgtgccaccttatttctaagaggcaggttagtcgatttgag

SEQ ID NO: 77299 - DNA, 2088 bp, Zea Mays
ctcgtcccaagttccaaccccgtgggccgctacatcgccaaaccctaactaggtttttttcaagcctccccttccctaccctcgccccccatggatccgttttccaagaagcgcaagcccgacgacaacggcgccgtcactgcttctcccgccggtggggctgccacgctgggtctcacccgcgaggacgtcctccgcctcctcgagccgctctcccgggaccagcttgcggacatcgcggccgccgctgcactcgtctcggcgcacgcgctcgatgccgtgcgcgcagccgccgaccgcgacccggccctgcgcaagctcttcattcgggggctcgggtgggagaccacatccgactcgctccgcgccatcttctccgcctacggtgacctggaggaggccgtcgtcatcactgacaaatccacggggcggtccaagggctacggcttcgtcaccttccgccacgccgattccgccgtcctcgcactcaaggagccatccaagaagatcgacggtcgcatgactgtcacgcagctcgccgccgccggctcggcaggcgggccgtccgttggggctcccggcagtggcggtgctcctgtggctgatgtgtcgctccggaagatcttcgttgggaacgtccctgcagacatgtcgtcggagcgtctccttgcgcactttgcctcctacggcgagattgaggaggggccgctgggatttgacaagcagacgggcaagttccggggctttgcacttttcgtatataagacacctgagggtgcgcaggcctccctggtggactcggtgaaggtaattgatagccaccagcttgtatgcaagcttgccatagatgggaagaaggggaagcaggggcaatcacagcaatctggacctggcaaccagcagcagcaacagcaacagcagatgctgccgggtggtccgcaggaaattcagggaggcctggggcttggttcacaaatgggagcacagtatggtggccctgggagtggtatgccttcgtttggttttggtggcgttggcggtgggtttgggggtccaaacccttatgctaacatgccatcttccatgggtggaggaggcgcaggtgggttagggtcggtgggaggccaggtgcccactgggttggctggtgctggtggatttgggcctgggggattgggtggtggctcatttgggggatcatctcagtttggtgctgctgggatgggggcatatggtggccttggaatgggtggaggctccatgtaccgcatgcaacagggagcaggtgggctgcctgcaggcgcatttggtgaaggaggaaactaccctcttccaggttctggtttccgaggccacgaccctcaaggtggaatgtctcctcctgggccaggtggcagggctcctcctatgtatcccaacgtgccaccttatttctaagtgaatgtgtgactcaggtgtgtgacaactcttgggagcatatcctttgaaatggttgtgctgaattcagaagtgttgtctgcttacatggatgccttgcatattctggctacttctgatctggaatggaatgtggaatgagtttgcactcgcagtttcccttattaagggatacatgaagctaggtagttgtgataatgcttagccgtgataatgcttcacatgtactttcttatgagtcatgactgctttgcagtttcattttctatatagataagtgaagttgcattaagtgtgtgttgtgttgattattgtcgtattatcctatgaaacccctttattttcatggtatgatgatgtgtttaatcttatggatttctatttgtcttgtctatctgttgatactcttggtgagcgattggtgactgtaatgcagtttatctctttctttagaatttatatattgtcttatatcttccttgagacacagatagctaattataattaatatggttattgtcagattagaaatctgaacaactgctaatcttttgtatttttttcttgagtcaacgtgacctttttagattttgggtggtagctggagatttcagctattgaaacctgaagatggtttggaattttgtgttt

SEQ ID NO: 77300 - DNA, 3207 bp, Zea Mays
gcaacttccaatctccaaaggatagtcttcctccgaacccggggggcaaactagaaaataaaaactagaaacgaagtgtagcgccgctcgccttgccggcggagggaagacggaagacgagaggtatggcgggtgccggtgcgatgggcttcccacgggagctgatggttcagcgtatacagagcttagtggaggaggggttctgggacgcgctccgccgccacaagctcgacgtcctcggcaccgacgactcccccatcccaatcaccggttattatactccgcgccagcgtcgcccgatggcaagcttcttcaacctacggtccggatcattggtgccaccatctcacagttctgttggcgacaggaacaattgcccagttccagggaccctcataaacactaataacatgaggggatttgaaaacctagatagagaacaacttctgaaagcagaagcaaagaagatcttgcatgacattgtgtctggtaaagtagaagaggatccttctgttctacttagattccttgtgacatcatttgctgatttgaagaattggaaggtctattacaatgttgcattcccctcattggttttcaactcaagaatcaccttgctcagcctgcaacctgcctcaaaagtgctcaccaaagaagaggcagcatccatgtatacatcattgcaaaagtggcgtacttctagtgaaacaacagttattccattctttctggttagtatatcctcagattcctctgcctctataagacaacttaaggaatggaaagcttgccaggggaactatcaaaagctgctatttggattttatgaccatggatgccgctcagattgccctggctgggttcttagaaactatgttgcctttctgagcatccgatggaagattgagaaagcccagattttctgctaccgtgaatataaagggaaccctgatctagaacagtccctcattggtgaagcatcatttccatcaccttatggttgggataaccctgaatttctacctgatgctattggatgggaaggagtaaagccagggaagggaacaaaagaaatgaaaccaaaagaaatagatcttcaatcaatgaatccagcaagtcaggatgaagaaaaacaattgatgcacttaaagcttatggggtggcgccactttcctgtgaatatagacaggttatcacatgttcgagttcttctcttgggtgctggaactcttggatgcgaagttgctcgccttcttatgacctggggtgtacggaaactaacggttgttgatagtggtagtgttgttatgtctgaccttgccaagcaatcactctacatagataaggattgtggagttccaagagtatctgcaatagctccacatctgaaagaaagatgtcctgcagtggaggttgaaagcatccaactggaaataccgatgcctgggcatcctgtttcttccagcaaaatggcaagtgtgcttgatgactgcaagcatctgcaaaccttagtggctgccaatgatgcaatcttcttgttaactgacacatgggagagcaggtggcttccaactcttctctgttcaagtgaaaacaagattgctattagtgcattattaggacatgacagttaccttgtcatgcgacatggtgctggaccaggaacaagtgggggtacagatgaagtgactactcagaaattgtccacagaaaatgctcttggtcatcaaagattgggctgttgtttctgcaatgataccgcttcccttattaatccaatttcttatgaaacactacctggacttacctcagttgcatctggcaaagcagtggagctctttgctaggatgttacatcatcctgacgagatacgggccccaggcgatactgctggtacagaaacagaacatcaacttggtctattgccacatcagctacgaggatcactccccaagtgtgatttatttgtggagctcaacaattcctcagtcaactgtactgcatgttctgttgctgtattgtcggagtatagaagaagaggattggattttgtcatgcaggctatcaactatccagcatatctgaaagattttacaggcatttctgattcgaaaagaccagatacttgtcctaaaataccgcccaacatctctgtaaattcagacaagatttctgatgtccgatgtctactattgggtgctggaactcttggatgtgatgtcgctcgcattcttatggactgtggtgtacggaagataacagtagttgatagtggtcatgtagttgtgtcaaatttagcgagacaatcactctatacttctgatgaccgtggtgctccaaaagcaactgcaatacttaggcatctagtggagagatgtccttcagtggatgcacaaggcattaaaatggaaatacctatgcctgggcatcctgtgtctcctggtgaagcagcgggtgtgctccaagattgcgagcgccttaaggaattggtgttgtcccacgatgctatcttcttgttgaccgacacaagagaaagcaggtggcttccaactctcctatgcactaacgaaaacaagattgctatcactgcagcattagggtatgatagttaccttgtcatgcgacatggggctggccctggcataagctgtgaagcttccagtgtggtcactgccatagacaagatgtccacggaggatgcccttgggcgtcaaaggctggggtgttatttctgcaatgacgtcattgctcctgtcgactcagtttccaatcggacactggatcaacaatgtacagtgacacgaccggggttggcctctattgcatcaggacgcgctgcagacctcttcagaagaatgttacaccatcctgatgggatacatgctccaggagagattgctggtacaggcagtggtcatgagcacggccttttacctcaccagatgcgtggatcactatcgcagtacaacatattaaccctgttgggctattcctcgagtaattgcacggcatgctcccatgcggtattgtatcaatatcggaggagagggatggatttcgtgatgcaagtaatcaatgaaccaacctatttggaagacctgaccggcctcacggagttgatgaaatccgcgtcttgctcacaggtcgagtgggtagatgaaattgatgaagacgatttcgtcgagggctggtgaattggagggatcc

SEQ ID NO: 77301 - DNA, 3381 bp, Zea Mays
atggcgggtgccggtgcgatgggcttcccacgggagctgatggttcagcgtatacagagcttagtggaggaggggttctgggacgcgctccgccgccacaagctcgacgtcctcggcaccgacgactcccccatcccaatcaccggaacaattgcccagttccagggaccctcataaacactaataacatgaggggatttgaaaacctagatagagaacaacttctgaaagcagaagcaaagaagatcttgcatgacattgtgtctggtaaagtagaagaggatccttctgttctacttagattccttgtgacatcatttgctgatttgaagaattggaaggtctattacaatgttgcattcccctcattggttttcaactcaagaatcaccttgctcagcctgcaacctgcctcaaaagtgctcaccaaagaagaggcagcatccatgtatacatcattgcaaaagtggcgtacttctagtgaaacaacagttattccattctttctggttagtatatcctcagattcctctgcctctataagacaacttaaggaatggaaagcttgccaggggaactatcaaaagctgctatttggattttatgaccatggatgccgctcagattgccctggctgggttcttagaaactatgttgcctttctgagcatccgatggaagattgagaaagcccagattttctgctaccgtgaatataaagggaaccctgatctagaacagtccctcattggtgaagcatcatttccatcaccttatggttgggataaccctgaatttctacctgatgctattggatgggaaggagtaaagccagggaagggaacaaaagaaatgaaaccaaaagaaatagatcttcaatcaatgaatccagcaaggatgaagaaaaacaattgatgcacttaaagcttatggggtggcgccactttcctgtgaatatagacaggttatcacatgttcgagttcttctcttgggtgctggaactcttggatgcgaagttgctcgccttcttatgacctggggtgtacggaaactaacggttgttgatagtggtagtgttgttatgtctgaccttgccaagcaatcactctacatagataaggattgtggagttccaagagtatctgcaatagctccacatctgaaagaaagatgtcctgcagtggaggttgaaagcatccaactggaaataccgatgcctgggcatcctgtttcttccagcaaaatggcaagtgtgcttgatgactgcaagcatctgcaaaccttagtggctgccaatgatgcaatcttcttgttaactgacacatgggagagcaggtggcttccaactcttctctgttcaagtgaaaacaagattgctattagtgcattattaggacatgacagttaccttgtcatgcgacatggtgctggaccaggaacaagtgggggtacagatgaagtgactactcagaaattgtccacagaaaatgctcttggtcatcaaagattgggctgttgtttctgcaatgataccgcttcccttattaatccaatttcttatgaaacactacctggacttacctcagttgcatctggcaaagcagtggagctctttgctaggatgttacatcatcctgacgagatacgggccccaggcgatactgctggtacagaaacagaacatcaacttggtctattgccacatcagctacgaggatcactccccaagtgtgatttatttgtggagctcaacaattcctcagtcaactgtactgcatgttctgttgctgtattgtcggagtatagaagaagaggattggattttgtcatgcaggctatcaactatccagcatatctgaaagattttacaggcatttctgattcgaaaagaccagatacttgtcctaaaataccgcccaacatctctgtaaattcagacaagatttctgatgtccgatgtctactattgggtgctggaactcttggatgtgatgtcgctcgcattcttatggactgtggtgtacggaagataacagtagttgatagtggtcatgtagttgtgtcaaatttagcgagacaatcactctatacttctgatgaccgtggtgctccaaaagcaactgcaatacttaggcatctagtggagagatgtccttcagtggatgcacaaggcattaaaatggaaatacctatgcctgggcatcctgtgtctcctggtgaagcagcgggtgtgctccaagattgcgagcgccttaaggaattggtgttgtcccacgatgctatcttcttgttgaccgacacaagagaaagcaggtggcttccaactctcctatgcactaacgaaaacaagattgctatcactgcagcattagggtatgatagttaccttgtcatgcgacatggggctggccctggcataagctgtgaagcttccagtgtggtcactgccatagacaagatgtccacggaggatgcccttgggcgtcaaaggctggggtgttatttctgcaatgacgtcattgctcctgtcgactcagtttccaatcggacactggatcaacaatgtacagtgacacgaccggggttggcctctattgcatcaggacgcgctgcagacctcttcagaagaatgttacaccatcctgatgggatacatgctccaggagagattgctggtacaggcagtggtcatgagcacggccttttacctcaccagatgcgtggatcactatcgcagtacaacatattaaccctgttgggctattcctcgagtaattgcacggcatgctcccatgcggtattgtatcaatatcggaggagagggatggatttcgtgatgcaagtaatcaatgaaccaacctatttggaagacctgaccggcctcacggagttgatgaaatccgcgtcttgctcacaggtcgagtgggtagatgaaattgatgaagacgatttcgtcgaggtctgatatgttacatggttttgacgactggtagatagtatcattctttacaacatggtaaagagatgacgaagcaatcaaagcaaccaccctatatatttgtaactcgctgctagctttttactctgtccgtcttaaaatgtaattcgttttaggctaaacctacattcattaatctgctccgtctcaaaatgtaattcattttaggctaaacctacattcattaatcaggtactcgtgaatgtagcttgaatgtatgtctacatttataatcattcaaataatttgaatgtggacttaaaaaaaagagggatatatattttgatacggggtgattatatatttgtaacgtacaaaaacaagtctagcaaaatactgtttattttctgcttggcttgatgtttagttctgttggttccata

SEQ ID NO: 77302 - DNA, 3385 bp, Zea Mays
atggcgggtgccggtgcgatgggcttcccacgggagctgatggttcagcgtatacagagcttagtggaggaggggttctgggacgcgctccgccgccacaagctcgacgtcctcggcaccgacgactcccccatcccaatcaccggaacaattgcccagttccagggaccctcataaacactaataacatgaggggatttgaaaacctagatagagaacaacttctgaaagcagaagcaaagaagatcttgcatgacattgtgtctggtaaagtagaagaggatccttctgttctacttagattccttgtgacatcatttgctgatttgaagaattggaaggtctattacaatgttgcattcccctcattggttttcaactcaagaatcaccttgctcagcctgcaacctgcctcaaaagtgctcaccaaagaagaggcagcatccatgtatacatcattgcaaaagtggcgtacttctagtgaaacaacagttattccattctttctggttagtatatcctcagattcctctgcctctataagacaacttaaggaatggaaagcttgccaggggaactatcaaaagctgctatttggattttatgaccatggatgccgctcagattgccctggctgggttcttagaaactatgttgcctttctgagcatccgatggaagattgagaaagcccagattttctgctaccgtgaatataaagggaaccctgatctagaacagtccctcattggtgaagcatcatttccatcaccttatggttgggataaccctgaatttctacctgatgctattggatgggaaggagtaaagccagggaagggaacaaaagaaatgaaaccaaaagaaatagatcttcaatcaatgaatccagcaagtcaggatgaagaaaaacaattgatgcacttaaagcttatggggtggcgccactttcctgtgaatatagacaggttatcacatgttcgagttcttctcttgggtgctggaactcttggatgcgaagttgctcgccttcttatgacctggggtgtacggaaactaacggttgttgatagtggtagtgttgttatgtctgaccttgccaagcaatcactctacatagataaggattgtggagttccaagagtatctgcaatagctccacatctgaaagaaagatgtcctgcagtggaggttgaaagcatccaactggaaataccgatgcctgggcatcctgtttcttccagcaaaatggcaagtgtgcttgatgactgcaagcatctgcaaaccttagtggctgccaatgatgcaatcttcttgttaactgacacatgggagagcaggtggcttccaactcttctctgttcaagtgaaaacaagattgctattagtgcattattaggacatgacagttaccttgtcatgcgacatggtgctggaccaggaacaagtgggggtacagatgaagtgactactcagaaattgtccacagaaaatgctcttggtcatcaaagattgggctgttgtttctgcaatgataccgcttcccttattaatccaatttcttatgaaacactacctggacttacctcagttgcatctggcaaagcagtggagctctttgctaggatgttacatcatcctgacgagatacgggccccaggcgatactgctggtacagaaacagaacatcaacttggtctattgccacatcagctacgaggatcactccccaagtgtgatttatttgtggagctcaacaattcctcagtcaactgtactgcatgttctgttgctgtattgtcggagtatagaagaagaggattggattttgtcatgcaggctatcaactatccagcatatctgaaagattttacaggcatttctgattcgaaaagaccagatacttgtcctaaaataccgcccaacatctctgtaaattcagacaagatttctgatgtccgatgtctactattgggtgctggaactcttggatgtgatgtcgctcgcattcttatggactgtggtgtacggaagataacagtagttgatagtggtcatgtagttgtgtcaaatttagcgagacaatcactctatacttctgatgaccgtggtgctccaaaagcaactgcaatacttaggcatctagtggagagatgtccttcagtggatgcacaaggcattaaaatggaaatacctatgcctgggcatcctgtgtctcctggtgaagcagcgggtgtgctccaagattgcgagcgccttaaggaattggtgttgtcccacgatgctatcttcttgttgaccgacacaagagaaagcaggtggcttccaactctcctatgcactaacgaaaacaagattgctatcactgcagcattagggtatgatagttaccttgtcatgcgacatggggctggccctggcataagctgtgaagcttccagtgtggtcactgccatagacaagatgtccacggaggatgcccttgggcgtcaaaggctggggtgttatttctgcaatgacgtcattgctcctgtcgactcagtttccaatcggacactggatcaacaatgtacagtgacacgaccggggttggcctctattgcatcaggacgcgctgcagacctcttcagaagaatgttacaccatcctgatgggatacatgctccaggagagattgctggtacaggcagtggtcatgagcacggccttttacctcaccagatgcgtggatcactatcgcagtacaacatattaaccctgttgggctattcctcgagtaattgcacggcatgctcccatgcggtattgtatcaatatcggaggagagggatggatttcgtgatgcaagtaatcaatgaaccaacctatttggaagacctgaccggcctcacggagttgatgaaatccgcgtcttgctcacaggtcgagtgggtagatgaaattgatgaagacgatttcgtcgaggtctgatatgttacatggttttgacgactggtagatagtatcattctttacaacatggtaaagagatgacgaagcaatcaaagcaaccaccctatatatttgtaactcgctgctagctttttactctgtccgtcttaaaatgtaattcgttttaggctaaacctacattcattaatctgctccgtctcaaaatgtaattcattttaggctaaacctacattcattaatcaggtactcgtgaatgtagcttgaatgtatgtctacatttataatcattcaaataatttgaatgtggacttaaaaaaaagagggatatatattttgatacggggtgattatatatttgtaacgtacaaaaacaagtctagcaaaatactgtttattttctgcttggcttgatgtttagttctgttggttccata

SEQ ID NO: 77303 - DNA, 3480 bp, Zea Mays
atggcgggtgccggtgcgatgggcttcccacgggagctgatggttcagcgtatacagagcttagtggaggaggggttctgggacgcgctccgccgccacaagctcgacgtcctcggcaccgacgactcccccatcccaatcaccggttattatactccgcgccagcgtcgcccgatggcaagcttcttcaacctacggtccggatcattggtgccaccatctcacagttctgttggcgacaggaacaattgcccagttccagggaccctcataaacactaataacatgaggggatttgaaaacctagatagagaacaacttctgaaagcagaagcaaagaagatcttgcatgacattgtgtctggtaaagtagaagaggatccttctgttctacttagattccttgtgacatcatttgctgatttgaagaattggaaggtctattacaatgttgcattcccctcattggttttcaactcaagaatcaccttgctcagcctgcaacctgcctcaaaagtgctcaccaaagaaggcagcatccatgtatacatcattgcaaaagtggcgtacttctagtgaaacaacagttattccattctttctggttagtatatcctcagattcctctgcctctataagacaacttaaggaatggaaagcttgccaggggaactatcaaaagctgctatttggattttatgaccatggatgccgctcagattgccctggctgggttcttagaaactatgttgcctttctgagcatccgatggaagattgagaaagcccagattttctgctaccgtgaatataaagggaaccctgatctagaacagtccctcattggtgaagcatcatttccatcaccttatggttgggataaccctgaatttctacctgatgctattggatgggaaggagtaaagccagggaagggaacaaaagaaatgaaaccaaaagaaatagatcttcaatcaatgaatccagcaagtcaggatgaagaaaaacaattgatgcacttaaagcttatggggtggcgccactttcctgtgaatatagacaggttatcacatgttcgagttcttctcttgggtgctggaactcttggatgcgaagttgctcgccttcttatgacctggggtgtacggaaactaacggttgttgatagtggtagtgttgttatgtctgaccttgccaagcaatcactctacatagataaggattgtggagttccaagagtatctgcaatagctccacatctgaaagaaagatgtcctgcagtggaggttgaaagcatccaactggaaataccgatgcctgggcatcctgtttcttccagcaaaatggcaagtgtgcttgatgactgcaagcatctgcaaaccttagtggctgccaatgatgcaatcttcttgttaactgacacatgggagagcaggtggcttccaactcttctctgttcaagtgaaaacaagattgctattagtgcattattaggacatgacagttaccttgtcatgcgacatggtgctggaccaggaacaagtgggggtacagatgaagtgactactcagaaattgtccacagaaaatgctcttggtcatcaaagattgggctgttgtttctgcaatgataccgcttcccttattaatccaatttcttatgaaacactacctggacttacctcagttgcatctggcaaagcagtggagctctttgctaggatgttacatcatcctgacgagatacgggccccaggcgatactgctggtacagaaacagaacatcaacttggtctattgccacatcagctacgaggatcactccccaagtgtgatttatttgtggagctcaacaattcctcagtcaactgtactgcatgttctgttgctgtattgtcggagtatagaagaagaggattggattttgtcatgcaggctatcaactatccagcatatctgaaagattttacaggcatttctgattcgaaaagaccagatacttgtcctaaaataccgcccaacatctctgtaaattcagacaagatttctgatgtccgatgtctactattgggtgctggaactcttggatgtgatgtcgctcgcattcttatggactgtggtgtacggaagataacagtagttgatagtggtcatgtagttgtgtcaaatttagcgagacaatcactctatacttctgatgaccgtggtgctccaaaagcaactgcaatacttaggcatctagtggagagatgtccttcagtggatgcacaaggcattaaaatggaaatacctatgcctgggcatcctgtgtctcctggtgaagcagcgggtgtgctccaagattgcgagcgccttaaggaattggtgttgtcccacgatgctatcttcttgttgaccgacacaagagaaagcaggtggcttccaactctcctatgcactaacgaaaacaagattgctatcactgcagcattagggtatgatagttaccttgtcatgcgacatggggctggccctggcataagctgtgaagcttccagtgtggtcactgccatagacaagatgtccacggaggatgcccttgggcgtcaaaggctggggtgttatttctgcaatgacgtcattgctcctgtcgactcagtttccaatcggacactggatcaacaatgtacagtgacacgaccggggttggcctctattgcatcaggacgcgctgcagacctcttcagaagaatgttacaccatcctgatgggatacatgctccaggagagattgctggtacaggcagtggtcatgagcacggccttttacctcaccagatgcgtggatcactatcgcagtacaacatattaaccctgttgggctattcctcgagtaattgcacggcatgctcccatgcggtattgtatcaatatcggaggagagggatggatttcgtgatgcaagtaatcaatgaaccaacctatttggaagacctgaccggcctcacggagttgatgaaatccgcgtcttgctcacaggtcgagtgggtagatgaaattgatgaagacgatttcgtcgaggtctgatatgttacatggttttgacgactggtagatagtatcattctttacaacatggtaaagagatgacgaagcaatcaaagcaaccaccctatatatttgtaactcgctgctagctttttactctgtccgtcttaaaatgtaattcgttttaggctaaacctacattcattaatctgctccgtctcaaaatgtaattcattttaggctaaacctacattcattaatcaggtactcgtgaatgtagcttgaatgtatgtctacatttataatcattcaaataatttgaatgtggacttaaaaaaaagagggatatatattttgatacggggtgattatatatttgtaacgtacaaaaacaagtctagcaaaatactgtttattttctgcttggcttgatgtttagttctgttggttccata

SEQ ID NO: 77304 - DNA, 3577 bp, Zea Mays
cttcctccgaacccggggggcaaactagaaaataaaaactagaaacgaagtgtagcgccgctcgccttgccggcggagggaagacggaagacgagaggtatggcgggtgccggtgcgatgggcttcccacgggagctgatggttcagcgtatacagagcttagtggaggaggggttctgggacgcgctccgccgccacaagctcgacgtcctcggcaccgacgactcccccatcccaatcaccggttattatactccgcgccagcgtcgcccgatggcaagcttcttcaacctacggtccggatcattggtgccaccatctcacagttctgttggcgacaggaacaattgcccagttccagggaccctcataaacactaataacatgaggggatttgaaaacctagatagagaacaacttctgaaagcagaagcaaagaagatcttgcatgacattgtgtctggtaaagtagaagaggatccttctgttctacttagattccttgtgacatcatttgctgatttgaagaattggaaggtctattacaatgttgcattcccctcattggttttcaactcaagaatcaccttgctcagcctgcaacctgcctcaaaagtgctcaccaaagaagaggcagcatccatgtatacatcattgcaaaagtggcgtacttctagtgaaacaacagttattccattctttctggttagtatatcctcagattcctctgcctctataagacaacttaaggaatggaaagcttgccaggggaactatcaaaagctgctatttggattttatgaccatggatgccgctcagattgccctggctgggttcttagaaactatgttgcctttctgagcatccgatggaagattgagaaagcccagattttctgctaccgtgaatataaagggaaccctgatctagaacagtccctcattggtgaagcatcatttccatcaccttatggttgggataaccctgaatttctacctgatgctattggatgggaaggagtaaagccagggaagggaacaaaagaaatgaaaccaaaagaaatagatcttcaatcaatgaatccagcaaggatgaagaaaaacaattgatgcacttaaagcttatggggtggcgccactttcctgtgaatatagacaggttatcacatgttcgagttcttctcttgggtgctggaactcttggatgcgaagttgctcgccttcttatgacctggggtgtacggaaactaacggttgttgatagtggtagtgttgttatgtctgaccttgccaagcaatcactctacatagataaggattgtggagttccaagagtatctgcaatagctccacatctgaaagaaagatgtcctgcagtggaggttgaaagcatccaactggaaataccgatgcctgggcatcctgtttcttccagcaaaatggcaagtgtgcttgatgactgcaagcatctgcaaaccttagtggctgccaatgatgcaatcttcttgttaactgacacatgggagagcaggtggcttccaactcttctctgttcaagtgaaaacaagattgctattagtgcattattaggacatgacagttaccttgtcatgcgacatggtgctggaccaggaacaagtgggggtacagatgaagtgactactcagaaattgtccacagaaaatgctcttggtcatcaaagattgggctgttgtttctgcaatgataccgcttcccttattaatccaatttcttatgaaacactacctggacttacctcagttgcatctggcaaagcagtggagctctttgctaggatgttacatcatcctgacgagatacgggccccaggcgatactgctggtacagaaacagaacatcaacttggtctattgccacatcagctacgaggatcactccccaagtgtgatttatttgtggagctcaacaattcctcagtcaactgtactgcatgttctgttgctgtattgtcggagtatagaagaagaggattggattttgtcatgcaggctatcaactatccagcatatctgaaagattttacaggcatttctgattcgaaaagaccagatacttgtcctaaaataccgcccaacatctctgtaaattcagacaagatttctgatgtccgatgtctactattgggtgctggaactcttggatgtgatgtcgctcgcattcttatggactgtggtgtacggaagataacagtagttgatagtggtcatgtagttgtgtcaaatttagcgagacaatcactctatacttctgatgaccgtggtgctccaaaagcaactgcaatacttaggcatctagtggagagatgtccttcagtggatgcacaaggcattaaaatggaaatacctatgcctgggcatcctgtgtctcctggtgaagcagcgggtgtgctccaagattgcgagcgccttaaggaattggtgttgtcccacgatgctatcttcttgttgaccgacacaagagaaagcaggtggcttccaactctcctatgcactaacgaaaacaagattgctatcactgcagcattagggtatgatagttaccttgtcatgcgacatggggctggccctggcataagctgtgaagcttccagtgtggtcactgccatagacaagatgtccacggaggatgcccttgggcgtcaaaggctggggtgttatttctgcaatgacgtcattgctcctgtcgactcagtttccaatcggacactggatcaacaatgtacagtgacacgaccggggttggcctctattgcatcaggacgcgctgcagacctcttcagaagaatgttacaccatcctgatgggatacatgctccaggagagattgctggtacaggcagtggtcatgagcacggccttttacctcaccagatgcgtggatcactatcgcagtacaacatattaaccctgttgggctattcctcgagtaattgcacggcatgctcccatgcggtattgtatcaatatcggaggagagggatggatttcgtgatgcaagtaatcaatgaaccaacctatttggaagacctgaccggcctcacggagttgatgaaatccgcgtcttgctcacaggtcgagtgggtagatgaaattgatgaagacgatttcgtcgaggtctgatatgttacatggttttgacgactggtagatagtatcattctttacaacatggtaaagagatgacgaagcaatcaaagcaaccaccctatatatttgtaactcgctgctagctttttactctgtccgtcttaaaatgtaattcgttttaggctaaacctacattcattaatctgctccgtctcaaaatgtaattcattttaggctaaacctacattcattaatcaggtactcgtgaatgtagcttgaatgtatgtctacatttataatcattcaaataatttgaatgtggacttaaaaaaaagagggatatatattttgatacggggtgattatatatttgtaacgtacaaaaacaagtctagcaaaatactgtttattttctgcttggcttgatgtttagttctgttggttccata

SEQ ID NO: 77305 - DNA, 3603 bp, Zea Mays
gcaacttccaatctccaaaggatagtcttcctccgaacccggggggcaaactagaaaataaaaactagaaacgaagtgtagcgccgctcgccttgccggcggagggaagacggaagacgagaggtatggcgggtgccggtgcgatgggcttcccacgggagctgatggttcagcgtatacagagcttagtggaggaggggttctgggacgcgctccgccgccacaagctcgacgtcctcggcaccgacgactcccccatcccaatcaccggttattatactccgcgccagcgtcgcccgatggcaagcttcttcaacctacggtccggatcattggtgccaccatctcacagttctgttggcgacaggaacaattgcccagttccagggaccctcataaacactaataacatgaggggatttgaaaacctagatagagaacaacttctgaaagcagaagcaaagaagatcttgcatgacattgtgtctggtaaagtagaagaggatccttctgttctacttagattccttgtgacatcatttgctgatttgaagaattggaaggtctattacaatgttgcattcccctcattggttttcaactcaagaatcaccttgctcagcctgcaacctgcctcaaaagtgctcaccaaagaagaggcagcatccatgtatacatcattgcaaaagtggcgtacttctagtgaaacaacagttattccattctttctggttagtatatcctcagattcctctgcctctataagacaacttaaggaatggaaagcttgccaggggaactatcaaaagctgctatttggattttatgaccatggatgccgctcagattgccctggctgggttcttagaaactatgttgcctttctgagcatccgatggaagattgagaaagcccagattttctgctaccgtgaatataaagggaaccctgatctagaacagtccctcattggtgaagcatcatttccatcaccttatggttgggataaccctgaatttctacctgatgctattggatgggaaggagtaaagccagggaagggaacaaaagaaatgaaaccaaaagaaatagatcttcaatcaatgaatccagcaagtcaggatgaagaaaaacaattgatgcacttaaagcttatggggtggcgccactttcctgtgaatatagacaggttatcacatgttcgagttcttctcttgggtgctggaactcttggatgcgaagttgctcgccttcttatgacctggggtgtacggaaactaacggttgttgatagtggtagtgttgttatgtctgaccttgccaagcaatcactctacatagataaggattgtggagttccaagagtatctgcaatagctccacatctgaaagaaagatgtcctgcagtggaggttgaaagcatccaactggaaataccgatgcctgggcatcctgtttcttccagcaaaatggcaagtgtgcttgatgactgcaagcatctgcaaaccttagtggctgccaatgatgcaatcttcttgttaactgacacatgggagagcaggtggcttccaactcttctctgttcaagtgaaaacaagattgctattagtgcattattaggacatgacagttaccttgtcatgcgacatggtgctggaccaggaacaagtgggggtacagatgaagtgactactcagaaattgtccacagaaaatgctcttggtcatcaaagattgggctgttgtttctgcaatgataccgcttcccttattaatccaatttcttatgaaacactacctggacttacctcagttgcatctggcaaagcagtggagctctttgctaggatgttacatcatcctgacgagatacgggccccaggcgatactgctggtacagaaacagaacatcaacttggtctattgccacatcagctacgaggatcactccccaagtgtgatttatttgtggagctcaacaattcctcagtcaactgtactgcatgttctgttgctgtattgtcggagtatagaagaagaggattggattttgtcatgcaggctatcaactatccagcatatctgaaagattttacaggcatttctgattcgaaaagaccagatacttgtcctaaaataccgcccaacatctctgtaaattcagacaagatttctgatgtccgatgtctactattgggtgctggaactcttggatgtgatgtcgctcgcattcttatggactgtggtgtacggaagataacagtagttgatagtggtcatgtagttgtgtcaaatttagcgagacaatcactctatacttctgatgaccgtggtgctccaaaagcaactgcaatacttaggcatctagtggagagatgtccttcagtggatgcacaaggcattaaaatggaaatacctatgcctgggcatcctgtgtctcctggtgaagcagcgggtgtgctccaagattgcgagcgccttaaggaattggtgttgtcccacgatgctatcttcttgttgaccgacacaagagaaagcaggtggcttccaactctcctatgcactaacgaaaacaagattgctatcactgcagcattagggtatgatagttaccttgtcatgcgacatggggctggccctggcataagctgtgaagcttccagtgtggtcactgccatagacaagatgtccacggaggatgcccttgggcgtcaaaggctggggtgttatttctgcaatgacgtcattgctcctgtcgactttccaatcggacactggatcaacaatgtacagtgacacgaccggggttggcctctattgcatcaggacgcgctgcagacctcttcagaagaatgttacaccatcctgatgggatacatgctccaggagagattgctggtacaggcagtggtcatgagcacggccttttacctcaccagatgcgtggatcactatcgcagtacaacatattaaccctgttgggctattcctcgagtaattgcacggcatgctcccatgcggtattgtatcaatatcggaggagagggatggatttcgtgatgcaagtaatcaatgaaccaacctatttggaagacctgaccggcctcacggagttgatgaaatccgcgtcttgctcacaggtcgagtgggtagatgaaattgatgaagacgatttcgtcgaggtctgatatgttacatggttttgacgactggtagatagtatcattctttacaacatggtaaagagatgacgaagcaatcaaagcaaccaccctatatatttgtaactcgctgctagctttttactctgtccgtcttaaaatgtaattcgttttaggctaaacctacattcattaatctgctccgtctcaaaatgtaattcattttaggctaaacctacattcattaatcaggtactcgtgaatgtagcttgaatgtatgtctacatttataatcattcaaataatttgaatgtggacttaaaaaaaagagggatatatattttgatacggggtgattatatatttgtaacgtacaaaaacaagtctagcaaaatactgtttattttctgcttggcttgatgtttagttctgttggttccata

SEQ ID NO: 77306 - DNA, 810 bp, Zea Mays
tatggtctattcatgttggtgtttgcttcaagtggtggaagatcgtcgtcttcatcagaacctggctcctcgtcaatctggacagtagtttgtgcttgtgttcctgcctctgaaacttcattcagagttgagttgaaaatagctggcctcatataagaagggacgaaccagtttccagatgccaagctaagcaaaattcagcaacactgagacaaatgtacacggactgattttataagatcagttagtagcttaggatctctaatcctagtattgttttccctctgtcattactacaaagtacaaaatacaacacaaaattcagttatataaaaataattcttttgtggatagtcacgagtctggtaaggctttgggcgaacaaccttccctgatgaattttatatgtactcgttggcggactcaccttggacagacacgtcggcgacggcgggtggaatggggggacgggtccaatcgccagtcagcctcacaccctcacctcctccgcgaccatggcaggtgggtatgacttcttctccggtgtggccatcgccgagtcgaagggtttggcgctggcgggagtctgatgggaggctgcacacccccgatgtagtcgctgcggcggcggagccggtggccagcgtctggcatgtggtacggcgggtagggcgatgtgaacacggaggcgagaggcgcgagcagtccagaatcgaagagagtgagggacggacgtcgcgcatggctatgttggattgaagaaaaagtaggtcaggtccggacacacgtcagattgctggtggcgcgagc

SEQ ID NO: 77307 - DNA, 299 bp, Zea Mays
tgaagttagtaggccagtctactggccagagaattatatcctatgaaaaatcatcaattcaaaaagaaggtataaaacaagcacggaacaagaaaagaagtgcacacacctgaatcaatgccgtgaaatttggagatcccaatgtcttgtgttgctaatcggacatggcatatatacatatttcaaattgcagatacgacattgatacaagccacaacttcatcataataaagggagagaaatcactaccacgttactcccttgaaattgtcgcccaaaaattaagtgcagaaaccaca

SEQ ID NO: 77308 - DNA, 894 bp, Zea Mays
aagcttttagagacataaaagatcccaagataacaacaacatccattaatccacctggatatgtcgtttagagataagttgataaaatgacgtcatgatccttagagaaagagtatgagaatgatcagaaatgagagatttaggcaagatcaacatctgatacttgagaacgggttatagcagataaccagataacggggcagattcaataggggatcccgagatttcgatgataaagccacaacatgattcacgaggaaagagagtactagatccaggtgaaaagagaggtaggcaaacaggatcggctaggatgatcaatagaaatgttataaagtttcgagacaggatctatggaaagaaacatggccttgatagggtttgcgcaactagacaccaaacaacaattttttttgacataaccacgtgcataagggagtttcggtttggctagcgattaagcaatgggggtctacaagttgtgcaggtgcaatttcaagggggaaacacacaatggtcataaaacaccaacacaagcatgattttttttaagaggtttcacttgctaaactcaaggttgttgggggggtcttttcatgaggaaacaaacaacattttttttgaggcaaaatggactgaacaaatatcgtaccttctagaaagcaaggcaagagaaacacatatcacgacctagttaagacataccaatccgacacaagataaagcattttcttataattcctaacatagcagtacatcacattattcaaaagttattattagaataaaggtgagagcagcatgttggtgcacaagagacaattataatgcgacaatcatgatgcatgctcattctagtcgtcttctcagacctaactaatttttcgggtgctt

SEQ ID NO: 77309 - DNA, 3196 bp, Zea Mays
gttagagttaaaatacctaagtgagaactaacaggtagacttactaattcttatacaagttattttgcgcactaaaagcaccatactcaattaacaatgcattctctataacaatcaatatcaaagcgcttttcaccaatagtttgcattttaatttagacatcacctgagcactactacttttcatcacgaccataaacatacgcatttagaccacaacatcatacgaggacatatgcatactagtttctagttttacatctacaacttctttactagttattttcagccacttaatcggcatcgattgaattaaacctctaactcgacaatttgggcaccacaaatttcagaattctacctagacatttagcgtcatatagagagtctactaattaacttgccaccacttgaagtactggaaacacctacatataacaatcactcaacgcaattgaattcctctattgaattcctctatttaacaagcgttggctaacacagcataaaaaatagtaattcatacacaagttcatatttttctcaatcataacactatgagaccaacaaaactagtttcaccattttagacatcttaacttaaaatatagctaaaagtaattcgattagttttcttaactacttttctatattaggtcacgtagctcccaattaatcaacacaccatatttcctttgacgcaacaggtagagcacgtttacttgtttctaacaatctttgggtatcaacaattaattgccttatggtatttatccaactcgaaaacatagagaaggtgacgactactatggcatgtcgtcacctcatcttaatcgcataataaatcttagctttactgatcgagtctgccgactaaccgtttaaactagtaaaacctacccttcgcatcaaacaacacatcgcacatcttcctatcgaaacgtaaaaacatccgagttcttttctacttcctttttatttcgccacaaacttcaatccataccaatacaatttttaaacacgcaccacatcgaccaatttatacgaatcgacgaccaccaatctctaactcgaaatcatgagcacgaccatattacgacctaccgccaaaacatttcaaccgcatctatataatttattaatcgagtcaatcgagagcgacatggctcaccataaacaaacccaatcagcgtttgcaagaacgacggtgattccgatttgtgcatcgctatgacatcgacgagcgttgaacgacttgccttctcctccacgcaaacacggggttcctcccacaaagaaaaacaaaacagcacacatacacaattaatcatatgaaaataacgccgatgcggaatcgaacaaggagcgtcgtggtctcaccggggtgaacgacgatgatgttggggctgcgcaaaaaaaaaaaacagcaaacactcgacgagcgtcgatggcgtgctgttcactgcgcaaaaacagcaaacacccgacgagcgtcgatggcgtgctgttcactgcgcagcaaaaagcagcgagccacgcggagacgttggggctgctgcgcattttgtcgagcgcctagcaagcatcaacggcgcaggcgcagcagcacacacacaggaaggaaaccgagtcacaaggcatggagggaatgctccgcggcatctgctgcagcgcgccatgggagagggctgcgcctgcgaggagaggcggggcgagctgctgctgtgtcccgccatgagggggagatggagctcagctccctgtttgctgcacgccgtggacagcagggggaggaagaagacccggctgctgttgcgcgagggagaacgagtaagggagaagaaggggcgtcggtatgggggatttttctgggcgtccatgggagggagctgccgcgtcgccatggacagggaggcaacgccatgaggaaactcgagctcgagccatggggaagggaagggagctcgctggggcatctcctgcgccatgggaggaagcaggacgccatggctgggggggcgcgtggagcagggagcctgctgctcgccttcagcaagggcgccgagttgggctggaagcagccgaggagggagctcgcccgcgccgtgaaggagagctcggcggcaagggtgcctggaggaaggagctcgccgcagggaaggctggcgccatgggagcagctcggcagagagcttctctgcgccatgagcaggagagaagagggaaccggctgggagaaatggcgccggggaggaacgcaggcagggcgtcggggcctgggcgtccatggctgcaagccttgctccctgcttgctgccgtgggagccagggaggaagaaggcagggggatgcgtgcgttggctggaaggaggagagggagaaatgttgtggcggctaggggggtagatgcaattttccaaattggcaaggggaggcacttctatttatagccatgtgagggctagggtttttagtgggccaaatgggctgggctggatgtggcccaaacacgtactcgggccgcgctaatatttcccggaataaaaatgctcgtgcggaattcgtctgtacgcggaacagagtgaaatagaattcgaacgaacggacgactacgcgattaactcggtcgagaggttgatttgactttgctcgaaaataattccctacgcgtgatttgaaaataaatcgtcttaagatttgatcggctttggatttttagccggagaaggcgaatcgtgatatttttaaaattgctgtcgatacggggttctgaatttggttcggacatgagatatttggctgagtcgagtaagaaataattagaggacgacgtactgagtattccgtgtgagagtacggagtcggattaagttttggacatagatcgaacatggatcgaagtttcgaggaattagattcgggctcagatcagataacagtcgtcgagagtttgattttaaagagcttcagttgagatttataattcgagaatgatcttcgagtctgcattagttccgagaattaaaagttttaacacgctccaaaattggctgtttctcgcgatcgattaactctgaattcggtgaacttccaagagaaagcctgataaacagagatagacacgatcgggaaatagaaatttttttaccgagcatccgagagtaggattaatctcccgacataacgcgaaatagac

SEQ ID NO: 77310 - DNA, 2145 bp, Zea Mays
ggtgcctaggagatgtggaggtggtggtcagtgggtcactgctcaccataacatgcgttgctttactgctgccccgaatgttgaagattcttatcctgagcgaccaggggaaccagattgtcctatgtaagtttaaatctaaatgcaagttcaaccatccgaaggatatggtgaatgcattaggaacaggaacaaacaatgaatctctaattgctgatagcgctgtcttaccagtgaggccttctgaacccatttgtgtgttctatgcaaaaacaggcaaatgcaaatttggtgccatttgcaagttcaatcatccaaaagatattaagacatcacctttgattgcaaaggaaaccatatatacagcaacaactgatgcagcagatgccccgaccgaggcgtgtaacgcaaaggggcttcctataagacaaggtgaagtggattgctcgttttatatgaagacaggcagctgcaaatatggttctatttgtcgcttcaaccatcctgatcggccagggccaggtctgttcttttcataactaaccatttggtcgacttaaattgtcatggcatcgtataggtcattttgctctgtttccatttgtgttacttcaagaaggatagagaaaccatcggcaataagctaactctaatcaaatcacactttaacttgcagtacatgccctgttgaagacttgccatttgcaaatcatgctgaaagcagagcttatagtgaccttgtaaccttgtaaacattagaggttcttaaaagtcttaataatatagaaaaggcatcagagcttctaatattatatttttgttatgaattgaaacattttattggcatatagtgcagttatgataagcgctttgaatttttcctgaagtgtcttctactcattagcttagggtttgaggatatttatagtttcttgcacttgtgactattatcatgtgtctgtttttgaatgtcatgctgaaatatgttgcccttataccacaatttttcagatagcaattgcaaaatgtttcttgttccattttcaatgttcaggctggttttcagacagcaattgctataatatcttgacctatcaacttaattctaatgacatcatcagcgcttgccattatcaccctccattttttaattaaacttttgacatatctggaattgtttttagatctccctactctctgatattgttttgtatgtgcagctgcggatatagcttttatggttccactggttcaagctactcttccttcatcagcacccattgtccctgcagtggttgaacctttgccaatgatctatcctcaaaggccaggagaaactgtttgtgatttttacatgaagacaggatcttgcaagtattctcagaaatgcaagtttcaccaccccatcagtcgttttgccccgcattccaaagaaaacggggatcctcaacagcctgcgacacttgctagcctgccaaggagagaggacgctgaggcttgtgccttctacatgaggtctggcatgtgcaggttcggtgcgcactgcaagttcgaccaccctcctcgcgaggaggctatttccgagctgcaggcagccggaaaggaaggaatagaagggccgagcctcgtccagcgcgaccatgatgtctaatactgtatcctgcttcagtatgtaataccatgtgaatcgcactgttagttaatgcttggtgctgtcagtcttgttgggagtctgactcgtaaagctcattatcatcggaagtgtttgtcggaggagtgctggcactaactatttatcttcagttggttgtcgtgttgccaacttgcgatgtcaaggtgcatatttcagttttttagagtaaaaatgcactttacatcctgccgccaaacttaactatgggcctgtttatggccctgtttggtttagcttttttttaccagcttttctaaaaatctggttgtggaaagaatttgagtatcgtgaagattacatgtggagaagatgaagtggtccaaagggtccatgatctagaaagcgatcaatttctattatcacaacgactcgatcgatgatgtttcatgttgattttagatgttttttttaccaaaatgattcttatagaaccgagctgaaaagctagggcg

SEQ ID NO: 77311 - DNA, 2230 bp, Zea Mays
aattttactcctgacgtttgtttccccttccatctcatgcctatcttgattcctctcacatctcttgtccatgatgcccctctgaattgcttttctggcgcccttacgcaccccaatccactccaacacaggtggattgaagtggatactgcatccaaacaagccctaatgatttccattaaaattggaattctagttttgttctttgttattcaacaatacagctaagtttttgccctgactaatataggtcgtgtttaagatattaaacttatgaataccatcctactgtttgcatctctttacaacatgtttcttaagccatcaggtaggtggctaggtgttagggcagtcatcgtactgatgctttccaaaagcggagagggagagagggaccccttttccccctgctagctccaacagtggtcaatttgaataggacagcatcggtgtttgatctggatagggacagtggcaggtgttgttataggcctgcagggtttgttgatactacctctcactgtgctcaattgctgctggcaagatgatataacgttgcgactgcttgcggcgtgcccaattacggtgactggttggtagggcttggattatgtcagtatatgttttctagagtaagtgcatgagttggggctatctagaaagggttacgggctggaatagtctaggaaaattcaatcttccctgtatgtttcttatattatttatgttctcttgacaagcgagcatgtgtatggcatctccttgcgttgggtgcctaggagatgtggaggtggtggtcagtgggtcactgctcaccataacatgcgttgctttactgctgccccgaatgttgaagattcttatcctgagcgaccaggggaaccagattgtccttatttattgaataatagatgtaagtttaaatctaaatgcaagttcaaccatccgaaggatatggtgaatgcattaggaacaggaacaaacaatgaatctctaattgctgatagcgctgtcttaccagtgaggccttctgaacccatttgtgtgttctatgcaaaaacaggcaaatgcaaatttggtgccatttgcaagttcaatcatccaaaagatattaagacatcacctttgattgcaaaggaaaccatatatacagcaacaactgatgcagcagatgccccgaccgaggcgtgtaacgcaaaggggcttcctataagacaaggtgaagtggattgctcgttttatatgaagacagctgcaaatatggttctatttgtcgcttcaaccatcctgatcggccagggccagctgcggatatagcttttatggttccactggttcaagctactcttccttcatcagcacccattgtccctgcagtggttgaacctttgccaatgatctatcctcaaaggccaggagaaactgtttgtgatttttacatgaagacaggatcttgcaagtattctcagaaatgcaagtttcaccaccccatcagtcgttttgccccgcattccaaagaaaacggggatcctcaacagcctgcgacacttgctagcctgccaaggagagaggacgctgaggcttgtgccttctacatgaggtctggcatgtgcaggttcggtgcgcactgcaagttcgaccaccctcctcgcgaggaggctatttccgagctgcaggcagccggaaaggaaggaatagaagggccgagcctcgtccagcgcgaccatgatgtctaatactgtatcctgcttcagtatgtaataccatgtgaatcgcactgttagttaatgcttggtgctgtcagtcttgttgggagtctgactcgtaaagctcattatcatcggaagtgtttgtcggaggagtgctggcactaactatttatcttcagttggttgtcgtgttgccaacttgcgatgtcaaggtgcatatttcagttttttagagtaaaaatgcactttacatcctgccgccaaacttaactatgggcctgtttatggccctgtttggtttagcttttttttaccagcttttctaaaaatctggttgtggaaagaatttgagtatcgtgaagattacatgtggagaagatgaagtggtccaaagggtccatgatctagaaagcgatcaatttctattatcacaacgactcgatcgatgatgtttcatgttgattttagatgttttttttaccaaaatgattcttatagaaccgagctgaaaagctagggcg

SEQ ID NO: 77312 - DNA, 1580 bp, Zea Mays
cgcccgcttcccgtccatttattaaactttcgcaagcgcaggtatctccccacagggcagcgcgtgcggaaaccctagtcgccgccgatgtcggaccctttctacccgtactaccgcggagccttcccgggcggcgacggtgcgcagccgccgccacgttactcggattttgaggtcgacctcatcgcggcccgttacgccggcaccctattgccttatccatcctctgccgacgtcggcgccttcgactcgtatgtcggcgcgagacgatccgcggaaggccccgaatgttgaagattcttatcctgagcgaccaggggaaccagattgtccttatttattgaataatagatgtaagtttaaatctaaatgcaagttcaaccatccgaaggatatggtgaatgcattaggaacaggaacaaacaatgaatctctaattgctgatagcgctgtcttaccagtgaggccttctgaacccatttgtgtggaaaccatatatacagcaacaactgatgcagcagatgccccgaccgaggcgtgtaacgcaaaggggcttcctataagacaaggtgaagtggattgctcgttttatatgaagacagctgcaaatatggttctatttgtcgcttcaaccatcctgatcggccagggccagctgcggatatagcttttatggttccactggttcaagctactcttccttcatcagcacccattgtccctgcagtggttgaacctttgccaatgatctatcctcaaaggccaggagaaactgtttgtgatttttacatgaagacaggatcttgcaagtattctcagaaatgcaagtttcaccaccccatcagtcgttttgccccgcattccaaagaaaacggggatcctcaacagcctgcgacacttgctagcctgccaaggagagaggacgctgaggcttgtgccttctacatgaggtctggcatgtgcaggttcggtgcgcactgcaagttcgaccaccctcctcgcgaggaggctatttccgagctgcaggcagccggaaaggaaggaatagaagggccgagcctcgtccagcgcgaccatgatgtctaatactgtatcctgcttcagtatgtaataccatgtgaatcgcactgttagttaatgcttggtgctgtcagtcttgttgggagtctgactcgtaaagctcattatcatcggaagtgtttgtcggaggagtgctggcactaactatttatcttcagttggttgtcgtgttgccaacttgcgatgtcaaggtgcatatttcagttttttagagtaaaaatgcactttacatcctgccgccaaacttaactatgggcctgtttatggccctgtttggtttagcttttttttaccagcttttctaaaaatctggttgtggaaagaatttgagtatcgtgaagattacatgtggagaagatgaagtggtccaaagggtccatgatctagaaagcgatcaatttctattatcacaacgactcgatcgatgatgtttcatgttgattttagatgttttttttaccaaaatgattcttatagaaccgagctgaaaagctagggcg

SEQ ID NO: 77313 - DNA, 2406 bp, Zea Mays
gccgcgtgcaagcgcctcgtaagacgccagtggacattcgcccgcttcccgtccatttattaaactttcgcaagcgcaggtatctccccacagggcagcgcgtgcggaaaccctagtcgccgccgatgtcggaccctttctacccgtactaccgcggagccttcccgggcggcgacggtgcgcagccgccgccacgttactcggattttgaggtcgacctcatcgcggcccgttacgccggcaccctattgccttatccatcctctgccgacgtcggcgccttcgactcgtatgtcggcgcgagacgatccgcggaaggccccgaatgttgaagattcttatcctgagcgaccaggggaaccagattgtccttatttattgaataatagatgtaagtttaaatctaaatgcaagttcaaccatccgaaggatatggtgaatgcattaggaacaggaacaaacaatgaatctctaattgctgatagcgctgtcttaccagtgaggccttctgaacccatttgtgtgttctatgcaaaaacaggcaaatgcaaatttggtgccatttgcaagttcaatcatccaaaagatattaagacatcacctttgattgcaaaggaaaccatatatacagcaacaactgatgcagcagatgccccgaccgaggcgtgtaacgcaaaggggcttcctataagacaaggtgaagtggattgctcgttttatatgaagacagctgcaaatatggttctatttgtcgcttcaaccatcctgatcggccagggccaggtctgttcttttcataactaaccatttggtcgacttaaattgtcatggcatcgtataggtcattttgctctgtttccatttgtgttacttcaagaaggatagagaaaccatcggcaataagctaactctaatcaaatcacactttaacttgcagtacatgccctgttgaagacttgccatttgcaaatcatgctgaaagcagagcttatagtgaccttgtaaccttgtaaacattagaggttcttaaaagtcttaataatatagaaaaggcatcagagcttctaatattatatttttgttatgaattgaaacattttattggcatatagtgcagttatgataagcgctttgaatttttcctgaagtgtcttctactcattagcttagggtttgaggatatttatagtttcttgcacttgtgactattatcatgtgtctgtttttgaatgtcatgctgaaatatgttgcccttataccacaatttttcagatagcaattgcaaaatgtttcttgttccattttcaatgttcaggctggttttcagacagcaattgctataatatcttgacctatcaacttaattctaatgacatcatcagcgcttgccattatcaccctccattttttaattaaacttttgacatatctggaattgtttttagatctccctactctctgatattgttttgtatgtgcagctgcggatatagcttttatggttccactggttcaagctactcttccttcatcagcacccattgtccctgcagtggttgaacctttgccaatgatctatcctcaaaggccaggagaaactgtttgtgatttttacatgaagacaggatcttgcaagtattctcagaaatgcaagtttcaccaccccatcagtcgttttgccccgcattccaaagaaaacggggatcctcaacagcctgcgacacttgctagcctgccaaggagagaggacgctgaggcttgtgccttctacatgaggtctggcatgtgcaggttcggtgcgcactgcaagttcgaccaccctcctcgcgaggaggctatttccgagctgcaggcagccggaaaggaaggaatagaagggccgagcctcgtccagcgcgaccatgatgtctaatactgtatcctgcttcagtatgtaataccatgtgaatcgcactgttagttaatgcttggtgctgtcagtcttgttgggagtctgactcgtaaagctcattatcatcggaagtgtttgtcggaggagtgctggcactaactatttatcttcagttggttgtcgtgttgccaacttgcgatgtcaaggtgcatatttcagttttttagagtaaaaatgcactttacatcctgccgccaaacttaactatgggcctgtttatggccctgtttggtttagcttttttttaccagcttttctaaaaatctggttgtggaaagaatttgagtatcgtgaagattacatgtggagaagatgaagtggtccaaagggtccatgatctagaaagcgatcaatttctattatcacaacgactcgatcgatgatgtttcatgttgattttagatgttttttttaccaaaatgattcttatagaaccgagctgaaaagctagggcg

SEQ ID NO: 77314 - DNA, 3121 bp, Zea Mays
agatatcacatgacaccaatgctgatttagttatcttcatgccacgaacctatggatgccagctctgcactgcgatccttatcttaacactgatgctgggactatgtctccattcgaacatggtgaagtgttcgtactggatgatggtggcgaggtggacttggatcttggtaattacgagagatttttggacattaaacttactcgggacaataatataaccactggaaagatctatcagtctgtaattgacaaggagaggaaaggggaatatttgggaaagactgtccaggttgtgccacacatcacaaatgccatacaggagtggatcgagcgtgttgctaagataccagttgatggcaaggagggacctgctgatgtctgtgtgatagaattggggggcactataggtgatattgaatctatgccatttattgaagctttgggtcagttctcttatcgtgttggtcctggcaacttctgcctggtgcacgtcagtctagttccagttttgaatgttgttggtgaacagaaaacaaagccaacccagcatagtgtacgtggtttgaggggactcgggctcaccccaaatattttagcttgtcgcagtactaaggaattagaggaaaatgtgaaggagaaactctcccagttttgccatgttccggcagcaaatattatcactttgtatgatgtttccaatatctggcgcattcctttgttgctacatgaacaaaaggctcatgaggctattcttaaagttctgaatctggaaaggatggacagcatcgctcgagagccaaagttagacgaatggattgcaagagctactatatttgatacccttcatgacactgtgaggattgctatggttgggaagtacactggcttatcagattcatacctctctgtgttgaaagccctcttgcatgcatctgttgattgccacaggaagcttgttgttgattgggttgcttcaacggatcttgaggactccactgcaattgaggcacctgattcatataaaactgcgtggaatttactgaagggggcaggtggaattttggtacctggtggctttggtgacagaggtgttcaagggaaaattttggctgctaagtatgcccgtgaaaaaaatgtcccatatcttggtatatgtcttgggatgcagatcgctgtggtggagtatgctcgtcatgtcatgaatcttactgatgcgaacagcactgaatttgatccaaataccaagaccccttgtgttatttttatgcctgagggttccaaaacacacatgggtgcgacaatgcgattaggatcaaggaggacatttttcaagattgctgattgcaagtcttctaaattgtatggcaatgtcacttatgttgatgaaaggcatcggcacagatatgaggtgaaccctgatatggttccagagttcgaaaatgctggacttcagtttgttggcaaagatgatactggaaggaggatggagattatcgaaatacccaaccaccgatattttgttggcgcacaattccatcctgagttcaagtcaagaccttcaaaaccttctcccctatttgtggggctaattgcggctgcatctggacagttggatagggtcctgcaagaccgctgcactggtcatgctgtttcagagaaacatgttctgagcaacggctcatatacacccgcaatacaccaaaatgggcacccaaagaagctcccaaatggtctatcaaacggaacatactatggcaatggcaatggcgtgcatgcttaggagcatcagtggatggatcgaggatttgcaactttttgcttacagatttgcgattcctaatgcatcagttttgtcgtggctggcttgactgactaccatcatggtcgctcgagaaacaaaaagttcctgtgctcgatgtggactgtctggtagggatagtgctcgttcggtggtttctagcgaagcgcgagatagtggtttctgtgttcgccgatctctaccctcttctgtaagcaaatggagcagatttgggtcagaagagtttacatgctgtacatcctaaagaaaagctgaatgttttggttgctcaaattaggttttcagtgaggtctagagctgatgcttagaaatgcgcagcagtgcaagagagtatttcgaaattaagcaagtctgtattttgaatttggatacttttttttgtgcttgtgcgcaaataagttgatgccctgcttcatgatcatatcaatttgtcttccctctagcgcttgcttctccggagagcatctcgaagagatcccaaaatttaatgtcccaataccagagaattaggatcttctttccagaaaaaagtgaagagatcctaaaattaaatgtcccaataccagagaattaggatcttcttaaatctcttaattcttaaatctcttaattccaaaaataggtgaatcatctctaacagcttccaatatattctcaaaaatgcaatgaatagagccctgcacaactgtatctacggccatcgttcacaataatcctccctgcgccaccaaagttgcctcgcccagcaacctccgtcgttgctcacgtgtatgcagtcatttgcttgaataccggcatcaaaggatcaccgtcgctttaaatttagctaatattagaaaaaagcgtctccaataaactatgtaaatagctttttaaatttagtggctctatatgcttccaacttcgttctctatttttggatagtctgctttactgttcctttagtccttaagtttactgagtctattggattatcctacactttttctgtaaaatctatttccaagggtatctaaatcagtaaatttggctatctttaggtgctggtaggcaagctgaaaacatataagctacaaacatccaaaacttcaatccatataccacgataaactctttgtgtcaacaactagaccttgaaaaggtttgtataattgttattcttacaaccatcgagaacttaaaaaaaaatgaacgttcttctgtcaacaactataacgtcaaaagatagaaaaaatataaaactgaaattctatcaagagagctgaaacattattctgtaaggaacaaggctcggtattc

SEQ ID NO: 77315 - DNA, 3355 bp, Zea Mays
cctcctccgtctatccccacagccgccttgcctccattgtctctccactcccttctcttccctctcacctcctaaaacctccattgcccgcgcgcacgagcgcccgcgtcgaggactccagctcgtgtgtccgtgcgaacgcgcggttttcttgtcacgaactgtcgctccggtcaggggattgaggaggtggggcggcggcggcggatttgtcgggcccgagattcccggacaaggagaaatgaagtacgtccttgtcaccggcggggtagtgagcggcctgggcaagggcgttacagccagcagcatcggcgtcgtcctgaaggcgtgcggcctccgcattacgtccattaagattgatccttatcttaacactgatgctgggactatgtctccattcgaacatggtgaagtgttcgtactggatgatggtggcgaggtggacttggatcttggtaattacgagagatttttggacattaaacttactcgggacaataatataaccactggaaagatctatcaggttgtgccacacatcacaaatgccatacaggagtggatcgagcgtgttgctaagataccagttgatggcaaggagggacctgctgatgtctgtgtgatagaattggggggcactataggtgatattgaatctatgccatttattgaagctttgggtcagttctcttatcgtgttggtcctggcaacttctgcctggtgcacgtcagtctagttccagttttgaatgttgttggtgaacagaaaacaaagccaacccagcatagtgtacgtggtttgaggggactcgggctcaccccaaatattttagcttgtcgcagtactaaggaattagaggaaaatgtgaaggagaaactctcccagttttgccatgttccggcagcaaatattatcactttgtatgatgtttccaatatctggcgcattcctttgttgctacatgaacaaaaggctcatgaggctattcttaaagttctgaatctggaaaggatggacagcatcgctcgagagccaaagttagacgaatggattgcaagagctactatatttgatacccttcatgacactgtgaggattgctatggttgggaagtacactggcttatcagattcatacctctctgtgttgaaagccctcttgcatgcatctgttgattgccacaggaagcttgttgttgattgggttgcttcaacggatcttgaggactccactgcaattgaggcacctgattcatataaaactgcgtggaatttactgaagggggcaggtggaattttggtacctggtggctttggtgacagaggtgttcaagggaaaattttggctgctaagtatgcccgtgaaaaaaatgtcccatatcttggtatatgtcttgggatgcagatcgctgtggtggagtatgctcgtcatgtcatgaatcttactgatgcgaacagcactgaatttgatccaaataccaagaccccttgtgttatttttatgcctgagggttccaaaacacacatgggtgcgacaatgcgattaggatcaaggaggacatttttcaagattgctgattgcaagtcttctaaattgtatggcaatgtcacttatgttgatgaaaggcatcggcacagatatgaggtgaaccctgatatggttccagagttcgaaaatgctggacttcagtttgttggcaaagatgatactggaaggaggatggagattatcgaaatacccaaccaccgatattttgttggcgcacaattccatcctgagttcaagtcaagaccttcaaaaccttctcccctatttgtggggctaattgcggctgcatctggacagttggatagggtcctgcaagaccgctgcactggtcatgctgtttcagagaaacatgttctgagcaacggctcatatacacccgcaatacaccaaaatgggcacccaaagaagctcccaaatggtctatcaaacggaacatactatggcaatggcaatggcgtgcatgcttaggagcatcagtggatggatcgaggatttgcaactttttgcttacagatttgcgattcctaatgcatcagttttgtcgtggctggcttgactgactaccatcatggtcgctcgagaaacaaaaagttcctgtgctcgatgtggactgtctggtagggatagtgctcgttcggtggtttctagcgaagcgcgagatagtggtttctgtgttcgccgatctctaccctcttctgtaagcaaatggagcagatttgggtcagaagagtttacatgctgtacatcctaaagaaaagctgaatgttttggttgctcaaattaggttttcagtgaggtctagagctgatgcttagaaatgcgcagcagtgcaagagagtatttcgaaattaagcaagtctgtattttgaatttggatacttttttttgtgcttgtgcgcaaataagttgatgccctgcttcatgatcatatcaatttgtcttccctctagcgcttgcttctccggagagcatctcgaagagatcccaaaatttaatgtcccaataccagagaattaggatcttctttccagaaaaaagtgaagagatcctaaaattaaatgtcccaataccagagaattaggatcttcttaaatctcttaattcttaaatctcttaattccaaaaataggtgaatcatctctaacagcttccaatatattctcaaaaatgcaatgaatagagccctgcacaactgtatctacggccatcgttcacaataatcctccctgcgccaccaaagttgcctcgcccagcaacctccgtcgttgctcacgtgtatgcagtcatttgcttgaataccggcatcaaaggatcaccgtcgctttaaatttagctaatattagaaaaaagcgtctccaataaactatgtaaatagctttttaaatttagtggctctatatgcttccaacttcgttctctatttttggatagtctgctttactgttcctttagtccttaagtttactgagtctattggattatcctacactttttctgtaaaatctatttccaagggtatctaaatcagtaaatttggctatctttaggtgctggtaggcaagctgaaaacatataagctacaaacatccaaaacttcaatccatataccacgataaactctttgtgtcaacaactagaccttgaaaaggtttgtataattgttattcttacaaccatcgagaacttaaaaaaaaatgaacgttcttctgtcaacaactataacgtcaaaagatagaaaaaatataaaactgaaattctatcaagagagctgaaacattattctgtaaggaacaaggctcggtattc

SEQ ID NO: 77316 - DNA, 3369 bp, Zea Mays
aaaaaatgttgaattgagggatttgggcgtataaatggccccctccctttccaaacccctcctccgtctatccccacagccgccttgcctccattgtctctccactcccttctcttccctctcacctcctaaaacctccattgcccgcgcgcacgagcgcccgcgtcgaggactccagctcgtgtgtccgtgcgaacgcgcggttttcttgtcacgaactgtcgctccggtcaggggattgaggaggtggggcggcggcggcggatttgtcgggcccgagattcccggacaaggagaaatgaagtacgtccttgtcaccggcggggtagtgagcggcctgggcaagggcgttacagccagcagcatcggcgtcgtcctgaaggcgtgcggcctccgcattacgtccattaagattgatccttatcttaacactgatgctgggactatgtctccattcgaacatggtgaagtgttcgtactggatgatggtggcgaggtggacttggatcttggtaattacgagagatttttggacattaaacttactcgggacaataatataaccactggaaagatctatcagtctgtaattgacaaggagaggaaaggggaatatttgggaaagactgtccaggttgtgccacacatcacaaatgccatacaggagtggatcgagcgtgttgctaagataccagttgatggcaaggagggacctgctgatgtctgtgtgatagaattggggggcactataggtgatattgaatctatgccatttattgaagctttgggtcagttctcttatcgtgttggtcctggcaacttctgcctggtgcacgtcagtctagttccagttttgaatgttgttggtgaacagaaaacaaagccaacccagcatagtgtacgtggtttgaggggactcgggctcaccccaaatattttagcttgtcgcagtactaaggaattagaggaaaatgtgaaggagaaactctcccagttttgccatgttccggcagcaaatattatcactttgtatgatgtttccaatatctggcgcattcctttgttgctacatgaacaaaaggctcatgaggctattcttaaagttctgaatctggaaaggatggacagcatcgctcgagagccaaagttagacgaatggattgcaagagctactatatttgatacccttcatgacactgtgaggattgctatggttgggaagtacactggcttatcagattcatacctctctgtgttgaaagccctcttgcatgcatctgttgattgccacaggaagcttgttgttgattgggttgcttcaacggatcttgaggactccactgcaattgaggcacctgattcatataaaactgcgtggaatttactgaagggggcaggtggaattttggtacctggtggctttggtgacagaggtgttcaagggaaaattttggctgctaagtatgcccgtgaaaaaaatgtcccatatcttggtatatgtcttgggatgcagatcgctgtggtggagtatgctcgtcatgtcatgaatcttactgatgcgaacagcactgaatttgatccaaataccaagaccccttgtgttatttttatgcctgagggttccaaaacacacatgggtgcgacaatgcgattaggatcaaggaggacatttttcaagattgctgattgcaagtcttctaaattgtatggcaatgtcacttatgttgatgaaaggcatcggcacagatatgaggtgaaccctgatatggttccagagttcgaaaatgctggacttcagtttgttggcaaagatgatactggaaggaggatggagggctaattgcggctgcatctggacagttggatagggtcctgcaagaccgctgcactggtcatgctgtttcagagaaacatgttctgagcaacggctcatatacacccgcaatacaccaaaatgggcacccaaagaagctcccaaatggtctatcaaacggaacatactatggcaatggcaatggcgtgcatgcttaggagcatcagtggatggatcgaggatttgcaactttttgcttacagatttgcgattcctaatgcatcagttttgtcgtggctggcttgactgactaccatcatggtcgctcgagaaacaaaaagttcctgtgctcgatgtggactgtctggtagggatagtgctcgttcggtggtttctagcgaagcgcgagatagtggtttctgtgttcgccgatctctaccctcttctgtaagcaaatggagcagatttgggtcagaagagtttacatgctgtacatcctaaagaaaagctgaatgttttggttgctcaaattaggttttcagtgaggtctagagctgatgcttagaaatgcgcagcagtgcaagagagtatttcgaaattaagcaagtctgtattttgaatttggatacttttttttgtgcttgtgcgcaaataagttgatgccctgcttcatgatcatatcaatttgtcttccctctagcgcttgcttctccggagagcatctcgaagagatcccaaaatttaatgtcccaataccagagaattaggatcttctttccagaaaaaagtgaagagatcctaaaattaaatgtcccaataccagagaattaggatcttcttaaatctcttaattcttaaatctcttaattccaaaaataggtgaatcatctctaacagcttccaatatattctcaaaaatgcaatgaatagagccctgcacaactgtatctacggccatcgttcacaataatcctccctgcgccaccaaagttgcctcgcccagcaacctccgtcgttgctcacgtgtatgcagtcatttgcttgaataccggcatcaaaggatcaccgtcgctttaaatttagctaatattagaaaaaagcgtctccaataaactatgtaaatagctttttaaatttagtggctctatatgcttccaacttcgttctctatttttggatagtctgctttactgttcctttagtccttaagtttactgagtctattggattatcctacactttttctgtaaaatctatttccaagggtatctaaatcagtaaatttggctatctttaggtgctggtaggcaagctgaaaacatataagctacaaacatccaaaacttcaatccatataccacgataaactctttgtgtcaacaactagaccttgaaaaggtttgtataattgttattcttacaaccatcgagaacttaaaaaaaaatgaacgttcttctgtcaacaactataacgtcaaaagatagaaaaaatataaaactgaaattctatcaagagagctgaaacattattctgtaaggaacaaggctcggtattc

SEQ ID NO: 77317 - DNA, 3454 bp, Zea Mays
gattcacaaaggcaagtctggaaaaaatgttgaattgagggatttgggcgtataaatggccccctccctttccaaacccctcctccgtctatccccacagccgccttgcctccattgtctctccactcccttctcttccctctcacctcctaaaacctccattgcccgcgcgcacgagcgcccgcgtcgaggactccagctcgtgtgtccgtgcgaacgcgcggttttcttgtcacgaactgtcgctccggtcaggggattgaggaggtggggcggcggcggcggatttgtcgggcccgagattcccggacaaggagaaatgaagtacgtccttgtcaccggcggggtagtgagcggcctgggcaagggcgttacagccagcagcatcggcgtcgtcctgaaggcgtgcggcctccgcattacgtccattaagattgatccttatcttaacactgatgctgggactatgtctccattcgaacatggtgaagtgttcgtactggatgatggtggcgaggtggacttggatcttggtaattacgagagatttttggacattaaacttactcgggacaataatataaccactggaaagatctatcagtctgtaattgacaaggagaggaaaggggaatatttgggaaagactgtccaggagtggatcgagcgtgttgctaagataccagttgatggcaaggagggacctgctgatgtctgtgtgatagaattggggggcactataggtgatattgaatctatgccatttattgaagctttgggtcagttctcttatcgtgttggtcctggcaacttctgcctggtgcacgtcagtctagttccagttttgaatgttgttggtgaacagaaaacaaagccaacccagcatagtgtacgtggtttgaggggactcgggctcaccccaaatattttagcttgtcgcagtactaaggaattagaggaaaatgtgaaggagaaactctcccagttttgccatgttccggcagcaaatattatcactttgtatgatgtttccaatatctggcgcattcctttgttgctacatgaacaaaaggctcatgaggctattcttaaagttctgaatctggaaaggatggacagcatcgctcgagagccaaagttagacgaatggattgcaagagctactatatttgatacccttcatgacactgtgaggattgctatggttgggaagtacactggcttatcagattcatacctctctgtgttgaaagccctcttgcatgcatctgttgattgccacaggaagcttgttgttgattgggttgcttcaacggatcttgaggactccactgcaattgaggcacctgattcatataaaactgcgtggaatttactgaagggggcaggtggaattttggtacctggtggctttggtgacagaggtgttcaagggaaaattttggctgctaagtatgcccgtgaaaaaaatgtcccatatcttggtatatgtcttgggatgcagatcgctgtggtggagtatgctcgtcatgtcatgaatcttactgatgcgaacagcactgaatttgatccaaataccaagaccccttgtgttatttttatgcctgagggttccaaaacacacatgggtgcgacaatgcgattaggatcaaggaggacatttttcaagattgctgattgcaagtcttctaaattgtatggcaatgtcacttatgttgatgaaaggcatcggcacagatatgaggtgaaccctgatatggttccagagttcgaaaatgctggacttcagtttgttggcaaagatgatactggaaggaggatggagattatcgaaatacccaaccaccgatattttgttggcgcacaattccatcctgagttcaagtcaagaccttcaaaaccttctcccctatttgtggggctaattgcggctgcatctggacagttggatagggtcctgcaagaccgctgcactggtcatgctgtttcagagaaacatgttctgagcaacggctcatatacacccgcaatacaccaaaatgggcacccaaagaagctcccaaatggtctatcaaacggaacatactatggcaatggcaatggcgtgcatgcttaggagcatcagtggatggatcgaggatttgcaactttttgcttacagatttgcgattcctaatgcatcagttttgtcgtggctggcttgactgactaccatcatggtcgctcgagaaacaaaaagttcctgtgctcgatgtggactgtctggtagggatagtgctcgttcggtggtttctagcgaagcgcgagatagtggtttctgtgttcgccgatctctaccctcttctgtaagcaaatggagcagatttgggtcagaagagtttacatgctgtacatcctaaagaaaagctgaatgttttggttgctcaaattaggttttcagtgaggtctagagctgatgcttagaaatgcgcagcagtgcaagagagtatttcgaaattaagcaagtctgtattttgaatttggatacttttttttgtgcttgtgcgcaaataagttgatgccctgcttcatgatcatatcaatttgtcttccctctagcgcttgcttctccggagagcatctcgaagagatcccaaaatttaatgtcccaataccagagaattaggatcttctttccagaaaaaagtgaagagatcctaaaattaaatgtcccaataccagagaattaggatcttcttaaatctcttaattcttaaatctcttaattccaaaaataggtgaatcatctctaacagcttccaatatattctcaaaaatgcaatgaatagagccctgcacaactgtatctacggccatcgttcacaataatcctccctgcgccaccaaagttgcctcgcccagcaacctccgtcgttgctcacgtgtatgcagtcatttgcttgaataccggcatcaaaggatcaccgtcgctttaaatttagctaatattagaaaaaagcgtctccaataaactatgtaaatagctttttaaatttagtggctctatatgcttccaacttcgttctctatttttggatagtctgctttactgttcctttagtccttaagtttactgagtctattggattatcctacactttttctgtaaaatctatttccaagggtatctaaatcagtaaatttggctatctttaggtgctggtaggcaagctgaaaacatataagctacaaacatccaaaacttcaatccatataccacgataaactctttgtgtcaacaactagaccttgaaaaggtttgtataattgttattcttacaaccatcgagaacttaaaaaaaaatgaacgttcttctgtcaacaactataacgtcaaaagatagaaaaaatataaaactgaaattctatcaagagagctgaaacattattctgtaaggaacaaggctcggtattc

SEQ ID NO: 77318 - DNA, 538 bp, Zea Mays
cgttgtgtataatattactctggtgggaaggacatcactttgcaagaagtgaacaaggtgtcccagattgtgacaagcctagctgacccaaatctctcggaccatccactgccattcatacgccatacacatccatcctcaataccttctatctatttaaaaacccctaatcgatcgatacgccatacgccagtgaagccacgggtcgctaaggacacggtgctaaagtttgcatatgcacagggatggcagagagcacagattttacaagagctagccttccagccttatcaagcattttccctttccaagctgcaagcttattggccagtttgtctagaagtggttggatgtccaatctccttagaggcttgatgctgagtggaagaccaagataattgcaccgaaaattccccagctgacaagggaaaggttccatgatctagcacaacggtaggtgatcacaacagattgggaaaactgaacatttcctttggttcacagcaaggcccggcacttcactgaacacagcaagcag

SEQ ID NO: 77319 - DNA, 608 bp, Zea Mays
atctcattctcttatcattgacgacgggacaaccaaaatcaagaatctagattccaacattgactccttgaaggtgaaactgacagacgaagatctgaaagaaatgggcagccagatacgggaagaagatgtggctggtggaagacaattcacttcatttgcacataccacctggaagtacgctgatacgccaaagaagcagagctaaaaaatacttgaaagcaacaatgatgatgcgattggtatggccctctccctgcagatgccctcaggaacattgccgatgcccctttgtgaacagcctcttctagtaaataataatgtatggagaagaacaatgaagggcccagtcttgttggaagtacgaataatgtacagttacaggaatgtgtgctaccatatatttcgtcgcatcagtttgagttgtggttgtgtgaacctaccatatatttcctcgcaaaagaataatgtatagttacaataatatgtgctatctcaatcagtatgcaggcaggaaaaacatgcaccatctgtagtacagtacatgaattctcgcttgtaatccacatttagacctgaaaatgcgaaaaagaaaaaccaaaacacaa

SEQ ID NO: 77320 - DNA, 1404 bp, Zea Mays
ggcggccgtgcctccgctctgtcgttgtgtccaagctggggttcgggtgcatggggctgacgggcgcgtacaactccccgctggacgacgaggccggcatcgccgtcatcgcgcacgctttcagccgcggagtcaccttgttcgacacctccgacgtatacgggcccctcaccaacgaaatcctcctcggcaaggcgctgaagcagctgccgcgggagcaggtgcaggtggccaccaagttcgggatacggcatgacgagagcggcacgcggaccgtgtgcggccggccggagtacgttcgcgcctgctgcgaggccagcctgcgccgcctcggcatcgactgcatcgacctctactaccagcaccgcattgacaccacaactcccatcgaggagacgattggcgagctcaagaagctggtggaggagggtaaggtcaagtacatcggattgtcagaggcgagcccggacaccatcaggcgtgcacatgctgtgcacccgatcaccgcggtgcagatggagtggtctctctggtctcgcgacattgagcccgaaattgtgccgctctgcagagaattgggcattggaattgtaccatacagtcctcttggccgtgggttttttggtggaagaggagtgaaagaacaagtgtctgctgaatctaatctgcatgggatcccaaggtttgctccagaaaatttggagaagaacaagcaaatttatttgcgaatggaagaactggccaataagcaccagtgcagccctgctcagctagctttagcatgggttctgcatcaaggagatgatgtggttcctataccagggacaaccaaaatcaagaatctagattccaacattgactccttgaaggtgaaactgacagacgaagatctgaaagaaatgggcagccagatacgggaagaagatgtggctggtggaagacaattcacttcatttgcacataccacctggaagtacgctgatacgccaaagaagcagagctaaaaaatacttgaaagcaacaatgatgatgcgattggtatggccctctccctgcagatgccctcaggaacattgccgatgcccctttgtgaacagcctcttctagtaaataataatgtatggagaagaacaatgaagggcccagtcttgttggaagtacgaataatgtacagttacaggaatgtgtgctaccatatatttcgtcgcatcagtttgagttgtggttgtgtgaacctaccatatatttcctcgcaaaagaataatgtatagttacaataatatgtgctatctcaatcagtatgcaggcaggaaaaacatgcaccatctgtagtacagtacatgaattctcgcttgtaatccacatttagacctgaaaatgcgaaaaagaaaaaccaaaacacaa

SEQ ID NO: 77321 - DNA, 2060 bp, Zea Mays
agccctccaatctctagcagaaacgtcttgcccgacacgactactcgtccgactagaaccaaacttttcaatccatcgttcgcagttcagttcacacttcacaggcgagcagcgaccatggatacccaagcacgtccggttcctccccgcgtcaagctcggcatccagggattcgaggtgtccaagctggggttcgggtgcatggggctgacgggcgcgtacaactccccgctggacgacgaggccggcatcgccgtcatcgcgcacgctttcagccgcggagtcaccttgttcgacacctccgacgtatacgggcccctcaccaacgaaatcctcctcggcaaggcgctgaagcagctgccgcgggagcaggtgcaggtggccaccaagttcgggatacggcatgacgagagcggcacgcggaccgtgtgcggccggccggagtacgttcgcgcctgctgcgaggccagcctgcgccgcctcggcatcgactgcatcgacctctactaccagcaccgcattgacaccacaactcccatcgaggagacgattggcgagctcaagaagctggtggaggagggtaaggtcaagtacatcggattgtcagaggcgagcccggacaccatcaggcgtgcacatgctgtgcacccgatcaccgcggtgcagatggagtggtctctctggtctcgcgacattgagcccgaaattgtgccgctctgcagagaattgggcattggaattgtaccatacagtcctcttggccgtgggttttttggtggaagaggagtgaaagaacaagtgtctgctgaatctaatctgcatgggatcccaaggtttgctccagaaaatttggagaagaacaagcaaatttatttgcgaatggaagaactggccaataagcaccagtgcagccctgctcagctagctttagcatgggttctgcatcaaggagatgatgtggttcctataccaggtgttaccttataatctcattctcttatcattgacgacggtctgtgctttcagactgatgagttatacactttgagagaacagtgtattgcatcatgttcatagaccattattaatgatcggaaatagtttaggtcgtataacttaggagtaaccttttcaattataatataatctgctttggcagagaaacacaataatgtagaggaacacatccagttcgaacagcatttcattgttttgaagggaagcaacctccttccatccaagtgtgtgtgcataatagcatgttgaatagtttttgccatatgatattttttactgatctatgaactactctgttcatttgaaacattgtgcgatttaactgacttattcttgagtcttactcttgttattcccttcccaagttcaaacaagtcatcagtagtcatgcttcatggctatatatatgttccgatagtcctgtatttagtcactgacaagtgttttctacaatttctcagggacaaccaaaatcaagaatctagattccaacattgactccttgaaggtgaaactgacagacgaagatctgaaagaaatgggcagccagatacgggaagaagatgtggctggtggaagacaattcacttcatttgcacataccacctggaagtacgctgatacgccaaagaagcagagctaaaaaatacttgaaagcaacaatgatgatgcgattggtatggccctctccctgcagatgccctcaggaacattgccgatgcccctttgtgaacagcctcttctagtaaataataatgtatggagaagaacaatgaagggcccagtcttgttggaagtacgaataatgtacagttacaggaatgtgtgctaccatatatttcgtcgcatcagtttgagttgtggttgtgtgaacctaccatatatttcctcgcaaaagaataatgtatagttacaataatatgtgctatctcaatcagtatgcaggcaggaaaaacatgcaccatctgtagtacagtacatgaattctcgcttgtaatccacatttagacctgaaaatgcgaaaaagaaaaaccaaaacacaa

SEQ ID NO: 77322 - DNA, 1562 bp, Zea Mays
agccctccaatctctagcagaaacgtcttgcccgacacgactactcgtccgactagaaccaaacttttcaatccatcgttcgcagttcagttcacacttcacaggcgagcagcgaccatggatacccaagcacgtccggttcctccccgcgtcaagctcggcatccagggattcgaggtgtccaagctggggttcgggtgcatggggctgacgggcgcgtacaactccccgctggacgacgaggccggcatcgccgtcatcgcgcacgctttcagccgcggagtcaccttgttcgacacctccgacgtatacgggcccctcaccaacgaaatcctcctcggcaaggcgctgaagcagctgccgcgggagcaggtgcaggtggccaccaagttcgggatacggcatgacgagagcggcacgcggaccgtgtgcggccggccggagtacgttcgcgcctgctgcgaggccagcctgcgccgcctcggcatcgactgcatcgacctctactaccagcaccgcattgacaccacaactcccatcgaggagacgattggcgagctcaagaagctggtggaggagggtaaggtcaagtacatcggattgtcagaggcgagcccggacaccatcaggcgtgcacatgctgtgcacccgatcaccgcggtgcagatggagtggtctctctggtctcgcgacattgagcccgaaattgtgccgctctgcagagaattgggcattggaattgtaccatacagtcctcttggccgtgggttttttggtggaagaggagtgaaagaacaagtgtctgctgaatctaatctggtatcaacatgggatcccaaggtttgctccagaaaatttggagaagaacaagcaaatttatttgcgaatggaagaactggccaataagcaccagtgcagccctgctcagctagctttagcatgggttctgcatcaaggagatgatgtggttcctataccagggacaaccaaaatcaagaatctagattccaacattgactccttgaaggtgaaactgacagacgaagatctgaaagaaatgggcagccagatacgggaagaagatgtggctggtggaagacaattcacttcatttgcacataccacctggaagtacgctgatacgccaaagaagcagagctaaaaaatacttgaaagcaacaatgatgatgcgattggtatggccctctccctgcagatgccctcaggaacattgccgatgcccctttgtgaacagcctcttctagtaaataataatgtatggagaagaacaatgaagggcccagtcttgttggaagtacgaataatgtacagttacaggaatgtgtgctaccatatatttcgtcgcatcagtttgagttgtggttgtgtgaacctaccatatatttcctcgcaaaagaataatgtatagttacaataatatgtgctatctcaatcagtatgcaggcaggaaaaacatgcaccatctgtagtacagtacatgaattctcgcttgtaatccacatttagacctgaaaatgcgaaaaagaaaaaccaaaacacaa

SEQ ID NO: 77323 - DNA, 3075 bp, Zea Mays
aacacagcccagctctccgacaccggccaggcgagtggagtcgtcatagcattcgagagccagccgtccgttgccaacgcccaacggtctgagtgaatcctgccgatcgcgaacgccgccgcgtcgtcgtcctccgtcgccccgcctcggcttccaccgtcagcggccgcgctcgcgataaggctactcgtgtcctgtccactaaaaccaagacccaccgcctccagagttaaagggaaaagaaaaaggggaagaagcccctcgctccaagtcacgcgcctcccgcctcgccggcgccgcccgcccgcccgcctcgcccgccatgagcgcgctccaggcctccctcctcctccgcccgctcttttcgccactgcccccacgccgccggcagctgctctcctccgcctccttctctttcccccgcggcgcccacgcgccccgcctccgcgcattggtccccggcgcgccgcagcccgacgccgccgagccgcccgcgattgcatcctcggcggcggcggcggcggcggcggaggctgagccggaggcggagcccacgacggcggcagctcagcccgtcgcgatgagcgcgaaggaggggctggaggacatggtggacaaggctagggcctgggccgtggcggtcgcggccgcggtgttagccgcggccaggaggttcgtcgactgggtgctgtcgagggactggatgggctggtggcctttctggagatccgagcaccggctgcagcgcttgatcgacgaggcggacgccaaccccaacgacgcggccaagcagagcgcgctcctgcacgagctcaacaaccctgaagatgtcattaaaaggtttgaggagcgaagccatgctgtggatagcaggggggctgcagagtacctgcgggcacttattctcactaacactatagcagattaccttccagatgaacaatctgggaggtctgcaagcctgccagccctgttgcaagagttgaaacaacgtgtatctgggaatgaggacaaacctttcatgaaccctgggatatcagaaaagcaacctttacatgttgtaatggttgaccccaaatctacaggtagatcaacacgttttgctcaagaaatcttctcaacgatcttgtttacaattgctgttggcgtaatgtgggtgatgggtgctgctgcacttcaaaaatatattgggagcttaggtggaattggggcatctggtgctggttctagctcatcatattctccaaaagagatgaataaggatatgatgccagagaagaatgtcaagacatttaaagatgtcaaaggttgtgatgatgcaaaaaaggaacttgaggaagtagttgagtatctcaagaacccttcaaagttcactcgccttggtggaaagctacctaagggcatacttttgactggtgctccaggaactgggaagacactactagcaaaggccattgctggagaagctggcgtaccattcttttaccgagcaggttctgaatttgaggaaatgtttgttggtgttggtgctcggagagtgaggtcattgtttcaagctgcaaagaagaaggcaccatgcattgttttcattgatgaaatagatgctgtgggatcaactaggaaacagtgggaagggcacacaaagaagacattgcatcaacttcttgttgagatggatgggtttgaacaaaatgagggaataattgtgatggctgcaacaaacttgccagacattcttgatcctgcactcacaagacctggtagatttgataggcatattgttgtcccaagtccagatgtgcggggtcgccaagagattctggagctctatttgcaagataagccagtggcaaatgatgtagatatcaatgcaattgcccgaagtacaccaggctttaatggggctgacctagccaaccttgtaaacattgcagcgataaaggctgcggttgaaggtgcggataaattgaatgctgttcagttggagtttgccaaagatcgtattatcatgggaaccgagaggagatcaatgttcatatctgatgaatcgagaaagcttactgcctaccatgaaagtggacatgctattgttgcactcaacacccagggtgctcaccccatacacaaggcaactatccttcctcgtgggtctgcccttggaatggtcacacaactcccctcacaggatgagacctctattagcaagaaacaactccttgcacgtcttgatgtttgcatgggtgggagggttgctgaagagctgatctttggggaagacaatgttacaactggggcaagaaatgaccttcacactgcaacggagcttgcccagtacatggtatcgaactgtgggatgagtgatgctatcggtcctgtgcatgtgaaagaacgaccaagcatagagatgcaatcaaggatagatgctgaggtggtgaagctcctaagagaggcttatgggcgggtcaagcgattgcttaggaagcatgagaagcaattacatgctctagcaaatgcgctgctggagcgtgaaacgcttactgcagatgagatcaacaaagtagttcacccttaccaagaagagccccatctttccttccaagacgaggagtttgccctcgcttaaagattcttttgttgcatcaagatatcggtcaccacccgtgaattgtaaatccgtgtacagtaagtggcgcctagatgagccatggaagttccttcagatgccctcttctgtaaaacagcgcgaaacacctatggtaaattagaagattggtgttgcgaaagctgatgcctgcttattgacaattctttggatggaaggcttcccgggaaggctctgggtttgcaaaaccctctcatacttttggtttagttaggatagatgtaggtttaacactgcatgttctgattgctaggtttctggctagggcaacatgttgatcatgttcttttcacttttttattgacattttctgtaaggaaatcgtacatgtaacgattgttttatttgtcaaacaagcactgtttgtttttgtcaaacagtatacggttaatgtattcgtgttgctaacgtcg

SEQ ID NO: 77324 - DNA, 3150 bp, Zea Mays
aacacagcccagctctccgacaccggccaggcgagtggagtcgtcatagcattcgagagccagccgtccgttgccaacgcccaacggtctgagtgaatcctgccgatcgcgaacgccgccgcgtcgtcgtcctccgtcgccccgcctcggcttccaccgtcagcggccgcgctcgcgataaggctactcgtgtcctgtccactaaaaccaagacccaccgcctccagagttaaagggaaaagaaaaaggggaagaagcccctcgctccaagtcacgcgcctcccgcctcgccggcgccgcccgcccgcccgcctcgcccgccatgagcgcgctccaggcctccctcctcctccgcccgctcttttcgccactgcccccacgccgccggcagctgctctcctccgcctccttctctttcccccgcggcgcccacgcgccccgcctccgcgcattggtccccggcgcgccgcagcccgacgccgccgagccgcccgcgattgcatcctcggcggcggcggcggcggcggcggaggctgagccggaggcggagcccacgacggcggcagctcagcccgtcgcgatgagcgcgaaggaggggctggaggacatggtggacaaggctagggcctgggccgtggcggtcgcggccgcggtgttagccgcggccaggaggttcgtcgactgggtgctgtcgagggactggatgggctggtggcctttctggagatccgagcaccggctgcagcgcttgatcgacgaggcggacgccaaccccaacgacgcggccaagcagagcgcgctcctgcacgagctcaacaagttaagccctgaagatgtcattaaaaggtttgaggagcgaagccatgctgtggatagcaggggggctgcagagtacctgcgggcacttattctcactaacactatagcagattaccttccagatgaacaatctgggaggtctgcaagcctgccagccctgttgcaagagttgaaacaacgtgtatctgggaatgaggacaaacctttcatgaaccctgggatatcagaaaagcaacctttacatgttgtaatggtagatcaacacgttttgctcaagaaatcttctcaacgatcttgtttacaattgctgttggcgtaatgtgggtgatgggtgctgctgcacttcaaaaatatattgggagcttaggtggaattggggcatctggtgctggttctagctcatcatattctccaaaagagatgaataaggatatgatgccagagaagaatgtcaagacatttaaagatgtcaaaggttgtgatgatgcaaaaaaggaacttgaggaagtagttgagtatctcaagaacccttcaaagttcactcgccttggtggaaagctacctaagggcatacttttgactggtgctccaggaactgggaagacactactagcaaaggccattgctggagaagctggcgtaccattcttttaccgagcaggttctgaatttgaggaaatgtttgttggtgttggtgctcggagagtgaggtcattgtttcaagctgcaaagaagaaggcaccatgcattgttttcattgatgaaatagatgctgtgggatcaactaggaaacagtgggaagggcacacaaagaagacattgcatcaacttcttgttgagatggatgggtttgaacaaaatgaggcaatgctagtctatcatgtgatcgaatagaccaatgtactcagaactttatctgactcttgcttccaattgatcttttatctcacagggaataattgtgatggctgcaacaaacttgccagacattcttgatcctgcactcacaagacctggtagatttgataggcatattgttgtcccaagtccagatgtgcggggtcgccaagagattctggagctctatttgcaagataagccagtggcaaatgatgtagatatcaatgcaattgcccgaagtacaccaggctttaatggggctgacctagccaaccttgtaaacattgcagcgataaaggctgcggttgaaggtgcggataaattgaatgctgttcagttggagtttgccaaagatcgtattatcatgggaaccgagaggagatcaatgttcatatctgatgaatcgagaaagcttactgcctaccatgaaagtggacatgctattgttgcactcaacacccagggtgctcaccccatacacaaggcaactatccttcctcgtgggtctgcccttggaatggtcacacaactcccctcacaggatgagacctctattagcaagaaacaactccttgcacgtcttgatgtttgcatgggtgggagggttgctgaagagctgatctttggggaagacaatgttacaactggggcaagaaatgaccttcacactgcaacggagcttgcccagtacatggtatcgaactgtgggatgagtgatgctatcggtcctgtgcatgtgaaagaacgaccaagcatagagatgcaatcaaggatagatgctgaggtggtgaagctcctaagagaggcttatgggcgggtcaagcgattgcttaggaagcatgagaagcaattacatgctctagcaaatgcgctgctggagcgtgaaacgcttactgcagatgagatcaacaaagtagttcacccttaccaagaagagccccatctttccttccaagacgaggagtttgccctcgcttaaagattcttttgttgcatcaagatatcggtcaccacccgtgaattgtaaatccgtgtacagtaagtggcgcctagatgagccatggaagttccttcagatgccctcttctgtaaaacagcgcgaaacacctatggtaaattagaagattggtgttgcgaaagctgatgcctgcttattgacaattctttggatggaaggcttcccgggaaggctctgggtttgcaaaaccctctcatacttttggtttagttaggatagatgtaggtttaacactgcatgttctgattgctaggtttctggctagggcaacatgttgatcatgttcttttcacttttttattgacattttctgtaaggaaatcgtacatgtaacgattgttttatttgtcaaacaagcactgtttgtttttgtcaaacagtatacggttaatgtattcgtgttgctaacgtcg

SEQ ID NO: 77325 - DNA, 553 bp, Zea Mays
ctccaatcaagcgcccagggttgcaatcaagcgtcggctgcaagtttggagttcacgaattgtctggcatggattcaagaatacaagaactgcctgccaagtgttatttctttgtggtctatgattcacaaaaaaaaatcatctgctttgttagacttctctatagtttggaggggccattggtgcaatcaactactaattcagaaaggcaatatgatactgaaaagaatgcaaatcttatatatgacaaagactacacaagtgcacaggctgccatatctggtactggtagttcagacatgatcatgtaaattcatttgttaaaacaatgttgctgcagaatggtaactgaagtaccatgtaacgtagctcttgatcatccagcacgccataaatagcccatcttgaccaggactcgagcacaataccgtcatagcccttatccctattaactggcagacagaagtcaggccatcataaagcatatgtttatctggaatgagactgtgcatgaatttacctgcattcactcactattatatcaatagctttt

SEQ ID NO: 77326 - DNA, 1083 bp, Zea Mays
cgcagacactgccgccgctcccagagtttactctctactcctactctgctctctctctctctctctctctctctctctctctctctctctctctcatggcgtactcctcgagctgcgggacgaaaccctaatggagaaccggagccgccgccacgcccccgcgccgcagcgagctccgtctcaaggtacgactaccatgctggtttttggggtgtcatgggacgggaatgtattggcattgtccctccatttattagagaatttaattatccgatggccaaaaattgtgccggtggggatacaggtgtttttgtcaatggcagagaactgcatcaaagagatttagatttacttgtaggaagaggactaccacggacatctggcatgtcatattctattgagatgtcaggcaatgtaatcgatgaagcaactgggaaaaaactgcgcagtcttggaaaacttgctcctacgattgagaagttgaagcgtggttttggcatgcacgtccctgaagagttcagataagctggttctagtgctgaatattggctttgccaattatccactccacaaggctgaccatggggtgccaaaccaacgatttctgcgattgtgatgttaaatcctgcgattgtgataaatcgcaggtttctctgaattggactggggctctgcgagccaagataatgtggtccagtgacttaaccaccgattatagtatccctcctgctaatttcatcacttcaatggaagcgacgtttgctagtgactctagcctgccaggcagttcttaacttcactgctctgcctgtacatgttatattcctcaaatgtgtcgtctttatcagtacattgccccatcacaggcacagacatactgttagatgtatgagcaattgtcggcttgtaatttattggtagagctatgcttcccctaacatttatatgtatatatgtgctcatgattcttgaaactctggccgatatgattggctttcggctctcctgaaccctgttagagtcccattttgaagcctgaaacgcccctggccaccatactgtattgtgtatccaagcctgatg

SEQ ID NO: 77327 - DNA, 3131 bp, Zea Mays
cgcagacactgccgccgctcccagagtttactctctactcctactctgctctctctctctctctctctctctctctctctctctctctctctctcatggcgtactcctcgagctgcgggacgaaaccctaatggagaaccggagccgccgccacgcccccgcgccgcagcgagctccgtctcaaggataacgccagtgcttgccgatccggtgggagaaagcgggagcgcggagcggcctcgccgcccccgccatggggagtgatctcaaggagatgaagtacaggcggaggatcggggcggaggagcggccgcaatgcagcgaccggaggggcggcgcgggctgggccgcgctgcagcaggaccccgtcgagctgctgcgcaagctggacgagctgagggaccagatcgcgcgctcctgcaacgtcgtcgcccagcggcgggagccccgcagggccagccgccgcgcggtctccatgctccccgccgagcatctggaggagccaccgcctctgccggggtaccaccgctcccgccatggcgggcggtttgggccgggcttgccgcctccaggcccatacgcaccgccgcgccctgaacatggggaaaggtatgtgaggcagtctagcgggcactaccgccagtaccctgggaggcagtgggagaacggtgggatggggcctgggagcttccatcactacgggtgtgcctgtccacactgtctgcatgggcagaggacttcgccgcaagaggagaacatcccgatggcgaggtacttcgccaggcagcatgaatcgtaccggttcgagaggtcaccatctgtttcatccgattatgatcggaggtctgtggcgtcatcactttactcgcaccggtctgtatcgaagaggagagcagagtacttcaggaagaaggcggaacatatctgccgtccagtggatggtgctgcacctttctctgtgtgcagttcatgttataaactactgcagatgcctacagaaaaatgcatagggcggaagcagaaccgatttcaatgcgggtcttgttgtcagatagttagtctgaagcatgatgaagaaaatggtattccctttgcaccgtcattatccttatatgcgcctgaaacagagcaaagctcaagtgaccagatgaggcgagatactgtccatcaacatcatgaggattttaattctatgttctacaattcaaatgatcatagcaacatgcaaaacaacatggattccactgatgataattcactttcttcgaccatgagtaatgacaggattggcaaagattgtggttcaactagaagcattcagtcaaaagctgaggatctccctttctctccaagtaggtctgtagacaatggaagcccaaaggatatattgtgcgagagggacacagactgcaaggtggagccttctgtaggtggtccagttagcccacggtctccagctttagaggacaaacttgttgacccattgtgtgcccaagaaaaatgtaacgacgaggatgatcaaggcatggccatggcttacaaatcagacctaacttgcaaaggagaatatgatgttaatgatcagtatgatgggggcattagtacaagaagcaaacaggagagcaatgaagatgacaaagatgccactgaagatgaaatctcatgcagaagttatgaacagaagagcaaggaagataactcatgcaacattgaagatagtagcaaaacatatgagcagaatagtggagaagatgacactagtagtctagtaaatggaagtgaaaagtaccagtgtatgaatattaaagatgaagatagcagccccggaggcgaggacacatgcaataaatatgagtcaaaggtaaaaagagatgaaaattatgttcttggagctgagagcattagaaaaaactgtgatgaaaataatgcagatgtcatggaaactggaagcataagtgagagacatgatgggctgaaaatcgaagaagataatgagaaattgcagcagccatttattgaagatgccaattctcaaacagggagtggttcatcagttaatgagcggacaaattctgggttttctcgtggttcatcagaggctgggttggatgaagatcagtcctctaccgtccatggacaatgttaaggtttcaattaatggtcatccaatctctgaaaaagcccttaagaaggcagagaagaaagctggtcctgttgacccaggtacatattggtacgactaccatgctggtttttggggtgtcatgggacgggaatgtattggcattgtccctccatttattagagaatttaattatccgatggccaaaaattgtgccggtggggatacaggtgtttttgtcaatggcagagaactgcatcaaagagatttagatttacttgtaggaagaggactaccacggacatctggcatgtcatattctattgagatgtcaggcaatgtaatcgatgaagcaactgggaaaaaactgcgcagtcttggaaaacttgctcctacgattgagaagttgaagcgtggttttggcatgcacgtccctgaagagttcagataagctggttctagtgctgaatattggctttgccaattatccactccacaaggctgaccatggggtgccaaaccaacgatttctgcgattgtgatgttaaatcctgcgattgtgataaatcgcaggtttctctgaattggactggggctctgcgagccaagataatgtggtccagtgacttaaccaccgattatagtatccctcctgctaatttcatcacttcaatggaagcgacgtttgctagtgactctagcctgccaggcagttcttaacttcactgctctgcctgtacatgttatattcctcaaatgtgtcgtctttatcagtacattgccccatcacaggcacagacatactgttagatgtatgagcaattgtcggcttgtaatttattggtagagctatgcttcccctaacatttatatgtatatatgtgctcatgattcttgaaactctggccgatatgattggctttcggctctcctgaaccctgttagagtcccattttgaagcctgaaacgcccctggccaccatactgtattgtgtatccaagcctgatg

SEQ ID NO: 77328 - DNA, 3113 bp, Zea Mays
cgcagacactgccgccgctcccagagtttactctctactcctactctgctctctctctctctctctctctctctctctctctctctctctctctcatggcgtactcctcgagctgcgggacgaaaccctaatggagaaccggagccgccgccacgcccccgcgccgcagcgagctccgtctcaaggataacgccagtgcttgccgatccggtgggagaaagcgggagcgcggagcggcctcgccgcccccgccatggggagtgatctcaaggagatgaagtacaggcggaggatcggggcggaggagcggccgcaatgcagcgaccggaggggcggcgcgggctgggccgcgctgcagcaggaccccgtcgagctgctgcgcaagctggacgagctgagggaccagatcgcgcgctcctgcaacgtcgtcgcccagcggcgggagccccgcagggccagccgccgcgcggtctccatgctccccgccgagcatctggaggagccaccgcctctgccggggtaccaccgctcccgccatggcgggcggtttgggccgggcttgccgcctccaggcccatacgcaccgccgcgccctgaacatggggaaaggtatgtgaggcagtctagcgggcactaccgccagtaccctgggaggcagtgggagaacggtgggatggggcctgggagcttccatcactacgggtgtgcctgtccacactgtctgcatgggcagaggacttcgccgcaagaggagaacatcccgatggcgaggtacttcgccaggcagcatgaatcgtaccggttcgagaggtcaccatctgtttcatccgattatgatcggaggtctgtggcgtcatcactttactcgcaccggtctgtatcgaagaggagagcagagtacttcaggaagaaggcggaacatatctgccgtccagtggatggtgctgcacctttctctgtgtgcagttcatgttataaactactgcagatgcctacagaaaaatgcatagggcggaagcagaaccgatttcaatgcgggtcttgttgtcagatagttagtctgaagcatgatgaagaaaatggtattccctttgcaccgtcattatccttatatgcgcctgaaacagagcaaagctcaagtgaccagatgaggcgagatactgtccatcaacatcatgaggattttaattctatgttctacaattcaaatgatcatagcaacatgcaaaacaacatggattccactgatgataattcactttcttcgaccatgagtaatgacaggattggcaaagattgtggttcaactagaagcattcagtcaaaagctgaggatctccctttctctccaagtaggtctgtagacaatggaagcccaaaggatatattgtgcgagagggacacagactgcaaggtggagccttctgtaggtggtccagttagcccacggtctccagctttagaggacaaacttgttgacccattgtgtgcccaagaaaaatgtaacgacgaggatgatcaaggcatggccatggcttacaaatcagacctaacttgcaaaggagaatatgatgttaatgatcagtatgatgggggcattagtacaagaagcaaacaggagagcaatgaagatgacaaagatgccactgaagatgaaatctcatgcagaagttatgaacagaagagcaaggaagataactcatgcaacattgaagatagtagcaaaacatatgagcagaatagtggagaagatgacactagtagtctagtaaatggaagtgaaaagtaccagtgtatgaatattaaagatgaagatagcagccccggaggcgaggacacatgcaataaatatgagtcaaaggtaaaaagagatgaaaattatgttcttggagctgagagcattagaaaaaactgtgatgaaaataatgcagatgtcatggaaactggaagcataagtgagagacatgatgggctgaaaatcgaagaagataatgagaaattgcagcagccatttattgaagatgccaattctcaaacagggagtggttcatcagttaatgagcggacaaattctgggttttctcgtggttcatcagaggctgggttggatgaagatcagtcctctaccggtttcaattaatggtcatccaatctctgaaaaagcccttaagaaggcagagaagaaagctggtcctgttgacccaggtacatattggtacgactaccatgctggtttttggggtgtcatgggacgggaatgtattggcattgtccctccatttattagagaatttaattatccgatggccaaaaattgtgccggtggggatacaggtgtttttgtcaatggcagagaactgcatcaaagagatttagatttacttgtaggaagaggactaccacggacatctggcatgtcatattctattgagatgtcaggcaatgtaatcgatgaagcaactgggaaaaaactgcgcagtcttggaaaacttgctcctacgattgagaagttgaagcgtggttttggcatgcacgtccctgaagagttcagataagctggttctagtgctgaatattggctttgccaattatccactccacaaggctgaccatggggtgccaaaccaacgatttctgcgattgtgatgttaaatcctgcgattgtgataaatcgcaggtttctctgaattggactggggctctgcgagccaagataatgtggtccagtgacttaaccaccgattatagtatccctcctgctaatttcatcacttcaatggaagcgacgtttgctagtgactctagcctgccaggcagttcttaacttcactgctctgcctgtacatgttatattcctcaaatgtgtcgtctttatcagtacattgccccatcacaggcacagacatactgttagatgtatgagcaattgtcggcttgtaatttattggtagagctatgcttcccctaacatttatatgtatatatgtgctcatgattcttgaaactctggccgatatgattggctttcggctctcctgaaccctgttagagtcccattttgaagcctgaaacgcccctggccaccatactgtattgtgtatccaagcctgatg

SEQ ID NO: 77329 - DNA, 3133 bp, Zea Mays
cgcagctatataaaaatgttctttcacttggctccctcgtcgtgtccgtggcaacgcagacactgccgccgctcccagagtttactctctactcctactctgctctctctctctctctctctctctctctctctctctctctctctctcatggcgtactcctcgagctgcgggacgaaaccctaatggagaaccggagccgccgccacgcccccgcgccgcagcgagctccgtctcaaggataacgccagtgcttgccgatccggtgggagaaagcgggagcgcggagcggcctcgccgcccccgccatggggagtgatctcaaggagatgaagtacaggcggaggatcggggcggaggagcggccgcaatgcagcgaccggaggggcggcgcgggctgggccgcgctgcagcaggaccccgtcgagctgctgcgcaagctggacgagctgagggaccagatcgcgcgctcctgcaacgtcgtcgcccagcggcgggagccccgcagggccagccgccgcgcggtctccatgctccccgccgagcatctggaggagccaccgcctctgccggggtaccaccgctcccgccatggcgggcggtttgggccgggcttgccgcctccaggcccatacgcaccgccgcgccctgaacatggggaaaggtatgtgaggcagtctagcgggcactaccgccagtaccctgggaggcagtgggagaacggtgggatggggcctgggagcttccatcactacgggtgtgcctgtccacactgtctgcatgggcagaggacttcgccgcaagaggagaacatcccgatggcgaggtacttcgccaggcagcatgaatcgtaccggttcgagaggtcaccatctgtttcatccgattatgatcggaggtctgtggcgtcatcactttactcgcaccggtctgtatcgaagaggagagcagagtacttcaggaagaaggcggaacatatctgccgtccagtggatggtgctgcacctttctctgtgtgcagttcatgttataaactactgcagatgcctacagaaaaatgcatagggcggaagcagaaccgatttcaatgcgggtcttgttgtcagatagttagtctgaagcatgatgaagaaaatggtattccctttgcaccgtcattatccttatatgcgcctgaaacagagcaaagctcaagtgaccagatgaggcgagatactgtccatcaacatcatgaggattttaattctatgttctacaattcaaatgatcatagcaacatgcaaaacaacatggattccactgatgataattcactttcttcgaccatgagtaatgacaggattggcaaagattgtggttcaactagaagcattcagtcaaaagctgaggatctccctttctctccaagtaggtctgtagacaatggaagcccaaaggatatattgtgcgagagggacacagactgcaaggtggagccttctgtaggtggtccagttagcccacggtctccagctttagaggacaaacttgttgacccattgtgtgcccaagaaaaatgtaacgacgaggatgatcaaggcatggccatggcttacaaatcagacctaacttgcaaaggagaatatgatgttaatgatcagtatgatgggggcattagtacaagaagcaaacaggagagcaatgaagatgacaaagatgccactgaagatgaaatctcatgcagaagttatgaacagaagagcaaggaagataactcatgcaacattgaagatagtagcaaaacatatgagcagaatagtggagaagatgacactagtagtctagtaaatggaagtgaaaagtaccagtgtatgaatattaaagatgaagatagcagccccggaggcgaggacacatgcaataaatatgagtcaaaggtaaaaagagatgaaaattatgttcttggagctgagagcattagaaaaaactgtgatgaaaataatgcagatgtcatggaaactggaagcataagtgagagacatgatgggctgaaaatcgaagaagataatgagaaattgcagcagccatttattgaagatgccaattctcaaacagggagtggttcatcagttaatgagcggacaaattctgggttttctcgtggttcatcagaggctgggttggatgaagatcagtcctctaccgcccttaagaaggcagagaagaaagctggtcctgttgacccaggtacatattggtacgactaccatgctggtttttggggtgtcatgggacgggaatgtattggcattgtccctccatttattagagaatttaattatccgatggccaaaaattgtgccggtggggatacaggtgtttttgtcaatggcagagaactgcatcaaagagatttagatttacttgtaggaagaggactaccacggacatctggcatgtcatattctattgagatgtcaggcaatgtaatcgatgaagcaactgggaaaaaactgcgcagtcttggaaaacttgctcctacgattgagaagttgaagcgtggttttggcatgcacgtccctgaagagttcagataagctggttctagtgctgaatattggctttgccaattatccactccacaaggctgaccatggggtgccaaaccaacgatttctgcgattgtgatgttaaatcctgcgattgtgataaatcgcaggtttctctgaattggactggggctctgcgagccaagataatgtggtccagtgacttaaccaccgattatagtatccctcctgctaatttcatcacttcaatggaagcgacgtttgctagtgactctagcctgccaggcagttcttaacttcactgctctgcctgtacatgttatattcctcaaatgtgtcgtctttatcagtacattgccccatcacaggcacagacatactgttagatgtatgagcaattgtcggcttgtaatttattggtagagctatgcttcccctaacatttatatgtatatatgtgctcatgattcttgaaactctggccgatatgattggctttcggctctcctgaaccctgttagagtcccattttgaagcctgaaacgcccctggccaccatactgtattgtgtatccaagcctgatg

SEQ ID NO: 77330 - DNA, 2218 bp, Zea Mays
gtccccacgcacgcagcaagcacacccggttagcgtccactaatccgcgaaagcttgactgctccaccacgggtcaccggacatccggcttcctcgccccgtcccccgcacgcaggccgccccttaggctcctttgtcattcgaccttcctcttaagcacagcacaagcagctacaaggttctgacctacaagttccaatgacaatctgcagtagtgaagaaatcattgatgagtttgagttgctaacgcgtgatgctaggcgcgtgcagcaggatacactgagaaagattcttgaactgaatggtgatgccgaatatctgaatcgcttcaatcttggaaggagaacagactcaaagagctttaaatcctgcattcctctatgtgtgcatagtgacatagagtcctacatccagaggatagcggatggagatgactcgccggtgctaactgggaagcccatcacttccctctccttaagttctggtacgacgcaggggaaacccaagtttttgccattcaacgatgaattgcttgagagtacatttcaaatattccgaacctcatatgcctttagaaatcgtgaatatcctattgtcaatggaaaagccctgcagtttgtttacggtagcaagcaagtctttacccaagggggcattcttgcggcgactgcgacgacaaatctgtacaggagtcaacgtttcaaggaagcgatgaaggacgtcatgactcagtgctgcagtcctgatgaagtcatctttggtcctgacttccatcagtctttgtactgccatctattgtgtgggttaatcaactcagacgaagtccagtttgttttctcaccgtttgcgcacagcctcgtccatgcatttcacagtctcgaggaggtatgggaagatctgtgtgctgacataagagatggtgttctctcaaagagagtcaccgcgccatctatccgccaagctgtttcgaagatcttgaggccgaatcctgagctggctagctccatttacatcaagtgccagagcttgagcaattggtatggggtgatcccaacactgtggccaaacgtgaagtacatctatggcattatgacggggtccatggagccatacctgaagaaattgagacactatgctggtcacttgccgctgctgagtgctgattatggtgcatctgaaggatgggtcggctctaatataaacccaaccctgccacctgaggagagtcggagcctgtaggcctaactgaggttgaggttggcaaaatctacgaagttgtaataacaaattttgcaggtctataccgatacagactgggagatattgtgaagatagcaggcttccacaacgcaacaccagagctccagttcatctgccggagaagcctagtcctcagcgtcaacatcgacaagaacacagagaaagatctgcagctggccgtggaagccgcggagaagctcttggccgcggagaagctggaggtggtggacttcacgagcctcgtggacaggtcgagcgagccagggcactacgtcatcttctgggagctgagctccgacgacggcgccagcgaagacgtcctgagcggctgcgcgagctgcatggacctggccttcgcggacgcggggtacgtcgggtcgaggaagacccagaccatcggcgccctcgagctccgggtcctccggaagggagccttcgcgcaggtcatgaaccactacctgagcctcggcggcgccgtcagccagttcaagacgccgcggttcgtgagccagtccaacagcaaggtgctgcagatactgagccggaacgtcacccggagctacttcagcactgcgtatgggctctgatcgacgatgctacggcgctacgcaccaagtactggtaataggctggaagtatagtgatcgagagtgcatggcgcacgacgacgatccatcatgctgggagcctgggagttgcacgacgactgacagatgtatcatataattgtcagtgtaaatatagctgttcgacagtgtatgtaggcgaaggttgctgcgttccgtttagcagccgtgtcatcgctcaagaaaactcagaaagatcacatgtgttctgatttctgaatcaaaaagctgtgtacaagaagcagcgaactcactcgatcatattccgcgcgctacagccttcgcatatcagaaataccgccaaaagtttccatgtgctttacatacaaatc

SEQ ID NO: 77331 - DNA, 2235 bp, Zea Mays
gttcaagtccagcttgggagagttgggagtgagcggctgccgccaggccggggcggctataaaagcagcggcaagctcctcgaggcctcgtccccacgcacgcagcaagcacacccggttagcgtccactaatccgcgaaagcttgactgctccaccacgggtcaccggacatccggcttcctcgccccgtcccccgcacgcaggccgccccttaggctcctttgtcattcgaccttcctcttaagcacagcacaagcagctacaaggttctgacctacaagttccaatgacaatctgcagtagtgaagaaatcattgatgagtttgagttgctaacgcgtgatgctaggcgcgtgcagcaggatacactgagaaagattcttgaactgaatggtgatgccgaatatctgaatcgcttcaatcttggaaggagaacagactcaaagagctttaaatcctgcattcctctatgtgtgcatagtgacatagagtcctacatccagaggatagcggatggagatgactcgccggtgctaactgggaagcccatcacttccctctccttaagttctggtacgacgcaggggaaacccaagtttttgccattcaacgatgaattgcttgagagtacatttcaaatattccgaacctcatatgcctttagaaatcgtgaatatcctattgtcaatggaaaagccctgcagtttgtttacggtagcaagcaagtctttacccaagggggcattcttgcggcgactgcgacgacaaatctgtacaggagtcaacgtttcaaggaagcgatgaaggacgtcatgactcagtgctgcagtcctgatgaagtcatctttggtcctgacttccatcagtctttgtactgccatctattgtgtgggttaatcaactcagacgaagtccagtttgttttctcaccgtttgcgcacagcctcgtccatgcatttcacagtctcgaggaggtatgggaagatctgtgtgctgacataagagatggtgttctctcaaagagagtcaccgcgccatctatccgccaagctgtttcgaagatcttgaggccgaatcctgagctggctagctccatttacatcaagtgccagagcttgagcaattggtatggggtgatcccaacactgtggccaaacgtgaagtacatctatggcattatgacggggtccatggagccatacctgaagaaattgagacactatgctggtcacttgccgctgctgagtgctgattatggtgcatctgaaggatgggtcggctctaatataaacccaaccctgccacctgaggaggtctataccgatacagactgggagatattgtgaagatagcaggcttccacaacgcaacaccagagctccagttcatctgccggagaagcctagtcctcagcgtcaacatcgacaagaacacagagaaagatctgcagctggccgtggaagccgcggagaagctcttggccgcggagaagctggaggtggtggacttcacgagcctcgtggacaggtcgagcgagccagggcactacgtcatcttctgggagctgagctccgacgacggcgccagcgaagacgtcctgagcggctgcgcgagctgcatggacctggccttcgcggacgcggggtacgtcgggtcgaggaagacccagaccatcggcgccctcgagctccgggtcctccggaagggagccttcgcgcaggtcatgaaccactacctgagcctcggcggcgccgtcagccagttcaagacgccgcggttcgtgagccagtccaacagcaaggtgctgcagatactgagccggaacgtcacccggagctacttcagcactgcgtatgggctctgatcgacgatgctacggcgctacgcaccaagtactggtaataggctggaagtatagtgatcgagagtgcatggcgcacgacgacgatccatcatgctgggagcctgggagttgcacgacgactgacagatgtatcatataattgtcagtgtaaatatagctgttcgacagtgtatgtaggcgaaggttgctgcgttccgtttagcagccgtgtcatcgctcaagaaaactcagaaagatcacatgtgttctgatttctgaatcaaaaagctgtgtacaagaagcagcgaactcactcgatcatattccgcgcgctacagccttcgcatatcagaaataccgccaaaagtttccatgtgctttacatacaaatc

SEQ ID NO: 77332 - DNA, 513 bp, Zea Mays
gattaatctgccccacgcggcctggttctacagcgaagccagcaccatggtccgcgtcgacgacctcaccggcaacaatactgcaacaaggagctgtcgttcagccattgccaagccgagagcagaagcagaagagaaactgagaagaacccagcttagatcagactgaagaactagatgcggtggacgccttcaagacctgctgacatgagggctgctagtcagagctgctgtttttggcctgttctttgacatgagggtacccaaaaactctagttgctcgtgggtgtcaactttttattatatgttgttatgtttgtgcaaaatcaactgaaatgtgaagtcaagtggtgatgctgtgaactgagtttagtgttgtccacttagtttgtatgatcactggaatactagttgtattcatctacggaatatggaattgtgtgctcattcctctgttctagtatcttttgcaattttcaataaaattattctctgcacatctgtgaccaaact

SEQ ID NO: 77333 - DNA, 592 bp, Zea Mays
tcgttagctcagggattaatctgccccacgcggcctgggtggggacttacttcctgcggaactactacaacctgctgcaacaaacccccgatgtcgtccaccagttctacagcgaagccagcaccatggtccgcgtcgacgacctcaccggcaacaatactgcaacaaggagctgtcgttcagccattgccaagccgagagcagaagcagaagagaaactgagaagaacccagcttagatcagactgaagaactagatgcggtggacgccttcaagacctgctgacatgagggctgctagtcagagctgctgtttttggcctgttctttgacatgagggtacccaaaaactctagttgctcgtgggtgtcaactttttattatatgttgttatgtttgtgcaaaatcaactgaaatgtgaagtcaagtggtgatgctgtgaactgagtttagtgttgtccacttagtttgtatgatcactggaatactagttgtattcatctacggaatatggaattgtgtgctcattcctctgttctagtatcttttgcaattttcaataaaattattctctgcacatctgtgaccaaact

SEQ ID NO: 77334 - DNA, 687 bp, Zea Mays
ttcgtcttcagatctagggttctctcgtgctctgttctcatcttctgctcgctggtgtcccctctctctcacccatggcttcggcggcggcggcaactcaggtggggacttacttcctgcggaactactacaacctgctgcaacaaacccccgatgtcgtccaccagttctacagcgaagccagcaccatggtccgcgtcgacgacctcaccggcaacaatactgcaacaaggagctgtcgttcagccattgccaagccgagagcaggtgatggcgctggcaccttgctcgaattgatgaagcagaagagaaactgagaagaacccagcttagatcagactgaagaactagatgcggtggacgccttcaagacctgctgacatgagggctgctagtcagagctgctgtttttggcctgttctttgacatgagggtacccaaaaactctagttgctcgtgggtgtcaactttttattatatgttgttatgtttgtgcaaaatcaactgaaatgtgaagtcaagtggtgatgctgtgaactgagtttagtgttgtccacttagtttgtatgatcactggaatactagttgtattcatctacggaatatggaattgtgtgctcattcctctgttctagtatcttttgcaattttcaataaaattattctctgcacatctgtgaccaaact

SEQ ID NO: 77335 - DNA, 707 bp, Zea Mays
ttcgtcttcagatctagggttctctcgtgctctgttctcatcttctgctcgctggtgtcccctctctctcacccatggcttcggcggcggcggcaactcaggtggggacttacttcctgcggaactactacaacctgctgcaacaaacccccgatgtcgtccaccagttctacagcgaagccagcaccatggtccgcgtcgacgacctcaccggcaacaatactgcaacaaggagctgtcgttcagccattgccaagccgagagcaggtgatggcgctggcaccttgctcgaattgatggtgatgcacgacctgccttgaagcagaagagaaactgagaagaacccagcttagatcagactgaagaactagatgcggtggacgccttcaagacctgctgacatgagggctgctagtcagagctgctgtttttggcctgttctttgacatgagggtacccaaaaactctagttgctcgtgggtgtcaactttttattatatgttgttatgtttgtgcaaaatcaactgaaatgtgaagtcaagtggtgatgctgtgaactgagtttagtgttgtccacttagtttgtatgatcactggaatactagttgtattcatctacggaatatggaattgtgtgctcattcctctgttctagtatcttttgcaattttcaataaaattattctctgcacatctgtgaccaaact

SEQ ID NO: 77336 - DNA, 709 bp, Zea Mays
ttcgtcttcagatctagggttctctcgtgctctgttctcatcttctgctcgctggtgtcccctctctctcacccatggcttcggcggcggcggcaactcaggtggggacttacttcctgcggaactactacaacctgctgcaacaaacccccgatgtcgtccaccagttctacagcgaagccagcaccatggtccgcgtcgacgacctcaccggcaacaatactgcaacaaggagctgtcgttcagccattgccaagccgagagcaggtgatggcgctggcaccttgctcgaattgatggtgatgcacgacctgccttggtaagcagaagagaaactgagaagaacccagcttagatcagactgaagaactagatgcggtggacgccttcaagacctgctgacatgagggctgctagtcagagctgctgtttttggcctgttctttgacatgagggtacccaaaaactctagttgctcgtgggtgtcaactttttattatatgttgttatgtttgtgcaaaatcaactgaaatgtgaagtcaagtggtgatgctgtgaactgagtttagtgttgtccacttagtttgtatgatcactggaatactagttgtattcatctacggaatatggaattgtgtgctcattcctctgttctagtatcttttgcaattttcaataaaattattctctgcacatctgtgaccaaact

SEQ ID NO: 77337 - DNA, 670 bp, Zea Mays
cggctatgggcctgtggctgctgcgtaacacagtggcatcgcagggtcagcagatcattagaaaacgacgtctcgccgttcttcgtcttcagatctagggttctctcgtgctctgttctcatcttctgctcgctggtgtcccctctctctcacccatggcttcggcggcggcggcaactcagttctacagcgaagccagcaccatggtccgcgtcgacgacctcaccggcaacaatactgcaacaaggagctgtcgttcagccattgccaagccgagagcagaagcagaagagaaactgagaagaacccagcttagatcagactgaagaactagatgcggtggacgccttcaagacctgctgacatgagggctgctagtcagagctgctgtttttggcctgttctttgacatgagggtacccaaaaactctagttgctcgtgggtgtcaactttttattatatgttgttatgtttgtgcaaaatcaactgaaatgtgaagtcaagtggtgatgctgtgaactgagtttagtgttgtccacttagtttgtatgatcactggaatactagttgtattcatctacggaatatggaattgtgtgctcattcctctgttctagtatcttttgcaattttcaataaaattattctctgcacatctgtgaccaaact

SEQ ID NO: 77338 - DNA, 762 bp, Zea Mays
atcgagtccctccactcttgatccgtcggctatgggcctgtggctgctgcgtaacacagtggcatcgcagggtcagcagatcattagaaaacgacgtctcgccgttcttcgtcttcagatctagggttctctcgtgctctgttctcatcttctgctcgctggtgtcccctctctctcacccatggcttcggcggcggcggcaactcaggtggggacttacttcctgcggaactactacaacctgctgcaacaaacccccgatgtcgtccaccagttctacagcgaagccagcaccatggtccgcgtcgacgacctcaccggcaacaatactgcaacaaggagctgtcgttcagccattgccaagccgagagcagaagcagaagagaaactgagaagaacccagcttagatcagactgaagaactagatgcggtggacgccttcaagacctgctgacatgagggctgctagtcagagctgctgtttttggcctgttctttgacatgagggtacccaaaaactctagttgctcgtgggtgtcaactttttattatatgttgttatgtttgtgcaaaatcaactgaaatgtgaagtcaagtggtgatgctgtgaactgagtttagtgttgtccacttagtttgtatgatcactggaatactagttgtattcatctacggaatatggaattgtgtgctcattcctctgttctagtatcttttgcaattttcaataaaattattctctgcacatctgtgaccaaact

SEQ ID NO: 77339 - DNA, 519 bp, Zea Mays
ctgaagctgcattgcgctgggatacaggtcaccgaacacctgcagaaagttcgaacgcgagcagcgagaaaaatcagaaagcacatggcgaaaagcccatccccagcccatacaaatcctccccaacgccacgccagcaatcctcagtactcaccatggcaagccgcggcttccgtgccccgagcctcgttacgggcgtcccgagctccgccaagctcttggcctcctccctccgctcactcgcccatttctccctcagcctggtcggctggaactgggacgccacgcccgcctcccacatgacgaggccgctgcggccctcaatcccgcctccgcctccgacgcgtccctctcccgcgcggcgcgaagggagcgtcagcctgggccgctcgaagacgcccaactccgggagaaacgcgacgaagacgatgacgacgaagaagaaggcggtggcgccgactatccactggagatagtccaccttctcggacagcaggaagcgcgcgagcctggatctcg

SEQ ID NO: 77340 - DNA, 1159 bp, Zea Mays
accccgaaggcccgaaacaagattagattagagatagcaaaaggcgaagcgacggtaaccgccaccaccaaatcgctaccgccaatccgccatgatgctcccgacggccaccgcgacggccgtcttcctcaccgcggcgccttcctctttctccacccgccgtcggcgcagtcgcgccatcttcgcatccctttcgccgtccttctcctcctcggaggagccgctgctggtgcgcgcggcgcggggcgaggacggcctcccacgcccgcccgcgtggatgatgcggcaggcagggcggtacatggcggagtaccaggcgctggccaagcgccacccctcgttccgggagcgctccgagaacacggacctcatcgtcgagatcacgctgcagccgtggcgtgccttcgcgcccgacggcgtcatcctgttctcggacatactcacgcccctgccggccatcggggtgccgttcgatatctcggactccaaggggcccgtgatccaatcgccagtacggtccaaagagcaggtgagggagctcgtccccatcgaccttgatatgctccagttcgtcggggagtcactaaagattctgcgaaatgagattgatggaaaagctgctttgctaggatttgtgggggccccatggacaattgcaacttacattgttgaaggggggatgaccaatacgtacacaaatataaagagcatgtgccatacagctccagatgtcttgaagggtcttctctctcaccttgcacaagccatatctgactatatcatttaccaagttaactcgggggcccagtgtatacagatatttgattcatggggtggacagcttccacctcatgtgtgggagcagtggtcaaaaccatatatcaaacagattgtgagtaggattaagaaagagtgccctaatgtaccccttgtgttgtatataaatggaaatggaggtttacttgagcgcatgaagaacacaggagctgatgttattgggcttgactggacagtggacatgactgatggaaggaggcgccttggtaatggcattagtgtacaagggaatgtggatccagcatttttgttctcaccattaccagtactgactgatgaaattcatagatacggtgcactgggcaagacactcatagaggct

SEQ ID NO: 77341 - DNA, 1618 bp, Zea Mays
accccgaaggcccgaaacaagattagattagagatagcaaaaggcgaagcgacggtaaccgccaccaccaaatcgctaccgccaatccgccatgatgctcccgacggccaccgcgacggccgtcttcctcaccgcggcgccttcctctttctccacccgccgtcggcgcagtcgcgccatcttcgcatccctttcgccgtccttctcctcctcgggtaaacccaattccctttcctttctcaccaccatttcgcttctaatctgaactacacgacgcgtgcccagaggagccgctgctggtgcgcgcggcgcggggcgaggacggcctcccacgcccgcccgcgtggatgatgcggcaggcagggcggtacatggcggagtaccaggcgctggccaagcgccacccctcgttccgggagcgctccgagaacacggacctcatcgtcgagatcacgctgcagccgtggcgtgccttcgcgcccgacggcgtcatcctgttctcggacatactcacgcccctgccggccatcggggtgccgttcgatatctcggactccaaggggcccgtgatccaatcgccagtacggtccaaagagcaggtgagggagctcgtccccatcgaccttgatatgctccagttcgtcggggagtcactaaagattctgcgaaatgaggatttgtgggggccccatggacaattgcaacttacattgttgaaggggggatgaccaatacgtacacaaatataaagagcatgtgccatacagctccagatgtcttgaagggtcttctctctcaccttgcacaagccatatctgactatatcatttaccaagttaactcgggggcccagtgtatacagatatttgattcatggggtggacagcttccacctcatgtgtgggagcagtggtcaaaaccatatatcaaacaggtttacttgagcgcatgaagaacacaggagctgatgttattgggcttgactggacagtggacatgactgatggaaggaggcgccttggtaatggcattagtgtacaagggaatgtggatccagcatttttgttctcaccattaccagtactgactgatgaaattcatagctggtccaaaaggtcatatacttaatctgggctgtacttcagaaaacacccgaagaagctgtagcacatttctttgatgtcacaaggcgcttgagatatgacacccttttccaaggttctgttgctgaagaattgcatcacgttgcttgacaacggcaatgacattcccatttttcatcaagtggtgtatttgatctgtcatatcatcttagagtcgtagtagattcctagtgttgcctgcattctacctttcaagagagactcattttcttaagcctgtatatgtattgcagagataccggcggcaaatctagtgcaattttattcattgtttgttcgttccattattcatctggctgaagaagggatgcatgatgaccctggtttggtttcaatgattaatgacaatataaattattatagttaatgtatgttttacagaaacaatgttacaataatgcaagatgattggattcatatggtatccatgcctttattaatagaatcaatggtcg

SEQ ID NO: 77342 - DNA, 2471 bp, Zea Mays
accccgaaggcccgaaacaagattagattagagatagcaaaaggcgaagcgacggtaaccgccaccaccaaatcgctaccgccaatccgccatgatgctcccgacggccaccgcgacggccgtcttcctcaccgcggcgccttcctctttctccacccgccgtcggcgcagtcgcgccatcttcgcatccctttcgccgtccttctcctcctcggaggagccgctgctggtgcgcgcggcgcggggcgaggacggcctcccacgcccgcccgcgtggatgatgcggcaggcagggcggtacatggcggagtaccaggcgctggccaagcgccacccctcgttccgggagcgctccgagaacacggacctcatcgtcgagatcacgctgcagccgtggcgtgccttcgcgcccgacggcgtcatcctgttctcggacatactcacgcccctgccggccatcggggtgccgttcgatatctcggactccaaggggcccgtgatccaatcgccagtacggtccaaagagcaggtgagggagctcgtccccatcgaccttgatatgctccagttcgtcggggagtcactaaagattctgcgaaatgagattgatggaaaagctgctttgctaggatttgtgggggccccatggacaattgcaacttacattgttgaaggggggatgaccaatacgtacacaaatataaagagcatgtgccatacagctccagatgtcttgaagggtcttctctctcaccttgcacaagccatatctgactatatcatttaccaagttaactcgggggcccagtgtatacagatatttgattcatggggtggacagcttccacctcatgtgtgggagcagtggtcaaaaccatatatcaaacagtatctggtaccgcattacaagacttgttatggttacaaattatgactgcaagtcccttataacctagggcgaaagtggaatatagaaaaagctaatctctcaatataaccagtagctggtgtttacatcagcaacatgttctcagttgacatggatttggaattttggatagtgtataattatgtgattttggtttgcatatattcaagactgcaactagcacagtgcatataacttactcggtcctaatggtaatttcaaaagcttggtatatttataaggaaaaattcagaatttcatctcgaccttgaaaaatgtgcaaaatatcatagcttgtagactgttatttagagctcaattagtacaatgcatgtgctttgcgacggcacacaatcatatttgatacccataaaaaataaatttaatatcaaagtgaacatatgatccatatatcagatattaaacatttaaactgataggaacaaatattacaccttatcttagtcaaaaggccgagaaaggtataggccgctcggtcgctcgtcctcctccagctagcgagttggtactatgtgggagcgttgcgctgcgagtgacggcttcttatcatgttggacttgggtggtttctcaaggcccatctgtactgtaacggctcattgttaggtgagaagtaaggaagagtaacagacctacgcgcttcgcacgagacgctcgacgcacgaaactgatgctttaatagagtagagattaaaagatttcatgcaaagttttgatttactgattctgttcaataagcttttctatttttccaacagattgtgagtaggattaagaaagagtgccctaatgtaccccttgtgttgtatataaatggaaatggaggtttacttgagcgcatgaagaacacaggagctgatgttattgggcttgactggacagtggacatgactgatggaaggaggcgccttggtaatggcattagtgtacaagggaatgtggatccagcatttttgttctcaccattaccagtactgactgatgaaattcatagggttgtgaaagcagctggtccaaaaggtcatatacttaatctgggctgtacttcagaaaacacccgaagaagctgtagcacatttctttgatgtcacaaggcgcttgagatatgacacccttttccaaggttctgttgctgaagaattgcatcacgttgcttgacaacggcaatgacattcccatttttcatcaagtggtgtatttgatctgtcatatcatcttagagtcgtagtagattcctagtgttgcctgcattctacctttcaagagagactcattttcttaagcctgtatatgtattgcagagataccggcggcaaatctagtgcaattttattcattgtttgttcgttccattattcatctggctgaagaagggatgcatgatgaccctggtttggtttcaatgattaatgacaatataaattattatagttaatgtatgttttacagaaacaatgttacaataatgcaagatgattggattcatatggtatccatgcctttattaatagaatcaatggtcg

SEQ ID NO: 77343 - DNA, 2513 bp, Zea Mays
cgcgcgtgagagtgccaggcgcactagctatatatatatatagcgattagccgattaagctagctgccactagcgctattagccagaccgcgccagcaagcaactcgctgcattgcctcctgtcgccgtctccgcgcccccgcgtcgaccgaccgcaggttcgtctccggccaccgggctgatcgagagcttggatcctagcaaggcactaccactaggcagcagcgacctgaccaggtgcctttcctcggtgttactatggagttcatcggcagcggcaaggacgtcgtcaagaagatccagctggtggcggccggcgggctgagcaccgagctgccgtcgtcgtcgtcgtcgagaggagaaggggacgcgctgccggcgctcctggtcaaggctccgtcccagaccgtcgccggcttcgactgcgtcggcgccgacgacgtcgccgtgtccctgcacgagatggacgacaaggtggaggagctgcagggccgcccgggaagcaacaaggacactgccatcagagcctacgacgacgcgcacgtcgtcccgtactccgtctcgctcagcatgccggcgtcgccgtcggggttccacctgtcgcagttcatgcccgtggcgccgaccgaccacgtccatcgtcctgaacctacggcgcgatcgccgcggctggtcaagcagacgcggttccactcgcagcccatcgtcctgaacatgaacctgcacccgtcgtcgtcgaccaacaagaacgtcgacgaggcgcggcggtgggacagcgcgcgcgacaagcggttcgacccgttcaagaccttctcgggccgcctcgagcggcagctgtccaacctgcgcggccgcccgcaggaccccgtcgacggcgtatcgtcgtccccggactccgaggaggagaccgatcaggtccccgccgccgaccgctacttcgacgccttggaaggccccgagctcgacacgctcagggccacggaggtgccggtgctgccgaaagacgagaagtggccattcctccttcgcttccccatcagcgcgttcggcatgtgcctgggcgtgagcagccaggccatcctgtggaagacgctggcgtcggcgccggcgacggcgttcctgcgcgtgagccccgcggtgagccacgcgctgtggtacgtggcgctggcgctgacggcgctggtgtcgtccacgtacctgctcaaggtggtcttctacttggaggcggtgcggcgcgagttctaccacccggtgcgcgccaacttcttcttcgcgccgtggatcgcgtgcctgttcctggcgctgggcgcgccgcggctggtggtggcggagatgcaccgcggcgtgtggtacgcgctgatggcgcccatcttgtgcctggagctcaagatctacgggcagtggatgtccggcgggcagcggcgcctgtccaaggtggccaacccgtccaaccacctctccgtcgtgggcaacttcgtcggcgcgctgctgggcgccaggatgggcctccgcgagggccccgtcttcttcttcgccgtcgggctggcgcactacctggtgctcttcgtgacgctgtaccagcggctgcccaccaacgtgacgctgcccaaggagctgcaccccgtgttcttcctcttcgtggccgcgcccagcgtggcgtccatggcatgggccaagatcaacggccagttcgacaacggcgcccggatcgcctacttcatcgcgctcttcctctacatgtcactggcggtgcgcatcaacttcttccggggcttccgcttctcgctggcgtggtgggcgtacacgttcccgatgaccggcgcgtccgtggcgacgatcacgtacgcgacggaggtgaccaacgtgctgacccgggcgctctccatcgggctgtcgggcatctccaccgtcaccgccgccgggctgctggtgaccacggtgttccacgccttcgtcctcagggacctcttccccaacgacgtgtccatcgccatcacgaggaagaagcccaagttcagcaagatcctggcgcaggtccgctcgtccagctccgacatgaaggagctcgtgctctccctctccaacaagccggcggcgcagtccgactgcggcgacaccgagaccgacccgtccgtgaccgccaaatcccgagccgagccgtgactgctagctcaaaaaaaaaaaaacctagctaggagccgctcgctcgcggttccagtcgtctcgtctcgtctcatgtatatctgctggatcccttagctagatgtacatacatacatacatgtttttttttctctgacgaaggagagagaggtcgccgacgcgacgagcaggggtgcagagtgcagacacgcatccttcatccttggagcatttcagtgatgatgaggatatcgcgtgaggaaaaatagtactccttaatgtagatctaccgaccatgtactatgtaattggcgtggactacttatgtaattaagaataaagcgtgaacatgttgtggcctttaaagtttt

SEQ ID NO: 77344 - DNA, 1027 bp, Zea Mays
ctccgcttgcgccgcccctagccccaccgtcgtcctccccgtgaagccgccggttgagacgcccccctctcgtgttgcctccatgtccgcgcagatatgcctcgctcgccaccccgtcgtgttcctccccgagacaccgtggccagcctctagcccgcgctcttcctcgtcacggcgatgccggcttcccggaccccttccggcttgcttccatgccttcgcttcggtttgttctgagaggctacacttcctctatgagtcaaggttggccgtcggcaagagctccgaagggttccaggcgctgcagcaatctacaccagggccagcttcgcgtccacttctgcacaggcgagtgcggctaattgttccaagatgggcgagcgcccttgtgctttctctattggctaaaattcttgaaaagcatgtaagcttttcgcaagtcatgggtaaagagaagttacacatcaacattgtggttaatggccatgtcgactctggcaagtcgaccaccactggccacctgatctacaagcttggaggcattgacaagcgtgtgattgagaggttcaggatgttcaggttgagcttgagaaggagaagcaagaaaaaacaaaactttgacaagtgttggataacttgaagacggaatcagaaacttcaagggtaaaacattatgaggaaatagaagttgtaaagatgacatcacaagaaatgcacgtcctcctttgttaaccgctaaacttcaaccagggccagcacaatccaaggccataaagtttttaagcccccaacagtgaattattgtagtatgtttcttttttgaaaattggttgttggttgaactatgtcgggttgttttatcaatagttggttgttagtttttcacaagtaggacttagtggctccaagtttgttgatttttgttactagtagccttaagttttgttgaacaatgttgcttcttgctagatgtattgtgacctatgaattggaatttgtctgccacaattttggtcattggatatgt

SEQ ID NO: 77345 - DNA, 967 bp, Zea Mays
gtcatctccgcttgcgccgcccctagccccaccgtcgtcctccccgtgaagccgccggttgagacgcccccctctcgtgttgcctccatgtccgcgcagatatgcctcgctcgccaccccgtcgtgttcctccccgagacaccgtggccagcctctagcccgcgctcttcctcgtcacggcgatgccggcttcccggaccccttccggcttgcttccatgccttcgcttcggtttgttctgagaggctacacttcctctatgagtcaaggttggccgtcggcaagagctccgaagggttccaggcgctgcagcaatctacaccagggccagcttcgcgtccacttctgcacaggcgagtgcggctaattgttccaagtttaagcttcacctctagtcatgggtaaagagaagttacacatcaacattgtggttaatggccatgtcgactctggcaagtcgaccaccactggccacctgatctacaagcttggaggcattgacaagcgtgtgattgagaggttgagcttgagaaggagaagcaagaaaaaacaaaactttgacaagtgttggataacttgaagacggaatcagaaacttcaagggtaaaacattatgaggaaatagaagttgtaaagatgacatcacaagaaatgcacgtcctcctttgttaaccgctaaacttcaaccagggccagcacaatccaaggccataaagtttttaagcccccaacagtgaattattgtagtatgtttcttttttgaaaattggttgttggttgaactatgtcgggttgttttatcaatagttggttgttagtttttcacaagtaggacttagtggctccaagtttgttgatttttgttactagtagccttaagttttgttgaacaatgttgcttcttgctagatgtattgtgacctatgaattggaatttgtctgccacaattttggtcattggatatgt

SEQ ID NO: 77346 - DNA, 982 bp, Zea Mays
gtcatctccgcttgcgccgcccctagccccaccgtcgtcctccccgtgaagccgccggttgagacgcccccctctcgtgttgcctccatgtccgcgcagatatgcctcgctcgccaccccgtcgtgttcctccccgagacaccgtggccagcctctagcccgcgctcttcctcgtcacggcgatgccggcttcccggaccccttccggcttgcttccatgccttcgcttcggtttgttctgagaggctacacttcctctatgagtcaaggttggccgtcggcaagagctccgaagggttccaggcgctgcagcaatctacaccagggccagcttcgcgtccacttctgcacaggcgagtgcggctaattgttccaagtttaagcttcacctctagtcatgggtaaagagaagttacacatcaacattgtggttaatggccatgtcgactctggcaagtcgaccaccactggccacctgatctacaagcttggaggcattgacaagcgtgtgattgagaggttcaggatgttcaggttgagcttgagaaggagaagcaagaaaaaacaaaactttgacaagtgttggataacttgaagacggaatcagaaacttcaagggtaaaacattatgaggaaatagaagttgtaaagatgacatcacaagaaatgcacgtcctcctttgttaaccgctaaacttcaaccagggccagcacaatccaaggccataaagtttttaagcccccaacagtgaattattgtagtatgtttcttttttgaaaattggttgttggttgaactatgtcgggttgttttatcaatagttggttgttagtttttcacaagtaggacttagtggctccaagtttgttgatttttgttactagtagccttaagttttgttgaacaatgttgcttcttgctagatgtattgtgacctatgaattggaatttgtctgccacaattttggtcattggatatgt

SEQ ID NO: 77347 - DNA, 1687 bp, Zea Mays
gtttcttccccaaataaggggtttgttcttccacctcgagagctaggtttagggagcagttgagcgagtgagagaactgtattttcccatctagatccgctaaatagagagtgccctagcgcagattttgaggggatttagagcctctcctctatttgttggctcccaccatatatcttcatctttatactggattcttgctcatcgctgcttatggtttttccctgcaaggggtttccatgtaaatggacaaattcattcacttggtttggcccgattccgagggtgataattccagacccggaattaatgagagaggttttgtctaacaagtttggccactttggcaaaccactgtttagccgtgttggcaagttactagccaatgggctcgctaatcatgaaggcgagaaatgggcaaaacacaggagaattctcaaccctgcattccaccatgagaaaataaagcggatgctgcctgtatttgctacctgttgtgccgatatgattaacagatgggaaaattcaatgtcttccaaggaaccttctgagatggacgtctggcctgagttccaaaatcttactggagatgttatctcaagaactgcttttggtagcaactatcaggagggcaggaacatcttccagctacaaggagagcaggctgaacgccttatacaatcttttcaaacaatatttatcccaggctactggctcttgcccaccaaaaataacagaaggatgaaagaaattgatcgggagatccgtaaaattctgcatggaataatcaggaaaagagagagggcttttatagatagtgaaggaactaatgatgacttgttaggcttattggttgagtcaaacatgagggaatcaaatgggaatgcaaaactcggaatgactaccgaagatataatcgaggaatgcaagttattttactttgcaggtatggagacaacatcagtcctgcttacatggacgttaattctgctaagcatgcaccctgaatggcaagagcaggcaagagaagaagttttaaaccactttggaatgggtacaccagactttgataacttgaaccgcctgaagattgtaaccatgattttatatgaggtccttaggttgtacccaccagtagttttcctatccagaagaacctacaaggaaatggagctcggtggcatcaaatatccttcaggcgtgagccttctactgcccatcatcttcattcaccatgatcccaacatctggggaaaagacgcaagcgagttcaatccacagaggttcgaggatggcatttccaatgcgaccaagcatcaggccgccttctttccatttggatggggtcccaggatctgcataggccagaacttcgcgttgctggaagcaaagatggcactgagtaccatcctccaacgcttctcctttgagctctcatcatcctacactcatgcgccatacaccgtgataactttgcatcctcagcatggtgctcaaatcaggtttaaatttagctttgatatgaataatgagaaccaagtgtgtatgaatggagtaggggtgtaatcggatcggatacgaacggatattgcttgtaccatatttgtttcatattttctgtttggattcagataacatcaagttgtgtcggataagatttgaatagatattgatatcttaaatatcc

SEQ ID NO: 77348 - DNA, 1597 bp, Zea Mays
ctctagctcaatagctctgccgcagagacttgctttgcttgacgttcactaggtgcaccaagaagccaaagccaatggcgactctacctctgctcctgcacctgctatgggaggcctctccgtgggcccgtgcaggcgcggcgacggccgccgtggtgctggtgtggctagcggcctggacgcttgagtgggcgtggtggacgccacggcggctagacagagccctacgggcccagggcctcaagggcaccaggtaccgcctcctcaccggcgacgtgagggagaacgctcggctcaaccgagaagcccgcacgaagccactgccgcttgggagtcacgacatcatcccacgcgtgctacccatgttccacaacgcggtgaaggagaatgggacaaattcattcacttggtttggcccgattccgagggtgataattccagacccggaattaatgagagaggttttgtctaacaagtttggccactttggcaaaccactgtttagccgtgttggcaagttactagccaatgggctcgctaatcatgaaggcgagaaatgggcaaaacacaggagaattctcaaccctgcattccaccatgagaaaataaagcggatgctgcctgtatttgctacctgttgtgccgatatgattaacagatgggaaaattcaatgtcttccaaggaaccttctgagatggacgtctggcctgagttccaaaatcttactggagatgttatctcaagaactgcttttggtagcaactatcaggagggcaggaacatcttccagctacaaggagagcaggctgaacgccttatacaatcttttcaaacaatatttatcccaggctactggtatggagacaacatcagtcctgcttacatggacgttaattctgctaagcatgcaccctgaatggcaagagcaggcaagagaagaagttttaaaccactttggaatgggtacaccagactttgataacttgaaccgcctgaagattgtaaccatgattttatatgaggtccttaggttgtacccaccagtagttttcctatccagaagaacctacaaggaaatggagctcggtggcatcaaatatccttcaggcgtgagccttctactgcccatcatcttcattcaccatgatcccaacatctggggaaaagacgcaagcgagttcaatccacagaggttcgaggatggcatttccaatgcgaccaagcatcaggccgccttctttccatttggatggggtcccaggatctgcataggccagaacttcgcgttgctggaagcaaagatggcactgagtaccatcctccaacgcttctcctttgagctctcatcatcctacactcatgcgccatacaccgtgataactttgcatcctcagcatggtgctcaaatcaggtttaaatttagctttgatatgaataatgagaaccaagtgtgtatgaatggagtaggggtgtaatcggatcggatacgaacggatattgcttgtaccatatttgtttcatattttctgtttggattcagataacatcaagttgtgtcggataagatttgaatagatattgatatcttaaatatcc

SEQ ID NO: 77349 - DNA, 2422 bp, Zea Mays
ctgaattttagccattaaatgtatatggatacctgcaatgttttctgcaaatagccaattgtgctcccactttttgaggttccgtggaggcagagtttttcacagagtatggggatgcaagtcgatacaagattcaggaagtcattggtaaaggaagctacggggtggtctgctccgctgtagatgtccacactggagagaaagtagcgatcaagaagatacatgacatctttgagcacatatctgatgctgcccggattctccgtgagatcaagcttctgagactcctaagacatccagatattgttgagatcaaacatattatgttgcctccatcaagacgggaattcaaagatatttatgttgtttttgaacttatggagtctgatcttcaccaagttatcaaggctaatgatgacctgacaaaggaacattatcagttctttctctaccaactgatccgtgctctgaaatacatccacacagctaacgtttatcaccgggacctgaagccaaagaatatattagcaaattctaactgcaaactgaaaatttgtgattttggactagcacgagttgcattcaatgataccccaacaacgatcttctggacagattatgttgcaacaagatggtacagagctccagagctctgtggatccttcttttcaaagtatacaccggccattgacatttggagcattggatgcatctttgctgaggtgttaacagggaaacctttgtttcctggtaaaaatgttgtccatcagttagacttaatgactgaccttctaggcacgccatcgatggatacgatttctcgggtccggaatgagaaagcaaggaggtatctaagtagcatgagaaagaaagagacaatttcgttctcacaaaagtttccgaatgcagatcctttagccttggatcttttgcaaaggcttttagcatttgatccgaaagaccgtccaactgcagaacaggcattggctcatccatactttaaagggctagccaaggttgagagagagccatcttgtcaaccaatcacaaagatggagtttgagtttgaaaggagaagagtgacaaaagaagacattagggagctgatattccgtgagatattggaatatcatccacaactgctcaaagactatatcaatggcacggagaggacaacctttctgtacccaagtgctgtcgaccaatttaggaagcaatttgctcatcttgaagaaaatagtggaaacggacctgtgattccaatggaaagaaaacatacttctcttcctaggtctactattgttcactcatctccaattcctgtcaaggaacaaccccgtatcggcccatgtagggaaaggccttcatctgatgagtcctacaggaatcctcgggagacagaacaatattccggcaatctccccagaacgtcacaggctccacaaagagtgccaacagcgagaccaggaagggttgttggtccagtaatgccttaccaaaatggagacaccaaagacccctacgacacacgaaggttggcaatgagctcaggatatcctccccaacaaatcccacaaacgtttggttattatcagacacatggtaaaccagcttgctgcgagccatcacaggctgaaaggtacacgctgcatcagcaggctgcctatgcctgcgcaaaccgtacagccgcgtctgatgttgctctggacatgagagcacccccttttcagcatctatcggcagggcagagaagtgactcttgtgataggctgacagcagagacaaacttgtacacgagatcaaccaacggcatcgctgccactgcagcaggagtggcagcaactactcacagaaaggtcggcgttgttccgtttggcatgtcaaacatgtattagtgactggatcatggccgaatcatggtgaatcctctgtgcggttgatgggtctatgctgccttcaggtggctaaacaccgacaacttgaagcggccaatcaaacctttggctggatgctgcaagtttagagtgcagtagacagtgttttttctgtgtggtcaggaaaagaggaacaccgccggcggcatgaagcctgccaaaaagtttgtatctgcctgtgcctgagaagtgtgcccttggttgcacactgagaaggggtatagtcggcagtccggcggcatgtaatctgggcaatttaggcgccaatttcttttctagagcgaggaggcagaagggaaaggaaggaacattaacgttttaaatgttgtatagagacgtttctcatgcatcaatgtgctacatcagaattacttcagaaagatatgagatacagcaaaaaaaactgtatggcatatgcatgtttttagatctatcgtgaactagctccaaaaacatgctgcccattaatcttgaactatattacgtgc

SEQ ID NO: 77350 - DNA, 2395 bp, Zea Mays
cttgtaaaggcagtcttggtttgcagaacagttgaactttgcatcatttgggttccgtggaggcagagtttttcacagagtatggggatgcaagtcgatacaagattcaggaagtcattggtaaaggaagctacggggtggtctgctccgctgtagatgtccacactggagagaaagtagcgatcaagaagatacatgacatctttgagcacatatctgatgctgcccggattctccgtgagatcaagcttctgagactcctaagacatccagatattgttgagatcaaacatattatgttgcctccatcaagacgggaattcaaagatatttatgttgtttttgaacttatggagtctgatcttcaccaagttatcaaggctaatgatgacctgacaaaggaacattatcagttctttctctaccaactgatccgtgctctgaaatacatccacacagctaacgtttatcaccgggacctgaagccaaagaatatattagcaaattctaactgcaaactgaaaatttgtgattttggactagcacgagttgcattcaatgataccccaacaacgatcttctggacagattatgttgcaacaagatggtacagagctccagagctctgtggatccttcttttcaaagtatacaccggccattgacatttggagcattggatgcatctttgctgaggtgttaacagggaaacctttgtttcctggtaaaaatgttgtccatcagttagacttaatgactgaccttctaggcacgccatcgatggatacgatttctcgggtccggaatgagaaagcaaggaggtatctaagtagcatgagaaagaaagagacaatttcgttctcacaaaagtttccgaatgcagatcctttagccttggatcttttgcaaaggcttttagcatttgatccgaaagaccgtccaactgcagaacaggcattggctcatccatactttaaagggctagccaaggttgagagagagccatcttgtcaaccaatcacaaagatggagtttgagtttgaaaggagaagagtgacaaaagaagacattagggagctgatattccgtgagatattggaatatcatccacaactgctcaaagactatatcaatggcacggagaggacaacctttctgtacccaagtgctgtcgaccaatttaggaagcaatttgctcatcttgaagaaaatagtggaaacggacctgtgattccaatggaaagaaaacatacttctcttcctaggtctactattgttcactcatctccaattcctgtcaaggaacaaccccgtatcggcccatgtagggaaaggccttcatctgatgagtcctacaggaatcctcgggagacagaacaatattccggcaatctccccagaacgtcacaggctccacaaagagtgccaacagcgagaccaggaagggttgttggtccagtaatgccttaccaaaatggagacaccaaagacccctacgacacacgaaggttggcaatgagctcaggatatcctccccaacaaatcccacaaacgtttggttattatcagacacatggtaaaccagcttgctgcgagccatcacaggctgaaaggtacacgctgcatcagcaggctgcctatgcctgcgcaaaccgtacagccgcgtctgatgttgctctggacatgagagcacccccttttcagcatctatcggcagggcagagaagtgactcttgtgataggctgacagcagagacaaacttgtacacgagatcaaccaacggcatcgctgccactgcagcaggagtggcagcaactactcacagaaaggtcggcgttgttccgtttggcatgtcaaacatgtattagtgactggatcatggccgaatcatggtgaatcctctgtgcggttgatgggtctatgctgccttcaggtggctaaacaccgacaacttgaagcggccaatcaaacctttggctggatgctgcaagtttagagtgcagtagacagtgttttttctgtgtggtcaggaaaagaggaacaccgccggcggcatgaagcctgccaaaaagtttgtatctgcctgtgcctgagaagtgtgcccttggttgcacactgagaaggggtatagtcggcagtccggcggcatgtaatctgggcaatttaggcgccaatttcttttctagagcgaggaggcagaagggaaaggaaggaacattaacgttttaaatgttgtatagagacgtttctcatgcatcaatgtgctacatcagaattacttcagaaagatatgagatacagcaaaaaaaactgtatggcatatgcatgtttttagatctatcgtgaactagctccaaaaacatgctgcccattaatcttgaactatattacgtgc

SEQ ID NO: 77351 - DNA, 2421 bp, Zea Mays
ccttgctgcagcagctcgtgatttgtctgaaaaggttggccgcatcctgttgcctcgggacgccatctctcaaaacggttccgtggaggcagagtttttcacagagtatggggatgcaagtcgatacaagattcaggaagtcattggtaaaggaagctacggggtggtctgctccgctgtagatgtccacactggagagaaagtagcgatcaagaagatacatgacatctttgagcacatatctgatgctgcccggattctccgtgagatcaagcttctgagactcctaagacatccagatattgttgagatcaaacatattatgttgcctccatcaagacgggaattcaaagatatttatgttgtttttgaacttatggagtctgatcttcaccaagttatcaaggctaatgatgacctgacaaaggaacattatcagttctttctctaccaactgatccgtgctctgaaatacatccacacagctaacgtttatcaccgggacctgaagccaaagaatatattagcaaattctaactgcaaactgaaaatttgtgattttggactagcacgagttgcattcaatgataccccaacaacgatcttctggacagattatgttgcaacaagatggtacagagctccagagctctgtggatccttcttttcaaagtatacaccggccattgacatttggagcattggatgcatctttgctgaggtgttaacagggaaacctttgtttcctggtaaaaatgttgtccatcagttagacttaatgactgaccttctaggcacgccatcgatggatacgatttctcgggtccggaatgagaaagcaaggaggtatctaagtagcatgagaaagaaagagacaatttcgttctcacaaaagtttccgaatgcagatcctttagccttggatcttttgcaaaggcttttagcatttgatccgaaagaccgtccaactgcagaacaggcattggctcatccatactttaaagggctagccaaggttgagagagagccatcttgtcaaccaatcacaaagatggagtttgagtttgaaaggagaagagtgacaaaagaagacattagggagctgatattccgtgagatattggaatatcatccacaactgctcaaagactatatcaatggcacggagaggacaacctttctgtacccaagtgctgtcgaccaatttaggaagcaatttgctcatcttgaagaaaatagtggaaacggacctgtgattccaatggaaagaaaacatacttctcttcctaggtctactattgttcactcatctccaattcctgtcaaggaacaaccccgtatcggcccatgtagggaaaggccttcatctgatgagtcctacaggaatcctcgggagacagaacaatattccggcaatctccccagaacgtcacaggctccacaaagagtgccaacagcgagaccaggaagggttgttggtccagtaatgccttaccaaaatggagacaccaaagacccctacgacacacgaaggttggcaatgagctcaggatatcctccccaacaaatcccacaaacgtttggttattatcagacacatggtaaaccagcttgctgcgagccatcacaggctgaaaggtacacgctgcatcagcaggctgcctatgcctgcgcaaaccgtacagccgcgtctgatgttgctctggacatgagagcacccccttttcagcatctatcggcagggcagagaagtgactcttgtgataggctgacagcagagacaaacttgtacacgagatcaaccaacggcatcgctgccactgcagcaggagtggcagcaactactcacagaaaggtcggcgttgttccgtttggcatgtcaaacatgtattagtgactggatcatggccgaatcatggtgaatcctctgtgcggttgatgggtctatgctgccttcaggtggctaaacaccgacaacttgaagcggccaatcaaacctttggctggatgctgcaagtttagagtgcagtagacagtgttttttctgtgtggtcaggaaaagaggaacaccgccggcggcatgaagcctgccaaaaagtttgtatctgcctgtgcctgagaagtgtgcccttggttgcacactgagaaggggtatagtcggcagtccggcggcatgtaatctgggcaatttaggcgccaatttcttttctagagcgaggaggcagaagggaaaggaaggaacattaacgttttaaatgttgtatagagacgtttctcatgcatcaatgtgctacatcagaattacttcagaaagatatgagatacagcaaaaaaaactgtatggcatatgcatgtttttagatctatcgtgaactagctccaaaaacatgctgcccattaatcttgaactatattacgtgc

SEQ ID NO: 77352 - DNA, 2758 bp, Zea Mays
accaccacccgtcctcggccctcctctctctctctattcccccctccccggaggccggagcgctcgtgcggaccacgaggaggaggagagagagaggcagggagccctagccctgccctgcgcgccggcgtcgccagggttagggtctccccggggcccccgccttccttgccaatccctccgccgtcttctcgctctggccgatccccccgcccgacgcgcggggggcgcctagcggcgtgtctgcgttcggcctcgacggcgcggcgcgagccaatgctgtgtgcctgaccgtcgctttgggattgattccactcggaggtggccagctagccacccgagctcgctgtccttgccggtacggcgtttcctgaggaggttccgtgcgagatccgaaggccggcgtgatgcagcacgatcagcgcaagaagggttccgtggaggcagagtttttcacagagtatggggatgcaagtcgatacaagattcaggaagtcattggtaaaggaagctacggggtggtctgctccgctgtagatgtccacactggagagaaagtagcgatcaagaagatacatgacatctttgagcacatatctgatgctgcccggattctccgtgagatcaagcttctgagactcctaagacatccagatattgttgagatcaaacatattatgttgcctccatcaagacgggaattcaaagatatttatgttgtttttgaacttatggagtctgatcttcaccaagttatcaaggctaatgatgacctgacaaaggaacattatcagttctttctctaccaactgatccgtgctctgaaatacatccacacagctaacgtttatcaccgggacctgaagccaaagaatatattagcaaattctaactgcaaactgaaaatttgtgattttggactagcacgagttgcattcaatgataccccaacaacgatcttctggacagattatgttgcaacaagatggtacagagctccagagctctgtggatccttcttttcaaagtatacaccggccattgacatttggagcattggatgcatctttgctgaggtgttaacagggaaacctttgtttcctggtaaaaatgttgtccatcagttagacttaatgactgaccttctaggcacgccatcgatggatacgatttctcgggtccggaatgagaaagcaaggaggtatctaagtagcatgagaaagaaagagacaatttcgttctcacaaaagtttccgaatgcagatcctttagccttggatcttttgcaaaggcttttagcatttgatccgaaagaccgtccaactgcagaacaggcattggctcatccatactttaaagggctagccaaggttgagagagagccatcttgtcaaccaatcacaaagatggagtttgagtttgaaaggagaagagtgacaaaagaagacattagggagctgatattccgtgagatattggaatatcatccacaactgctcaaagactatatcaatggcacggagaggacaacctttctgtacccaaggaagcaatttgctcatcttgaagaaaatagtggaaacggacctgtgattccaatggaaagaaaacatacttctcttcctaggtctactattgttcactcatctccaattcctgtcaaggaacaaccccgtatcggcccatgtagggaaaggccttcatctgatgagtcctacaggaatcctcgggagacagaacaatattccggcaatctccccagaacgtcacaggctccacaaagagtgccaacagcgagaccaggaagggttgttggtccagtaatgccttaccaaaatggagacaccaaagacccctacgacacacgaaggttggcaatgagctcaggatatcctccccaacaaatcccacaaacgtttggttattatcagacacatggtaaaccagcttgctgcgagccatcacaggctgaaaggtacacgctgcatcagcaggctgcctatgcctgcgcaaaccgtacagccgcgtctgatgttgctctggacatgagagcacccccttttcagcatctatcggcagggcagagaagtgactcttgtgataggctgacagcagagacaaacttgtacacgagatcaaccaacggcatcgctgccactgcagcaggagtggcagcaactactcacagaaaggtcggcgttgttccgtttggcatgtcaaacatgtattagtgactggatcatggccgaatcatggtgaatcctctgtgcggttgatgggtctatgctgccttcaggtggctaaacaccgacaacttgaagcggccaatcaaacctttggctggatgctgcaagtttagagtgcagtagacagtgttttttctgtgtggtcaggaaaagaggaacaccgccggcggcatgaagcctgccaaaaagtttgtatctgcctgtgcctgagaagtgtgcccttggttgcacactgagaaggggtatagtcggcagtccggcggcatgtaatctgggcaatttaggcgccaatttcttttctagagcgaggaggcagaagggaaaggaaggaacattaacgttttaaatgttgtatagagacgtttctcatgcatcaatgtgctacatcagaattacttcagaaagatatgagatacagcaaaaaaaactgtatggcatatgcatgtttttagatctatcgtgaactagctccaaaaacatgctgcccattaatcttgaactatattacgtgc

SEQ ID NO: 77353 - DNA, 1293 bp, Zea Mays
cacaatgttaaccgatatccaaatcattaaagaacaaccaacgtatctatctatctaacgcccaaacggagatggggtgaagtcgatggaagaagcgaaccggcgctaccccaccaggctaccagcgagccaccacctcacatacacatacagtcccctaaacccactggccggcgctcacgcagaatagcagtgcagggcgcaggcgtcgatctccccgtacctgcaactgccacccaaccccgccaccaaaagggccgccgcgacattcgatccatggctgccaccgatggcaggggtgcgccgctgtccagctcccgcgtggcggtggcgaggggactcgtgcacgcggcgcaggtcgctgcaggcttggccgtgctcctctgcgccttcgccgacttgccctgggctgccgccgcggccgccgcctgcatcctccgcgtcgccgcctccttcctcgccccgccgcgcctctgcttcctcgccgcgcacgtcatcctgatcgccctcgccacgctcttccgccgcgacgcagcctcgtcctcgccgccgtccgcggaccctcccggctccagcggcgacgcccaggcccagcacccgttcctcgcgctcctgggcccgccgctgccgccggtcaccgaggcggcggagccctccggggaggaggaggcgccgccggatgaggcgctcgacggcaaggaggcggcgcaccacgcgaggacggtgtgcgcccagccgccgcggcgggccatgtcggagaagaccggcggcagcggcggcgcagcgggcggcacggcgagggcggcgtcggcggagctgcggcgtgccaagtcggagagcggcaggcgccggcaacgacgttcggcggcggcggcggcggcggcgccggtggagctggggatggacgacgcggaggcgttccggctggcggtggaggcgttcatcgcgaagcagcagacctggttccaccgcgaggagtcgctgatcgcccgtaccgccgacgacgccggcggggaagacggcacggcgatcgccggcgctgcggtggctgtgaagtgagcgagcaacgcagccaccaccggtaccaccaccaggcagtgagccgaggctgctcgctgctgcaataagggtgatgcgtgtgaaaggatcggaagaagagaacaggggccaacagccaactgtggtgtgagccaaaggcagaccggtgctttgttaaatgaacaagttttgcctttcgcccgctcgtctttccttcttcaccttgcatgcatgaatcccccgatcggcagcggt

SEQ ID NO: 77354 - DNA, 2204 bp, Zea Mays
cccccaccaactcctctctccccgcaatcccagctgcgtccgctcagatcgctcctcgcaatccatcatcgtgaatcgcgtccgcttcctcccgctctctccatccgcgaatcgtgtccgtggagtcttcgcaatccatcaccgcgaatcgcgtccgcccgcttcctccatctctctctagccgtgagaaaccgcgtccgcttcctcctgctctctccatctgcgaatcgcgtcctgcaatcccagccgcgagaaactgtgtccgcttcctccgctcattccctgctctctccatccacgaatcgtgtccgcttcctcgaatcacgtatgcttccctactccccaaggttttcttcgccctccgtcgggatccacagattccccatccaccctccgctcggatcgacagacgcaatccctgctctctcctcgccctccgcccggatcaccaggtcatacttatggcgtcgccaccacaaccaaagcagctggtgctcgctatgtcatccacggattcggacctggctgccttggacctccacaccggcgtggaggactcatccatggatctaggcccagctgcctgggacctccgcacccggtgtggaggacatttgcctccgccccttcgcttcccaccctcggtcgctcgcctcagttgtcgaccgcttcctcgccttcgctcaggcttttcccgctggccacaactctaggaccatccacatctactactgggacaaggtaagcacggtctgcataaaaccccgaacgacgctcttgaactctgaaccatgaccccaagtcgtttcctgatttcaattccagccgcaagtggtcgtttagagcttgtgcattactgaaaggaaaaatccctataccaagccaatctacttggttctttagttcgattttattttattattggttattaatgtttcaattgctgaagttatactttgcatctggttactgcataacttactattatgtattgcactgattcttaattttcaagtttgctgacattggaacccagtaactatgcaatctgaaggtggtataatctgcatcttagactgggcggatattattaacgctcacatagttcctggacctaggattgtagatggcttgaagttgaagggtttacctaaaggaaaggactacttttgcttgctgaaatgagctcagctggcaacctttcttagactacactgctgcggttgtaaagattatcgagcaacatcctgctttgtaataggatctatatcagtaaatcctgcatcttggtctctagcaccgtcgagccctgcattcatccatgccactcttggagtttagatggctgctggaggatatgcccttgggaaacaatataatactcccatttttgtgagtgtgtttttgccattcggttcttgttggatggctcacttgcttcttgttgactggggattaggtgtgttgggttgtggccactagccggcgtcagctaggaacaacaacctgtagtaggtgtcaattgaggcgacattgtgtcaggaagcagaagacatgcacgcaattggtgaatgacaactttgcatctgtgatttggcccaagaaaatttgttcttaacacttggtgggaataaaaagtaacagagagatagtgatggatgggcaggagaggcgagggtcgcctcaccgtagatggaacccacgaggcgcgcaaggagtggcgccggcgcgccttctctggctccttgctccgctccaatggcatcaatgtccatgtgccacatcatggagcggatgcagcacaattggctagtaccaagaagcagaagaagaaaacacctgggagcagtaatgccaaccatggtcatccaagacataagcgtcggcacgcagacaaatcatggaagtttgaccatgttacctttcactgagtttgttgtctgagtgggcgtccaccatctctcgtgaagcctgcccccgccggctctcctcgcgtccaaggaagattgatcttgtagattggctagatagagattttagatgatctgaatctaactgttttcactacattaagttctgaatctaaccgttttcactatattattgttgtttgccttcgcatttggtttcaaaaatgttggcgatatctgctgcgtttacatagcacacaagtttttgttgattattggtatactaagatattt

SEQ ID NO: 77355 - DNA, 2029 bp, Zea Mays
cccccaccaactcctctctccccgcaatcccagctgcgtccgctcagatcgctcctcgcaatccatcatcgtgaatcgcgtccgcttcctcccgctctctccatccgcgaatcgtgtccgtggagtcttcgcaatccatcaccgcgaatcgcgtccgcccgcttcctccatctctctctagccgtgagaaaccgcgtccgcttcctcctgctctctccatctgcgaatcgcgtcctgcaatcccagccgcgagaaactgtgtccgcttcctccgctcattccctgctctctccatccacgaatcgtgtccgcttcctcgaatcacgtatgcttccctactccccaaggttttcttcgccctccgtcgggatccacagattccccatccaccctccgctcggatcgacagacgcaatccctgctctctcctcgccctccgcccggatcaccaggtcatacttatggcgtcgccaccacaaccaaagcagctggtgctcgctatgtcatccacggattcggacctggctgccttggacctccacaccggcgtggaggactcatccatggatctaggcccagctgcctgggacctccgcacccggtgtggaggacatttgcctccgccccttcgcttcccaccctcggtcgctcgcctcagttgtcgaccgcttcctcgccttcgctcaggcttttcccgctggccacaactctaggaccatccacatctactactgggacaagtggtataatctgcatcttagactgggcggatattattaacgctcacatagttcctggacctaggattgtagatggcttgaagttgaagggtttacctaaaggaaaggactacttttgcttgctgaaatgagctcagctggcaacctttcttagactacactgctgcggttgtaaagattatcgagcaacatcctgctttgtaataggatctatatcagtaaatcctgcatcttggtctctagcaccgtcgagccctgcattcatccatgccactcttggagtttagatggctgctggaggatatgcccttgggaaacaatataatactcccatttttgtgagtgtgtttttgccattcggttcttgttggatggctcacttgcttcttgttgactggggattaggtgtgttgggttgtggccactagccggcgtcagctaggaacaacaacctgtagtaggtgtcaattgaggcgacattgtgtcaggaagcagaagacatgcacgcaattggtgaatgacaactttgcatctgtgatttggcccaagaaaatttgttcttaacacttggtgggaataaaaagtaacagagagatagtgatggatgggcaggagaggcgagggtcgcctcaccgtagatggaacccacgaggcgcgcaaggagtggcgccggcgcgccttctctggctccttgctccgctccaatggcatcaatgtccatgtgccacatcatggagcggatgcagcacaattggctagtaccaagaagcagaagaagaaaacacctgggagcagtaatgccaaccatggtcatccaagacataagcgtcggcacgcagacaaatcatggaagtttgaccatgttacctttcactgagtttgttgtctggtataggctccatcacctatcatcgccgaaccttattgtgtatctacagttctacacactagaatattgtgtttctgcccccaatttttttgattgatcttttagtgatatatatctctactactctatatgttcttagagtgggcgtccaccatctctcgtgaagcctgcccccgccggctctcctcgcgtccaaggaagattgatcttgtagattggctagatagagattttagatgatctgaatctaactgttttcactacattaagttctgaatctaaccgttttcactatattattgttgtttgccttcgcatttggtttcaaaaatgttggcgatatctgctgcgtttacatagcacacaagtttttgttgattattggtatactaagatattt

SEQ ID NO: 77356 - DNA, 2194 bp, Zea Mays
cccccaccaactcctctctccccgcaatcccagctgcgtccgctcagatcgctcctcgcaatccatcatcgtgaatcgcgtccgcttcctcccgctctctccatccgcgaatcgtgtccgtggagtcttcgcaatccatcaccgcgaatcgcgtccgcccgcttcctccatctctctctagccgtgagaaaccgcgtccgcttcctcctgctctctccatctgcgaatcgcgtcctgcaatcccagccgcgagaaactgtgtccgcttcctccgctcattccctgctctctccatccacgaatcgtgtccgcttcctcgaatcacgtatgcttccctactccccaaggttttcttcgccctccgtcgggatccacagattccccatccaccctccgctcggatcgacagacgcaatccctgctctctcctcgccctccgcccggatcaccaggtcatacttatggcgtcgccaccacaaccaaagcagctggtgctcgctatgtcatccacggattcggacctggctgccttggacctccacaccggcgtggaggactcatccatggatctaggcccagctgcctgggacctccgcacccggtgtggaggacatttgcctccgccccttcgcttcccaccctcggtcgctcgcctcagttgtcgaccgcttcctcgccttcgctcaggcttttcccgctggccacaactctaggaccatccacatctactactgggacaagtggtataatctgcatcttagactgggcggatattattaacgctcacatagttcctggacctaggattgtagatggcttgaagttgaagggtttacctaaaggaaaggactacttttgcttgctgaaatgagctcagctggcaacctttcttagactacactgctgcggttgtaaagattatcgagcaacatcctgctttgtaataggatctatatcagtaaatcctgcatcttggtctctagcaccgtcgagccctgcattcatccatgccactcttggagtttagatggctgctggaggatatgcccttgggaaacaatataatactcccatttttgtgagtgtgtttttgccattcggttcttgttggatggctcacttgcttcttgttgactggggattaggtgtgttgggttgtggccactagccggcgtcagctaggaacaacaacctgtagtaggtgtcaattgaggcgacattgtgtcaggaagcagaagacatgcacgcaattggtgaatgacaactttgcatctgtgatttggcccaagaaagtatgttctcctttgcgtccaaaatatatggatgggcaggagaggcgagggtcgcctcaccgtagatggaacccacgaggcgcgcaaggagtggcgccggcgcgccttctctggctccttgctccgctccaatggcatcaatgtccatgtgccacatcatggagcggatgcagcacaattggctagtaccaagaagcagaagaagaaaacacctgggagcagtaatgccaaccatggtcatccaagacataagcgtcggcacgcagacaagtaaaacattgatcaaccatggtcattatttttttataactgatacaaccattattttccctatactatagatccatttcccctttaggtttgggaataatacaaaatattgttgtgtaagatagtgtttggctttccatggcattttgagttttcgacttgagtatttgattttgcatcgtgcagatcatggaagtttgaccatgttacctttcactgagtttgttgtctggtataggctccatcacctatcatcgccgaaccttattgtgtatctacagttctacacactagaatattgtgtttctgcccccaatttttttgattgatcttttagtgatatatatctctactactctatatgttcttagagtgggcgtccaccatctctcgtgaagcctgcccccgccggctctcctcgcgtccaaggaagattgatcttgtagattggctagatagagattttagatgatctgaatctaactgttttcactacattaagttctgaatctaaccgttttcactatattattgttgtttgccttcgcatttggtttcaaaaatgttggcgatatctgctgcgtttacatagcacacaagtttttgttgattattggtatactaagatattt

SEQ ID NO: 77357 - DNA, 1419 bp, Zea Mays
cccccaccaactcctctctccccgcaatcccagctgcgtccgctcagatcgctcctcgcaatccatcatcgtgaatcgcgtccgcttcctcccgctctctccatccgcgaatcgtgtccgtggagtcttcgcaatccatcaccgcgaatcgcgtccgcccgcttcctccatctctctctagccgtgagaaaccgcgtccgcttcctcctgctctctccatctgcgaatcgcgtcctgcaatcccagccgcgagaaactgtgtccgcttcctccgctcattccctgctctctccatccacgaatcgtgtccgcttcctcgaatcacgtatgcttccctactccccaaggttttcttcgccctccgtcgggatccacagattccccatccaccctccgctcggatcgacagacgcaatccctgctctctcctcgccctccgcccggatcaccaggtcatacttatggcgtcgccaccacaaccaaagcagctggtgctcgctatgtcatccacggattcggacctggctgccttggacctccacaccggcgtggaggactcatccatggatctaggcccagctgcctgggacctccgcacccggtgtggaggacatttgcctccgccccttcgcttcccaccctcggtcgctcgcctcagttgtcgaccgcttcctcgccttcgctcaggcttttcccgctggccacaactctaggaccatccacatctactactgggacaaggtgtgttgggttgtggccactagccggcgtcagctaggaacaacaacctgtagtaggtgtcaattgaggcgacattgtgtcaggaagcagaagacatgcacgcaattggtgaatgacaactttgcatctgtgatttggcccaagaaagtatgttctcctttgcgtccaaaatatatggatgggcaggagaggcgagggtcgcctcaccgtagatggaacccacgaggcgcgcaaggagtggcgccggcgcgccttctctggctccttgctccgctccaatggcatcaatgtccatgtgccacatcatggagcggatgcagcacaattggctagtaccaagaagcagaagaagaaaacacctgggagcagtaatgccaaccatggtcatccaagacataagcgtcggcacgcagacaaagtgggcgtccaccatctctcgtgaagcctgcccccgccggctctcctcgcgtccaaggaagattgatcttgtagattggctagatagagattttagatgatctgaatctaactgttttcactacattaagttctgaatctaaccgttttcactatattattgttgtttgccttcgcatttggtttcaaaaatgttggcgatatctgctgcgtttacatagcacacaagtttttgttgattattggtatactaagatattt

SEQ ID NO: 77358 - DNA, 1664 bp, Zea Mays
cccccaccaactcctctctccccgcaatcccagctgcgtccgctcagatcgctcctcgcaatccatcatcgtgaatcgcgtccgcttcctcccgctctctccatccgcgaatcgtgtccgtggagtcttcgcaatccatcaccgcgaatcgcgtccgcccgcttcctccatctctctctagccgtgagaaaccgcgtccgcttcctcctgctctctccatctgcgaatcgcgtcctgcaatcccagccgcgagaaactgtgtccgcttcctccgctcattccctgctctctccatccacgaatcgtgtccgcttcctcgaatcacgtatgcttccctactccccaaggttttcttcgccctccgtcgggatccacagattccccatccaccctccgctcggatcgacagacgcaatccctgctctctcctcgccctccgcccggatcaccaggtcatacttatggcgtcgccaccacaaccaaagcagctggtgctcgctatgtcatccacggattcggacctggctgccttggacctccacaccggcgtggaggactcatccatggatctaggcccagctgcctgggacctccgcacccggtgtggaggacatttgcctccgccccttcgcttcccaccctcggtcgctcgcctcagttgtcgaccgcttcctcgccttcgctcaggcttttcccgctggccacaactctaggaccatccacatctactactgggacaagatttgttcttaacacttggtgggaataaaaagtaacagagagatagtgatggatgggcaggagaggcgagggtcgcctcaccgtagatggaacccacgaggcgcgcaaggagtggcgccggcgcgccttctctggctccttgctccgctccaatggcatcaatgtccatgtgccacatcatggagcggatgcagcacaattggctagtaccaagaagcagaagaagaaaacacctgggagcagtaatgccaaccatggtcatccaagacataagcgtcggcacgcagacaagtaaaacattgatcaaccatggtcattatttttttataactgatacaaccattattttccctatactatagatccatttcccctttaggtttgggaataatacaaaatattgttgtgtaagatagtgtttggctttccatggcattttgagttttcgacttgagtatttgattttgcatcgtgcagatcatggaagtttgaccatgttacctttcactgagtttgttgtctggtataggctccatcacctatcatcgccgaaccttattgtgtatctacagttctacacactagaatattgtgtttctgcccccaatttttttgattgatcttttagtgatatatatctctactactctatatgttcttagagtgggcgtccaccatctctcgtgaagcctgcccccgccggctctcctcgcgtccaaggaagattgatcttgtagattggctagatagagattttagatgatctgaatctaactgttttcactacattaagttctgaatctaaccgttttcactatattattgttgtttgccttcgcatttggtttcaaaaatgttggcgatatctgctgcgtttacatagcacacaagtttttgttgattattggtatactaagatattt

SEQ ID NO: 77359 - DNA, 2468 bp, Zea Mays
cccccaccaactcctctctccccgcaatcccagctgcgtccgctcagatcgctcctcgcaatccatcatcgtgaatcgcgtccgcttcctcccgctctctccatccgcgaatcgtgtccgtggagtcttcgcaatccatcaccgcgaatcgcgtccgcccgcttcctccatctctctctagccgtgagaaaccgcgtccgcttcctcctgctctctccatctgcgaatcgcgtcctgcaatcccagccgcgagaaactgtgtccgcttcctccgctcattccctgctctctccatccacgaatcgtgtccgcttcctcgaatcacgtatgcttccctactccccaaggttttcttcgccctccgtcgggatccacagattccccatccaccctccgctcggatcgacagacgcaatccctgctctctcctcgccctccgcccggatcaccaggtcatacttatggcgtcgccaccacaaccaaagcagctggtgctcgctatgtcatccacggattcggacctggctgccttggacctccacaccggcgtggaggactcatccatggatctaggcccagctgcctgggacctccgcacccggtgtggaggacatttgcctccgccccttcgcttcccaccctcggtcgctcgcctcagttgtcgaccgcttcctcgccttcgctcaggcttttcccgctggccacaactctaggaccatccacatctactactgggacaagtttgctgacattggaacccagtaactatgcaatctgaagggtgagataaagaattatagctatttatctttatttttcttctcatatattcatgtgtgatacttagaccttctttgctttggttcagtggtataatctgcatcttagactgggcggatattattaacgctcacatagttcctggacctaggattgtagatggcttgaagttgaaggtactttatgacatatatgcgtaagccttttgcaattactgagttaaagagaatagtcaatgctacaactgctaatatctaatatattgcatttctcatagtaactattgtgttctggcattgaagggtttacctaaaggaaaggactacttttgcttgctgaaatgagctcagctggcaacctttcttagactacactgctgcggttgtaaagattatcgagcaacatcctgctttgtaataggatctatatcagtaaatcctgcatcttggtctctagcaccgtcgagccctgcattcatccatgccactcttggagtttagatggctgctggaggatatgcccttgggaaacaatataatactcccatttttgtgagtgtgtttttgccattcggttcttgttggatggctcacttgcttcttgttgactggggattaggtgtgttgggttgtggccactagccggcgtcagctaggaacaacaacctgtagtaggtgtcaattgaggcgacattgtgtcaggaagcagaagacatgcacgcaattggtgaatgacaactttgcatctgtgatttggcccaagaaaatttgttcttaacacttggtgggaataaaaagtaacagagagatagtgatggatgggcaggagaggcgagggtcgcctcaccgtagatggaacccacgaggcgcgcaaggagtggcgccggcgcgccttctctggctccttgctccgctccaatggcatcaatgtccatgtgccacatcatggagcggatgcagcacaattggctagtaccaagaagcagaagaagaaaacacctgggagcagtaatgccaaccatggtcatccaagacataagcgtcggcacgcagacaagtaaaacattgatcaaccatggtcattatttttttataactgatacaaccattattttccctatactatagatccatttcccctttaggtttgggaataatacaaaatattgttgtgtaagatagtgtttggctttccatggcattttgagttttcgacttgagtatttgattttgcatcgtgcagatcatggaagtttgaccatgttacctttcactgagtttgttgtctggtataggctccatcacctatcatcgccgaaccttattgtgtatctacagttctacacactagaatattgtgtttctgcccccaatttttttgattgatcttttagtgatatatatctctactactctatatgttcttagagtgggcgtccaccatctctcgtgaagcctgcccccgccggctctcctcgcgtccaaggaagattgatcttgtagattggctagatagagattttagatgatctgaatctaactgttttcactacattaagttctgaatctaaccgttttcactatattattgttgtttgccttcgcatttggtttcaaaaatgttggcgatatctgctgcgtttacatagcacacaagtttttgttgattattggtatactaagatattt

SEQ ID NO: 77360 - DNA, 2130 bp, Zea Mays
gcgcccccaccaactcctctctccccgcaatcccagctgcgtccgctcagatcgctcctcgcaatccatcatcgtgaatcgcgtccgcttcctcccgctctctccatccgcgaatcgtgtccgtggagtcttcgcaatccatcaccgcgaatcgcgtccgcccgcttcctccatctctctctagccgtgagaaaccgcgtccgcttcctcctgctctctccatctgcgaatcgcgtcctgcaatcccagccgcgagaaactgtgtccgcttcctccgctcattccctgctctctccatccacgaatcgtgtccgcttcctcgaatcacgtatgcttccctactccccaaggttttcttcgccctccgtcgggatccacagattccccatccaccctccgctcggatcgacagacgcaatccctgctctctcctcgccctccgcccggatcaccaggtcatacttatggcgtcgccaccacaaccaaagcagctggtgctcgctatgtcatccacggattcggacctggctgccttggacctccacaccggcgtggaggactcatccatggatctaggcccagctgcctgggacctccgcacccggtgtggaggacatttgcctccgccccttcgcttcccaccctcggtcgctcgcctcagttgtcgaccgcttcctcgccttcgctcaggcttttcccgctggccacaactctaggaccatccacatctactactgggacaagggtttacctaaaggaaaggactacttttgcttgctgaaatgagctcagctggcaacctttcttagactacactgctgcggttgtaaagattatcgagcaacatcctgctttgtaataggatctatatcagtaaatcctgcatcttggtctctagcaccgtcgagccctgcattcatccatgccactcttggagtttagatggctgctggaggatatgcccttgggaaacaatataatactcccatttttgtgagtgtgtttttgccattcggttcttgttggatggctcacttgcttcttgttgactggggattaggtgtgttgggttgtggccactagccggcgtcagctaggaacaacaacctgtagtaggtgtcaattgaggcgacattgtgtcaggaagcagaagacatgcacgcaattggtgaatgacaactttgcatctgtgatttggcccaagaaaatttgttcttaacacttggtgggaataaaaagtaacagagagatagtgatggatgggcaggagaggcgagggtcgcctcaccgtagatggaacccacgaggcgcgcaaggagtggcgccggcgcgccttctctggctccttgctccgctccaatggcatcaatgtccatgtgccacatcatggagcggatgcagcacaattggctagtaccaagaagcagaagaagaaaacacctgggagcagtaatgccaaccatggtcatccaagacataagcgtcggcacgcagacaagtaaaacattgatcaaccatggtcattatttttttataactgatacaaccattattttccctatactatagatccatttcccctttaggtttgggaataatacaaaatattgttgtgtaagatagtgtttggctttccatggcattttgagttttcgacttgagtatttgattttgcatcgtgcagatcatggaagtttgaccatgttacctttcactgagtttgttgtctggtataggctccatcacctatcatcgccgaaccttattgtgtatctacagttctacacactagaatattgtgtttctgcccccaatttttttgattgatcttttagtgatatatatctctactactctatatgttcttagagtgggcgtccaccatctctcgtgaagcctgcccccgccggctctcctcgcgtccaaggaagattgatcttgtagattggctagatagagattttagatgatctgaatctaactgttttcactacattaagttctgaatctaaccgttttcactatattattgttgtttgccttcgcatttggtttcaaaaatgttggcgatatctgctgcgtttacatagcacacaagtttttgttgattattggtatactaagatattt

SEQ ID NO: 77361 - DNA, 1444 bp, Zea Mays
cgcgcccccaccaactcctctctccccgcaatcccagctgcgtccgctcagatcgctcctcgcaatccatcatcgtgaatcgcgtccgcttcctcccgctctctccatccgcgaatcgtgtccgtggagtcttcgcaatccatcaccgcgaatcgcgtccgcccgcttcctccatctctctctagccgtgagaaaccgcgtccgcttcctcctgctctctccatctgcgaatcgcgtcctgcaatcccagccgcgagaaactgtgtccgcttcctccgctcattccctgctctctccatccacgaatcgtgtccgcttcctcgaatcacgtatgcttccctactccccaaggttttcttcgccctccgtcgggatccacagattccccatccaccctccgctcggatcgacagacgcaatccctgctctctcctcgccctccgcccggatcaccaggtcatacttatggcgtcgccaccacaaccaaagcagctggtgctcgctatgtcatccacggattcggacctggctgccttggacctccacaccggcgtggaggactcatccatggatctaggcccagctgcctgggacctccgcacccggtgtggaggacatttgcctccgccccttcgcttcccaccctcggtcgctcgcctcagttgtcgaccgcttcctcgccttcgctcaggcttttcccgctggccacaactctaggaccatccacatctactactgggacaaggtgtgttgggttgtggccactagccggcgtcagctaggaacaacaacctgtagtaggtgtcaattgaggcgacattgtgtcaggaagcagaagacatgcacgcaattggtgaatgacaactttgcatctgtgatttggcccaagaaaatttgttcttaacacttggtgggaataaaaagtaacagagagatagtgatggatgggcaggagaggcgagggtcgcctcaccgtagatggaacccacgaggcgcgcaaggagtggcgccggcgcgccttctctggctccttgctccgctccaatggcatcaatgtccatgtgccacatcatggagcggatgcagcacaattggctagtaccaagaagcagaagaagaaaacacctgggagcagtaatgccaaccatggtcatccaagacataagcgtcggcacgcagacaaagtgggcgtccaccatctctcgtgaagcctgcccccgccggctctcctcgcgtccaaggaagattgatcttgtagattggctagatagagattttagatgatctgaatctaactgttttcactacattaagttctgaatctaaccgttttcactatattattgttgtttgccttcgcatttggtttcaaaaatgttggcgatatctgctgcgtttacatagcacacaagtttttgttgattattggtatactaagatattt

SEQ ID NO: 77362 - DNA, 879 bp, Zea Mays
caggtggtagtggggtacttgcactggtctgagttgcacaccggtaagagagattcctgaacaaggtgtattccgtcagtgttgagactgttctcaggggaggatatagtcaagtcatggaccatcactccttgacagttgtcaaacttaagatgacactgtgagctgttgacaatagtgataccagccactacaacgttgaaactaccataaaacctcaatgcctgcatcaggtttaatctgtggcattctttcaaactccacatcgtactgcaggaaagcatccaaaaaacgtcttgtaagagctgtggaaagggttctgcattatgtgtattctgacttgcttggtgtactttgttctcttccatggcttaaaaaataaaaaataaacttggccaggctggtgtgtctatgccgctatatgccacaatcatgtgagacggaaagaacaagacaaagcagggaacagatcgaaacaaatgcaaataagactgcagaaacgtatggtgcccgtgacaacttttcgggctttctactgcaaatcatgtgagaaagtgagagtaaaactggtatggtcataggcaccttcaaacgctcactatcataagctgtggtggttctggcaaatgaattcatggtgcattccagtttctaagaattctggagagagagagagagagaaaaatacgcatggccaattggaatctcaagatgtcattgggacgacaggtcccctggatggatgtgattgacatcactgagttctcatgcaagtcatgtaaagatcagtttgaaacagagcatgtgaagcccaaacccacaaaagggattgcaatttgagatttctggctcaaagaatgcatgatgcttgacgatttt

SEQ ID NO: 77363 - DNA, 2002 bp, Zea Mays
caaaagcttgccagcagaatgggttattcaggtggtagtggggtacttgcactggtctgagttgcacaccggtaagagagattcctgaacaagcaggtgtattccgtcagtgttgagactgttctcaggggaggatatagtcaagtcatggaccatcactccttgacagttgtcaaacttaagatgacactgtgagctgttgacaatagtgataccagccactacaacgttgaaactaccataaaacctcaatgcctgcatcaggtttaatctgtggcattctttcaaactccacatcgtactgcaggaaagcatccaaagtaagcacttaacatgactatcttttattttgagtacttaataaaaaattatacacttgctggccagctctcaccgtgtcatcatcatcctcgtcttctgtgtctgagtaggtccaccattgttgccctctgccatttataatgccgttcccttgaataaccattccatttagtttggtgaactcgagccactggagcaagcctgaaccccaggatttagcactggttggagctaggattgttccttccagctgcaaagtgagtacaacattaaacagcattactcaacgaacttattcttccattggtgtgcatctcaaattagataaaatacaatcccatcctgccttttgttgctcaattcaagctatgttgagaaaacccttttaagtatcttatcatttgggataaagaacatgcttacctgaaagacaatattcgatttgcagtaaggcccagagaacgagattggcccaactaggaactctagttctggtggtacgagaactgtacatgccccctttttgcaggcagcagcccacgctccttcaaaagcctgtatgcaaatgcacgtacaattattagctctagatttctgaaaagacaatccctggaatctagcatcacaaaaaataactgagagtccagacccctaagcagggtaatcagctgttgcactcttgtcttatatctttttggtcgctgtgccaaaacaagaatcagtttgtgaccccccaccccacccccaccacacacgaaggatttgaaaaaaacgaagttaatttacttgagatattaaaaaatctataggattgatagagctttcagataatgagacaacgcatactggaaaatatcgttaagtatggcttatttcttgttaacctggtacaaaacttccatgaactttctatttcgctttgctgtaagaacaaaaaaatatggtgttattggtgcatgcagtgtgctgttgcaaaagaaagaaagttgtgctctgttaatgtcatagagagggagttcgctattctcttatctgtaaagcctgagaatcacaatattacaattgggtttgtttgttttctctgtacacagaaacgtcttgtaagagctgtggaaagggttctgcattatgtgtattctgacttgcttggtgtactttgttctcttccatggcttaaaaaataaaaaataaacttggccaggctggtgtgtctatgccgctatatgccacaatcatgtgagacggaaagaacaagacaaagcagggaacagatcgaaacaaatgcaaataagactgcagaaacgtatggtgcccgtgacaacttttcgggctttctactgcaaatcatgtgagaaagtgagagtaaaactggtatggtcataggcaccttcaaacgctcactatcataagctgtggtggttctggcaaatgaattcatggtgcattccagtttctaagaattctggagagagagagagagagaaaaatacgcatggccaattggaatctcaagatgtcattgggacgacaggtcccctggatggatgtgattgacatcactgagttctcatgcaagtcatgtaaagatcagtttgaaacagagcatgtgaagcccaaacccacaaaagggattgcaatttgagatttctggctcaaagaatgcatgatgcttgacgatttt

SEQ ID NO: 77364 - DNA, 1888 bp, Zea Mays
caaaagcttgccagcagaatgggttattcaggtggtagtggggtacttgcactggtctgagttgcacaccggtaagagagattcctgaacaaggtgtattccgtcagtgttgagactgttctcaggggaggatatagtcaagtcatggaccatcactccttgacagttgtcaaacttaagatgacactgtgagctgttgacaatagtgataccagccactacaacgttgaaactaccataaaacctcaatgcctgcatcaggtttaatctgtggcattctttcaaactccacatcgtactgcaggaaagcatccaaagtccaccattgttgccctctgccatttataatgccgttcccttgaataaccattccatttagtttggtgaactcgagccactggagcaagcctgaaccccaggatttagcactggttggagctaggattgttccttccagctgcaaagtgagtacaacattaaacagcattactcaacgaacttattcttccattggtgtgcatctcaaattagataaaatacaatcccatcctgccttttgttgctcaattcaagctatgttgagaaaacccttttaagtatcttatcatttgggataaagaacatgcttacctgaaagacaatattcgatttgcagtaaggcccagagaacgagattggcccaactaggaactctagttctggtggtacgagaactgtacatgccccctttttgcaggcagcagcccacgctccttcaaaagcctgtatgcaaatgcacgtacaattattagctctagatttctgaaaagacaatccctggaatctagcatcacaaaaaataactgagagtccagacccctaagcagggtaatcagctgttgcactcttgtcttatatctttttggtcgctgtgccaaaacaagaatcagtttgtgaccccccaccccacccccaccacacacgaaggatttgaaaaaaacgaagttaatttacttgagatattaaaaaatctataggattgatagagctttcagataatgagacaacgcatactggaaaatatcgttaagtatggcttatttcttgttaacctggtacaaaacttccatgaactttctatttcgctttgctgtaagaacaaaaaaatatggtgttattggtgcatgcagtgtgctgttgcaaaagaaagaaagttgtgctctgttaatgtcatagagagggagttcgctattctcttatctgtaaagcctgagaatcacaatattacaattgggtttgtttgttttctctgtacacagaaacgtcttgtaagagctgtggaaagggttctgcattatgtgtattctgacttgcttggtgtactttgttctcttccatggcttaaaaaataaaaaataaacttggccaggctggtgtgtctatgccgctatatgccacaatcatgtgagacggaaagaacaagacaaagcagggaacagatcgaaacaaatgcaaataagactgcagaaacgtatggtgcccgtgacaacttttcgggctttctactgcaaatcatgtgagaaagtgagagtaaaactggtatggtcataggcaccttcaaacgctcactatcataagctgtggtggttctggcaaatgaattcatggtgcattccagtttctaagaattctggagagagagagagagagaaaaatacgcatggccaattggaatctcaagatgtcattgggacgacaggtcccctggatggatgtgattgacatcactgagttctcatgcaagtcatgtaaagatcagtttgaaacagagcatgtgaagcccaaacccacaaaagggattgcaatttgagatttctggctcaaagaatgcatgatgcttgacgatttt

SEQ ID NO: 77365 - DNA, 1488 bp, Zea Mays
cgccctagtagtgtagtacgtggctattttacccaccccactcgccgtgaataccctctccaccaacaccgagaggcactaccgcagcagcgcgggagcaggcccggcaggcatgggcgtgcttcggagcacgcagagccttgaggcggaggtggacgagctgcgcgccgcgctcctggcgggcgggtggcgccgctcggcgggccacgcggacgctaagcgcgctccccggggtgacgccggaggggccgcggcgcgcgccgtgtgcgtaactggcggcatctccttcgtcgggttcgccgtcgtcgaccgcctcctccggcacgggtacaccgtccgcctcgcgctggagacgcaagaagcacatggcagcgttagaagcccaagcagcggagcgggtgattgaggcctgcgtcaggacagagtccgtcaggaaatgcgtcttcacctcttccttgctggcgtgcgtgtggaggcaggactaccctcatgaccggcggtgccctaccaccatcgacgagagctgctggagcgacgagagcttctgccgcgacaacaagctgtggttcgcacttggcaaaacggcggcagagaaggctgcgtggagggcggcgcggggacgagacctgaagctggtcaccatctgccccgcgcttgtcactggtccggggttccgccgccgcaactccaccgcgtccatcgcgtatctcaaaggggctcgagccatgctcgccgacggcctgctcgccacggcaaacgtggagacggtggccgaggcgcacgtccacgcgtacgaggcgatgggcgacaacaccgccggcggcaggtacatctgctacgaccacgtggtcaagcggcccgaggagttcgccgagctggagcggcagctggggctgccgggaggggccgcgcccgcgcccgcgcacggctctgacgaccggccggccaggttcgagctttgcaagcggaagctgtccaggctcatgtcctccaggaggaggtgcgcgtacgacacctactactccgtcgcgtttgaggtttgactagctactagctagctcaggcggcgaaggtgcatttgccatgaaggggggaaccgctggcactgacgacgagaaatcggcgcagcaagggttgatcaccagtatgcaatctgtggtccattgacaagagtggacagtggacaccggaagcgaagcggagcaatagcaaagctctgcttgatgtccttgtggacggggaaggagcagggagagggagagccaagtgtttgtgcaattttgtacagaatattcatgcaacaataaaggcgagtcatccataggcagcgcgcatcacaacatcgtgtccacctccaccatcgatccacgccaccacaaaatccgcacaccgcttgacgtccaacgaagtttgtacacaggctgatgaccttcgataaagaagtatgcttctgctacatgcaagcaagtagataatcgtgctttcgtt

SEQ ID NO: 77366 - DNA, 1711 bp, Zea Mays
cgccctagtagtgtagtacgtggctattttacccaccccactcgccgtgaataccctctccaccaacaccgagaggcactaccgcagcagcgcgggagcaggcccggcaggcatgggcgtgcttcggagcacgcagagccttgaggcggaggtggacgagctgcgcgccgcgctcctggcgggcgggtggcgccgctcggcgggccacgcggacgctaagcgcgctccccggggtgacgccggaggggccgcggcgcgcgccgtgtgcgtaactggcggcatctccttcgtcgggttcgccgtcgtcgaccgcctcctccggcacgggtacaccgtccgcctcgcgctggagacgcaagaggacatggacaagctgcgggagatggagatgttcggcgaggacggccgggatgggggggtgtcgacggtgatggcgaacgtgatggacccggacggcctgcgccgcgccttcgacgggtgcgccggcgtgttccacacctccgccttcgtcgaccccgggggcatgtccggctacacgaagcacatggcagcgttagaagcccaagcagcggagcgggtgattgaggcctgcgtcaggacagagtccgtcaggaaatgcgtcttcacctcttccttgctggcgtgcgtgtggaggcaggactaccctcatgaccggcggtgccctaccaccatcgacgagagctgctggagcgacgagagcttctgccgcgacaacaagtcactcaggaagaagccacatactgtgatgcgtcgtttttccagctgtggttcgcacttggcaaaacggcggcagagaaggctgcgtggagggcggcgcggggacgagacctgaagctggtcaccatctgccccgcgcttgtcactggtccggggttccgccgccgcaactccaccgcgtccatcgcgtatctcaaaggggctcgagccatgctcgccgacggcctgctcgccacggcaaacgtggagacggtggccgaggcgcacgtccacgcgtacgaggcgatgggcgacaacaccgccggcggcaggtacatctgctacgaccacgtggtcaagcggcccgaggagttcgccgagctggagcggcagctggggctgccgggaggggccgcgcccgcgcccgcgcacggctctgacgaccggccggccaggttcgagctttgcaagcggaagctgtccaggctcatgtcctccaggaggaggtgcgcgtacgacacctactactccgtcgcgtttgaggtttgactagctactagctagctcaggcggcgaaggtgcatttgccatgaaggggggaaccgctggcactgacgacgagaaatcggcgcagcaagggttgatcaccagtatgcaatctgtggtccattgacaagagtggacagtggacaccggaagcgaagcggagcaatagcaaagctctgcttgatgtccttgtggacggggaaggagcagggagagggagagccaagtgtttgtgcaattttgtacagaatattcatgcaacaataaaggcgagtcatccataggcagcgcgcatcacaacatcgtgtccacctccaccatcgatccacgccaccacaaaatccgcacaccgcttgacgtccaacgaagtttgtacacaggctgatgaccttcgataaagaagtatgcttctgctacatgcaagcaagtagataatcgtgctttcgtt

SEQ ID NO: 77367 - DNA, 1703 bp, Zea Mays
cgccctagtagtgtagtacgtggctattttacccaccccactcgccgtgaataccctctccaccaacaccgagaggcactaccgcagcagcgcgggagcaggcccggcaggcatgggcgtgcttcggagcacgcagagccttgaggcggaggtggacgagctgcgcgccgcgctcctggcgggcgggtggcgccgctcggcgggccacgcggacgctaagcgcgctccccggggtgacgccggaggggccgcggcgcgcgccgtgtgcgtaactggcggcatctccttcgtcgggttcgccgtcgtcgaccgcctcctccggcacgggtacaccgtccgcctcgcgctggagacgcaagaggacatggacaagctgcgggagatggagatgttcggcgaggacggccgggatgggggggtgtcgacggtgatggcgaacgtgatggacccggacggcctgcgccgcgccttcgacgggtgcgccggcgtgttccacacctccgccttcgtcgaccccgggggcatgtccggctacacgaagcacatggcagcgttagaagcccaagcagcggagcgggtgattgaggcctgcgtcaggacagagtccgtcaggaaatgcgtcttcacctcttccttgctggcgtgcgtgtggaggcaggactaccctcatgaccggcggtgccctaccaccatcgacgagagctgctggagcgacgagagcttctgccgcgacaacaaggaagaagccacatactgtgatgcgtcgtttttccagctgtggttcgcacttggcaaaacggcggcagagaaggctgcgtggagggcggcgcggggacgagacctgaagctggtcaccatctgccccgcgcttgtcactggtccggggttccgccgccgcaactccaccgcgtccatcgcgtatctcaaaggggctcgagccatgctcgccgacggcctgctcgccacggcaaacgtggagacggtggccgaggcgcacgtccacgcgtacgaggcgatgggcgacaacaccgccggcggcaggtacatctgctacgaccacgtggtcaagcggcccgaggagttcgccgagctggagcggcagctggggctgccgggaggggccgcgcccgcgcccgcgcacggctctgacgaccggccggccaggttcgagctttgcaagcggaagctgtccaggctcatgtcctccaggaggaggtgcgcgtacgacacctactactccgtcgcgtttgaggtttgactagctactagctagctcaggcggcgaaggtgcatttgccatgaaggggggaaccgctggcactgacgacgagaaatcggcgcagcaagggttgatcaccagtatgcaatctgtggtccattgacaagagtggacagtggacaccggaagcgaagcggagcaatagcaaagctctgcttgatgtccttgtggacggggaaggagcagggagagggagagccaagtgtttgtgcaattttgtacagaatattcatgcaacaataaaggcgagtcatccataggcagcgcgcatcacaacatcgtgtccacctccaccatcgatccacgccaccacaaaatccgcacaccgcttgacgtccaacgaagtttgtacacaggctgatgaccttcgataaagaagtatgcttctgctacatgcaagcaagtagataatcgtgctttcgtt

SEQ ID NO: 77368 - DNA, 1701 bp, Zea Mays
gccgagtcctctcctctgctcagccagtggtgctcgccctagtagtgtagtacgtggctattttacccaccccactcgccgtgaataccctctccaccaacaccgagaggcactaccgcagcagcgcgggagcaggcccggcaggcatgggcgtgcttcggagcacgcagagccttgaggcggaggtggacgagctgcgcgccgcgctcctggcgggcgggtggcgccgctcggcgggccacgcggacgctaagcgcgctccccggggtgacgccggaggggccgcggcgcgcgccgtgtgcgtaactggcggcatctccttcgtcgggttcgccgtcgtcgaccgcctcctccggcacgggtacaccgtccgcctcgcgctggagacgcaagaggacatggacaagctgcgggagatggagatgttcggcgaggacggccgggatgggggggtgtcgacggtgatggcgaacgtgatggacccggacggcctgcgccgcgccttcgacgggtgcgccggcgtgttccacacctccgccttcgtcgaccccgggggcatgtccggctacacgaagcacatggcagcgttagaagcccaagcagcggagcgggtgattgaggcctgcgtcaggacagagtccgtcaggaaatgcgtcttcacctcttccttgctggcgtgcgtgtggaggcaggactaccctcatgaccggcggtgccctaccaccatcgacgagagctgctggagcgacgagagcttctgccgcgacaacaagctgtggttcgcacttggcaaaacggcggcagagaaggctgcgtggagggcggcgcggggacgagacctgaagctggtcaccatctgccccgcgcttgtcactggtccggggttccgccgccgcaactccaccgcgtccatcgcgtatctcaaaggggctcgagccatgctcgccgacggcctgctcgccacggcaaacgtggagacggtggccgaggcgcacgtccacgcgtacgaggcgatgggcgacaacaccgccggcggcaggtacatctgctacgaccacgtggtcaagcggcccgaggagttcgccgagctggagcggcagctggggctgccgggaggggccgcgcccgcgcccgcgcacggctctgacgaccggccggccaggttcgagctttgcaagcggaagctgtccaggctcatgtcctccaggaggaggtgcgcgtacgacacctactactccgtcgcgtttgaggtttgactagctactagctagctcaggcggcgaaggtgcatttgccatgaaggggggaaccgctggcactgacgacgagaaatcggcgcagcaagggttgatcaccagtatgcaatctgtggtccattgacaagagtggacagtggacaccggaagcgaagcggagcaatagcaaagctctgcttgatgtccttgtggacggggaaggagcagggagagggagagccaagtgtttgtgcaattttgtacagaatattcatgcaacaataaaggcgagtcatccataggcagcgcgcatcacaacatcgtgtccacctccaccatcgatccacgccaccacaaaatccgcacaccgcttgacgtccaacgaagtttgtacacaggctgatgaccttcgataaagaagtatgcttctgctacatgcaagcaagtagataatcgtgctttcgtt

SEQ ID NO: 77369 - DNA, 1372 bp, Zea Mays
caaaaaactataatgtgcttggactggaggcaggcagcaagacagacgtaaagttccctatagcaaaatgcgacgagggagagggaccgaaccaaaacgaaacgagagtaaagaagcgcataaaactgggaaagccacacgtaacctctccccgccgatcccttccttccatccttccgccacgcgcggcagcggttcgtcacactcacacgcacacaccatggcgtccacgccacggacgccggcgccggagcggtctccgccgcccgtgcccactcctcctccgcctctggaggacgagccgccgccgtatctggccgacgggtcgccgcgggaggaggccagcttctccagcgacgggagggaaggagcgccccccaagaacccgcagctctcgcccacgcaccacgctgcgccacgcctcgtgccgccgcccagcagcccagccaggcaagacgggcaagaacaagaagggagcgctaataaggccgccgcggccacggcggagccggcccgcgagccgctccgccagatggcgacgggcctcgcccggccactgtcgtcgcagacgtcgcccgccaccaccaactctcctactccgtcggcgtctccgacgccgtcgagtcccgcgcccgtggccaacaacagcaagaggagcggccagagcacgcccaagcgcgcggagacgaagctgccgctgtcgtcgccggccgtcgcggtgcacttcgacccagtcgaggaggccgtcacgtcgccgctgcgcctcggcaaggcgcgcctcgaccagcagcagcagcagcagcacgcggcgggggcggcggagagcggggcatccgtggtccccggtgtggcggcggccgtggccgcggtcgccgagcggagggagctgttgctggcgctgcgcctggccacggcggtgctcagcctcgcggccttctcggtgatcgccagtgcccggacgtccggatgggccggcgactactacgcccgccacctgcagtacaggttctggcgtacctcctcatgtcggcgtcgtcggcggccgcgtcgcgcaacgacctgtgggtgtccaggttcggcacggacgccttcgtcaggaagatcaccggcgccctgtggctgtccttcgtcgcgttcctggtgctcgctctgaacgcggtcatctccacggctaatctcttcagcatggtctgacacgactcgtcctgctctggcgttgttggaatcaagtactaattgtagattctggaaataaatgtaaccgcgcgttaattagctgttgcacacgctgtttttggcactggtttatgattttatatcacttctttgtcagtgaaatgttttttctaacagtaaaggctgtaggggaccc

SEQ ID NO: 77370 - DNA, 1798 bp, Zea Mays
gaaaactagcccagcccatgtatatccaccggcactcggcacgaagtccatagccagcgaaactcccgaaaccgtaccaaccagacaattcaccatggcggcgccggcgcaggcgcaggcgcaggtcctgcctctcctccggtggagccggagcgcctccttcctctgcgcctcgtcgcgccgcctcttctccgccctccaacgcccctctgccgctgctcgctgcgaggccggctccaaggccatgctcaaggggatggactactcggaactcgagaattgggtgcaggcgcaggggtttcggccaggccaggccatgatgctgtggaaatgcctgtacgggaacaacgtttgggctcattgctacgacgagttggctggatttcaggaagatgataaccgagcatgctgatctcaaggcattaactatgaaggacatccatattgcatcagatggaacccgtaaggatgttacagatattgttctctcttgaagatggttcagtgattgaaacagttatcattccttgcgctaggggcaggacaactatctgtgtttcaagccaagttggttgtgccatgaactgccagttttgtttcactggaaggatgggtttgagaaaacatctctcgacagctgaaattgtcgagcaggctgtgtttgctcgtaggttattctcagatgaattgggatcaattaacaatgttgtatttatgggcatgggtgaaccatttcacaatattgacaatgtaataaaagcctcagcaataatggttgatgagcaaggtcttcattttagccctcgcaaggttactgtctccacaagtggtcttgtccctcagttaaaacgcttcctccaggaatccaattgctccctggctgtcagtcttaatgcgacaacagatgaggttaggaactggataatgcccataaacagaaagtacaatcttaacttgcttcttggcactttaagggaggaacttaacctcagacaaaaacaaatagtgctatttgaatatgtcatgctttctggagtgaacgacagtatggatgatgccaagaggcttatagagctagtccaagggatcccatgcaagataaacctcatctctttcaatccccacggcggttcccaattcaagcccacaccagacgataagataattgagttccgcaacgttttaattcaaggtggcctcactgtttttgttcggctcagcagaggggatgatcagatggctgcctgcgggcagctaggagagcctggaggctatcagctacctctgctccgtgtgcccgagaaatttcaggtcgccttgtgatgctaaacagtgcatacagtaaaaatggtcctgagcagcttgacgaacacacggagtaattggcttggaacgacgattcgatcgtgcaaatcttgcaagttctaccgccttcggaagcttgtgtggacttctgcaataacgtgcaaatctgaacctgggtacttgtgcgacaacacatttagacatggtgttgcttctgctagtacgtggtgtacccaaaccaaattcgataagattattattattataaattggtattttctggcaaatcgttgctgtataagacattaacagtgtaacatgctttcacttggtacttcgaaaaatatggaatgaacttatacggtaatcagcaatgagagaagaatctggaggacaaggttgcttgcctgaatgagataccttaaccactaaggtgtgcatggtactagccacctacacacctgatcaccccaaatgaaagaaagaaaaaaaa

SEQ ID NO: 77371 - DNA, 1644 bp, Zea Mays
gaaaactagcccagcccatgtatatccaccggcactcggcacgaagtccatagccagcgaaactcccgaaaccgtaccaaccagacaattcaccatggcggcgccggcgcaggcgcaggcgcaggtcctgcctctcctccggtggagccggagcgcctccttcctctgcgcctcgtcgcgccgcctcttctccgccctccaacgcccctctgccgctgctcgctgcgaggccggctccaaggccatgctcaaggggatggactactcggaactcgagaattgggtgcaggcgcaggggtttcggccaggccaggccatgatgctgtggaaatgcctgtacgggaacaacgtttgggctcattgctacgacgagttggctggtttaaataaggatttcaggaagatgataaccgagcatgctgatctcaaggcattaactatgaaggacatccatattgcatcagatggaacccgtaagatattgttctctcttgaagatggttcagtgattgaaacagttattctcagatgaattgggatcaattaacaatgttgtatttatgggcatgggtgaaccatttcacaatattgacaatgtaataaaagcctcagcaataatggttgatgagcaaggtcttcattttagccctcgcaaggttactgtctccacaagtggtcttgtccctcagttaaaacgcttcctccaggaatccaattgctccctggctgtcagtcttaatgcgacaacagatgaggttaggaactggataatgcccataaacagaaagtacaatcttaacttgcttcttggcactttaagggaggaacttaacctcagacaaaaacaaatagtgctatttgaatatgtcatgctttctggagtgaacgacagtatggatgatgccaagaggcttatagagctagtccaagggatcccatgcaagataaacctcatctctttcaatccccacggcggttcccaattcaagcccacaccagacgataagataattgagttccgcaacgttttaattcaaggtggcctcactgtttttgttcggctcagcagaggggatgatcagatggctgcctgcgggcagctaggagagcctggaggctatcagctacctctgctccgtgtgcccgagaaatttcaggtcgccttgtgatgctaaacagtgcatacagtaaaaatggtcctgagcagcttgacgaacacacggagtaattggcttggaacgacgattcgatcgtgcaaatcttgcaagttctaccgccttcggaagcttgtgtggacttctgcaataacgtgcaaatctgaacctgggtacttgtgcgacaacacatttagacatggtgttgcttctgctagtacgtggtgtacccaaaccaaattcgataagattattattattataaattggtattttctggcaaatcgttgctgtataagacattaacagtgtaacatgctttcacttggtacttcgaaaaatatggaatgaacttatacggtaatcagcaatgagagaagaatctggaggacaaggttgcttgcctgaatgagataccttaaccactaaggtgtgcatggtactagccacctacacacctgatcaccccaaatgaaagaaagaaaaaaaa

SEQ ID NO: 77372 - DNA, 2094 bp, Zea Mays
gaaaactagcccagcccatgtatatccaccggcactcggcacgaagtccatagccagcgaaactcccgaaaccgtaccaaccagacaattcaccatggcggcgccggcgcaggcgcaggcgcaggtcctgcctctcctccggtggagccggagcgcctccttcctctgcgcctcgtcgcgccgcctcttctccgccctccaacgcccctctgccgctgctcgctgcgaggccggctccaaggccatgctcaaggggatggactactcggaactcgagaattgggtgcaggcgcaggggtttcggccaggccaggccatgatgctgtggaaatgcctgtacgggaacaacgtttgggctcattgctacgacgagttggctggtttaaataaggatttcaggaagatgataaccgagcatgctgatctcaaggcattaactatgaaggacatccatattgcatcagatggaacccgtaaggggcaggacaactatctgtgtttcaagccaagttggttgtgccatgaactgccagttttgtttcactggaaggatgggtttgagaaaacatctctcgacagctgaaattgtcgagcaggctgtgtttgctcgtaggttattctcagatgaattgggatcaattaacaatgttgtatttatgggcatgggtgaaccatttcacaatattgacaatgtaataaaagcctcagcaataatggttgatgagcaaggtcttcattttagccctcgcaaggttactgtctccacaagtggtcttgtccctcagttaaaacgcttcctccaggaatccaattgctccctggctgtcagtcttaatgcgacaacagatgaggttaggaactggataatgcccataaacagaaagtacaatcttaacttgcttcttggcactttaagggaggaacttaacctcagacaaaaacaaatagtgctatttgaatatgtcatgctttctggagtgaacgacaggtcagatatctgctttagtgtctttgctgactgtttttgtatgttatgaatctcttagcataggttgcatataaatctccttgcaatagataactttctcccctatattcaattgttcataaggtttttctttttctatctggtccaggcatacatgtatgcctactaacgacagtctatagttgttattgtaatgcgtagcccagtaggtaaattgaatcttctctcccttcctactccgttggtaaactgaatcgttttctcagtattaacctttttcgaagctatcacagttaactagtacctgcttccaccctgaaccgtatatttttgtttgatttactgtgcttgcagtatggatgatgccaagaggcttatagagctagtccaagggatcccatgcaagataaacctcatctctttcaatccccacggcggttcccaattcaagcccacaccagacgataagataattgagttccgcaacgttttaattcaaggtggcctcactgtttttgttcggctcagcagaggggatgatcagatggctgcctgcgggcagctaggagagcctggaggctatcagctacctctgctccgtgtgcccgagaaatttcaggtcgccttgtgatgctaaacagtgcatacagtaaaaatggtcctgagcagcttgacgaacacacggagtaattggcttggaacgacgattcgatcgtgcaaatcttgcaagttctaccgccttcggaagcttgtgtggacttctgcaataacgtgcaaatctgaacctgggtacttgtgcgacaacacatttagacatggtgttgcttctgctagtacgtggtgtacccaaaccaaattcgataagattattattattataaattggtattttctggcaaatcgttgctgtataagacattaacagtgtaacatgctttcacttggtacttcgaaaaatatggaatgaacttatacggtaatcagcaatgagagaagaatctggaggacaaggttgcttgcctgaatgagataccttaaccactaaggtgtgcatggtactagccacctacacacctgatcaccccaaatgaaagaaagaaaaaaaa

SEQ ID NO: 77373 - DNA, 1904 bp, Zea Mays
gaaaactagcccagcccatgtatatccaccggcactcggcacgaagtccatagccagcgaaactcccgaaaccgtaccaaccagacaattcaccatggcggcgccggcgcaggcgcaggcgcaggtcctgcctctcctccggtggagccggagcgcctccttcctctgcgcctcgtcgcgccgcctcttctccgccctccaacgcccctctgccgctgctcgctgcgaggccggctccaaggccatgctcaaggggatggactactcggaactcgagaattgggtgcaggcgcaggggtttcggccaggccaggccatgatgctgtggaaatgcctgtacgggaacaacgtttgggctcattgctacgacgagttggctggtttaaataaggatttcaggaagatgataaccgagcatgctgatctcaaggcattaactatgaaggacatccatattgcatcagatggaacccgtaagatggttcagtgattgaaacagttatcattccttgcgctaggggcaggacaactatctgtgtttcaagccaagttggttgtgccatgaactgccagttttgtttcactggaaggatgggtttgagaaaacatctctcgacagctgaaattgtcgagcaggctgtgtttgctcgtaggttattctcagatgaattgggatcaattaacaatgttgtatttatgggcatgggtgaaccatttcacaatattgacaatgtaataaaagcctcagcaataatggttgatgagcaaggtcttcattttagccctcgcaaggttactgtctccacaagtggtcttgtccctcagttaaaacgcttcctccaggaatccaattgctccctggctgtcagtcttaatgcgacaacagatgaggtagtgattattctattctttttttttttttttgcattgggcagacccagcgctggaggcacccacatgagtcaggtctgggaaaggattgtttcactgttttgtaaactaacttgttttgcaggttaggaactggataatgcccataaacagaaagtacaatcttaacttgcttcttggcactttaagggaggaacttaacctcagacaaaaacaaatagtgctatttgaatatgtcatgctttctggagtgaacgacagtatggatgatgccaagaggcttatagagctagtccaagggatcccatgcaagataaacctcatctctttcaatccccacggcggttcccaattcaagcccacaccagacgataagataattgagttccgcaacgttttaattcaaggtggcctcactgtttttgttcggctcagcagaggggatgatcagatggctgcctgcgggcagctaggagagcctggaggctatcagctacctctgctccgtgtgcccgagaaatttcaggtcgccttgtgatgctaaacagtgcatacagtaaaaatggtcctgagcagcttgacgaacacacggagtaattggcttggaacgacgattcgatcgtgcaaatcttgcaagttctaccgccttcggaagcttgtgtggacttctgcaataacgtgcaaatctgaacctgggtacttgtgcgacaacacatttagacatggtgttgcttctgctagtacgtggtgtacccaaaccaaattcgataagattattattattataaattggtattttctggcaaatcgttgctgtataagacattaacagtgtaacatgctttcacttggtacttcgaaaaatatggaatgaacttatacggtaatcagcaatgagagaagaatctggaggacaaggttgcttgcctgaatgagataccttaaccactaaggtgtgcatggtactagccacctacacacctgatcaccccaaatgaaagaaagaaaaaaaa

SEQ ID NO: 77374 - DNA, 2163 bp, Zea Mays
gaaaactagcccagcccatgtatatccaccggcactcggcacgaagtccatagccagcgaaactcccgaaaccgtaccaaccagacaattcaccatggcggcgccggcgcaggcgcaggcgcaggtcctgcctctcctccggtggagccggagcgcctccttcctctgcgcctcgtcgcgccgcctcttctccgccctccaacgcccctctgccgctgctcgctgcgaggccggctccaaggccatgctcaaggggatggactactcggaactcgagaattgggtgcaggcgcaggggtttcggccaggccaggccatgatgctgtggaaatgcctgtacgggaacaacgtttgggctcattgctacgacgagttggctggtttaaataaggatttcaggaagatgataaccgagcatgctgatctcaaggcattaactatgaaggacatccatattgcatcagatggaacccgtaaggatgttacagatattgttctctcttgaagatggttcagtgattgaaacagttatcattccttgcgctaggggcaggacaactatctgtgtttcaagccaagttggttgtgccatgaactgccagttttgtttcactggaaggatgggtttgagaaaacatctctcgacagctgaaattgtcgagcaggctgtgtttgctcgtaggttattctcagatgaattgggatcaattaacaatgttgtatttatgggcatgggtgaaccatttcacaatattgacaatgtaataaaagcctcagcaataatggttgatgagcaaggtcttcattttagccctcgcaaggttactgtctccacaagtggtcttgtccctcagttaaaacgcttcctccaggaatccaattgctccctggctgtcagtcttaatgcgacaacagatgaggttaggaactggataatgcccataaacagaaagtacaatcttaacttgcttcttggcactttaagggaggaacttaacctcagacaaaaacaaatagtgctatttgaatatgtcatgctttctggagtgaacgacaggtcagatatctgctttagtgtctttgctgactgtttttgtatgttatgaatctcttagcataggttgcatataaatctccttgcaatagataactttctcccctatattcaattgttcataaggtttttctttttctatctggtccaggcatacatgtatgcctactaacgacagtctatagttgttattgtaatgcgtagcccagtaggtaaattgaatcttctctcccttcctactccgttggtaaactgaatcgttttctcagtattaacctttttcgaagctatcacagttaactagtacctgcttccaccctgaaccgtatatttttgtttgatttactgtgcttgcagtatggatgatgccaagaggcttatagagctagtccaagggatcccatgcaagataaacctcatctctttcaatccccacggcggttcccaattcaagcccacaccagacgataagataattgagttccgcaacgttttaattcaaggtggcctcactgtttttgttcggctcagcagaggggatgatcagatggctgcctgcgggcagctaggagagcctggaggctatcagctacctctgctccgtgtgcccgagaaatttcaggtcgccttgtgatgctaaacagtgcatacagtaaaaatggtcctgagcagcttgacgaacacacggagtaattggcttggaacgacgattcgatcgtgcaaatcttgcaagttctaccgccttcggaagcttgtgtggacttctgcaataacgtgcaaatctgaacctgggtacttgtgcgacaacacatttagacatggtgttgcttctgctagtacgtggtgtacccaaaccaaattcgataagattattattattataaattggtattttctggcaaatcgttgctgtataagacattaacagtgtaacatgctttcacttggtacttcgaaaaatatggaatgaacttatacggtaatcagcaatgagagaagaatctggaggacaaggttgcttgcctgaatgagataccttaaccactaaggtgtgcatggtactagccacctacacacctgatcaccccaaatgaaagaaagaaaaaaaa

SEQ ID NO: 77375 - DNA, 1816 bp, Zea Mays
ccagaaagaaaactagcccagcccatgtatatccaccggcactcggcacgaagtccatagccagcgaaactcccgaaaccgtaccaaccagacaattcaccatggcggcgccggcgcaggcgcaggcgcaggtcctgcctctcctccggtggagccggagcgcctccttcctctgcgcctcgtcgcgccgcctcttctccgccctccaacgcccctctgccgctgctcgctgcgaggccggctccaaggccatgctcaaggggatggactactcggaactcgagaattgggtgcaggcgcaggggtttcggccaggccaggccatgatgctgtggaaatgcctgtacgggaacaacgtttgggctcattgctacgacgagttggctggtttaaataaggatttcaggaagatgataaccgagcatgctgatctcaaggcattaactatgaaggacatccatattgcatcagatggaacccgtaaggatgttacagatattgttctctcttgaagatggttcagtgattgaaacagttatcattccttgcgctaggggcaggacaactatctgtgtttcaagccaagttggttgtgccatgaactgccagttttgtttcactggaaggatgggtttgagaaaacatctctcgacagctgaaattgtcgagcaggctgtgtttgctcgtaggttattctcagatgaattgggatcaattaacaatgttgtatttatgggcatgggtgaaccatttcacaatattgacaatgtaataaaagcctcagcaataatggttgatgagcaaggtcttcattttagccctcgcaaggttactgtctccacaagtggtcttgtccctcagttaaaacgcttcctccaggaatccaattgctccctggctgtcagtcttaatgcgacaacagatgaggttaggaactggataatgcccataaacagaaagtacaatcttaacttgcttcttggcactttaagggaggaacttaacctcagacaaaaacaaatagtgctatttgaatatgtcatgctttctggagtgaacgacagtatggatgatgccaagaggcttatagagctagtccaagggatcccatgcaagataaacctcatctctttcaatccccacggcggttcccaattcaagcccacaccagacgataagataattgagttccgcaacgttttaattcaaggtggcctcactgtttttgttcggctcagcagaggggatgatcagatggctgcctgcgggcagctaggagagcctggaggctatcagctacctctgctccgtgtgcccgagaaatttcaggtcgccttgtgatgctaaacagtgcatacagtaaaaatggtcctgagcagcttgacgaacacacggagtaattggcttggaacgacgattcgatcgtgcaaatcttgcaagttctaccgccttcggaagcttgtgtggacttctgcaataacgtgcaaatctgaacctgggtacttgtgcgacaacacatttagacatggtgttgcttctgctagtacgtggtgtacccaaaccaaattcgataagattattattattataaattggtattttctggcaaatcgttgctgtataagacattaacagtgtaacatgctttcacttggtacttcgaaaaatatggaatgaacttatacggtaatcagcaatgagagaagaatctggaggacaaggttgcttgcctgaatgagataccttaaccactaaggtgtgcatggtactagccacctacacacctgatcaccccaaatgaaagaaagaaaaaaaa

SEQ ID NO: 77376 - DNA, 474 bp, Zea Mays
cgcctataaaacacctcgtcccgtgcctccatcaggcatccaagctcaaagcaagcagatctaagctccaggcagcgtcgcgacagagtgagctagtgagtagcacgacaacaacaatggcttccctgaaggccgcgaagcccagcggagttgcggcgcagggcaaggagccggcgcccaagctcagcgagacggcgacgaagccgtcagccgcgaagagcggcggcgttaagaaggctgagcagaagccccgggaaaccaaaaggaaggtgaagagcagcaaacaggcggcggcggccaaaaagtgacgtacagtacgtgtggagtgtaatggagcttccatgcatgagtgaatccatgccatgttatgaatctagtccttcctttcttgtatcttccatgtgacgcggcgtgtgcgtcccctcatgtgtgatgatgccagatgaatactacaaataagacgttgttgtgaaa

SEQ ID NO: 77377 - DNA, 1174 bp, Zea Mays
aaattcactgctctcatgggcctagcgggctgaaccttatgtttcccctgcctgctgctgctgctgcgagccgaggtcaggtcggctacagtgcacattgctaaacgctcccgccgtctcgcgagccgccgccgggtccttacgcaagtccgcgacgtgcatcgcctggagaggctcccgtctcgccgccctggggatcccatctcatctgtgcagccgcgcgtggcccaagggagccagaagctaagagttagagaggcgcgtgatgtcttcagaggaggcgagggcaagcttttcggagttggtggttggttcgccaacccggacagagggcgaaacttattcttcaggtgatatgtcgtctgaggagggtgcacacgtcacttgtttcacagaggatcttcacgatgtaacacttcactttcagatagtgaggttttctaaacagatatacgtgtgggttggatgcaacacagcaaagtttggccatttatatgctgctgcaaccactagaccggagtgagtgttacctctgtactaggaggaacatctgataacaccggttcaagtatggctcgccgtctagtgctgaagactggcctgaacatagtcctggcatgcaacatcccaaaggacagccccatacttgaggctgctgcggagaggaagctggttgagaagctgaaaggtttgggctacattaaaaccccagctgtgggggctaacacttcctcggcacaatgatccgtggtgtgatctagtgagctttcggtcgacgtgtagcttcatcactacatccagcagagagcggttgtgatttttggcgggctttgactgtgctacctgttctctcatgtggcaaaaggttattgtgaacatgttcgttgtgatgtactccgccctaaaataaacccccttcgtatttcaaggagaaacaatcttaattctgactaaatatataccaaaaatactgatatttatgataccggataaacatcattagattaatcatgtcatacattttatagtaaatatgtttagagatccaaatgtagatacaatttttaacctaatgaaagttaagattgattgatctgtcgaaataatgagatgaggacgtagggagtaaatacgatagtggaatgcatattgtacaatgccttgcaactttgag

SEQ ID NO: 77378 - DNA, 1176 bp, Zea Mays
gtcaaattcattgcaatcatccagtcaaattcactgctctcatgggcctagcgggctgaaccttatgtttcccctgcctgctgctgctgctgcgagccgaggtcaggtcggctacagtgcacattgctaaacgctcccgccgtctcgcgagccgccgccgggtccttacgcaagtccgcgacgtgcatcgcctggagaggctcccgtctcgccgccctggggatcccatctcatctgtgcagccgcgcgtggcccaagggagccagaagctaagagttagagaggcgcgtgatgtcttcagaggaggcgagggcaagcttttcggagttggtggttggttcgccaacccggacagagggcgaaacttattcttcaggtgatatgtcgtctgaggagggtgcacacgtcacttgtttcacagaggatcttcacgatgtaacacttcactttcagatagtgaggttttctaaacagatatacgtgtgggttggatgcaacacagcaaagtttggccatttatatgctgctgcaaccactagaccggaggaacatctgataacaccggttcaagtatggctcgccgtctagtgctgaagactggcctgaacatagtcctggcatgcaacatcccaaaggacagccccatacttgaggctgctgcggagaggaagctggttgagaagctgaaaggtttgggctacattaaaaccccagctgtgggggctaacacttcctcggcacaatgatccgtggtgtgatctagtgagctttcggtcgacgtgtagcttcatcactacatccagcagagagcggttgtgatttttggcgggctttgactgtgctacctgttctctcatgtggcaaaaggttattgtgaacatgttcgttgtgatgtactccgccctaaaataaacccccttcgtatttcaaggagaaacaatcttaattctgactaaatatataccaaaaatactgatatttatgataccggataaacatcattagattaatcatgtcatacattttatagtaaatatgtttagagatccaaatgtagatacaatttttaacctaatgaaagttaagattgattgatctgtcgaaataatgagatgaggacgtagggagtaaatacgatagtggaatgcatattgtacaatgccttgcaactttgag

SEQ ID NO: 77379 - DNA, 1225 bp, Zea Mays
aaaaagaggtcaaattcattgcaatcatccagtcaaattcactgctctcatgggcctagcgggctgaaccttatgtttcccctgcctgctgctgctgctgcgagccgaggtcaggtcggctacagtgcacattgctaaacgctcccgccgtctcgcgagccgccgccgggtccttacgcaagtccgcgacgtgcatcgcctggagaggctcccgtctcgccgccctggggatcccatctcatctgtgcagccgcgcgtggcccaagggagccagaagctaagagttagagaggcgcgtgatgtcttcagaggaggcgagggcaagcttttcggagttggtggttggttcgccaacccggacagagggcgaaacttattcttcaggtgatatgtcgtctgaggagggtgcacacgtcacttgtttcacagaggatcttcacgatgtaacacttcactttcagatagtgaggttttctaaacagatatacgtgtgggttggatgcaacacagcaaagtttggccatttatatgctgctgcaaccactagaccggataacagagtgagtgttacctctgtactaggaggaacatctgataacaccggttcaagtatggctcgccgtctagtgctgaagactggcctgaacatagtcctggcatgcaacatcccaaaggacagccccatacttgaggtacttacaggctgctgcggagaggaagctggttgagaagctgaaaggtttgggctacattaaaaccccagctgtgggggctaacacttcctcggcacaatgatccgtggtgtgatctagtgagctttcggtcgacgtgtagcttcatcactacatccagcagagagcggttgtgatttttggcgggctttgactgtgctacctgttctctcatgtggcaaaaggttattgtgaacatgttcgttgtgatgtactccgccctaaaataaacccccttcgtatttcaaggagaaacaatcttaattctgactaaatatataccaaaaatactgatatttatgataccggataaacatcattagattaatcatgtcatacattttatagtaaatatgtttagagatccaaatgtagatacaatttttaacctaatgaaagttaagattgattgatctgtcgaaataatgagatgaggacgtagggagtaaatacgatagtggaatgcatattgtacaatgccttgcaactttgag

SEQ ID NO: 77380 - DNA, 1216 bp, Zea Mays
gatgagtcttactaggtaaaaaaagaggtcaaattcattgcaatcatccagtcaaattcactgctctcatgggcctagcgggctgaaccttatgtttcccctgcctgctgctgctgctgcgagccgaggtcaggtcggctacagtgcacattgctaaacgctcccgccgtctcgcgagccgccgccgggtccttacgcaagtccgcgacgtgcatcgcctggagaggctcccgtctcgccgccctggggatcccatctcatctgtgcagccgcgcgtggcccaagggagccagaagctaagagttagagaggcgcgtgatgtcttcagaggaggcgagggcaagcttttcggagttggtggttggttcgccaacccggacagagggcgaaacttattcttcaggtgatatgtcgtctgaggagggtgcacacgtcacttgtttcacagaggatcttcacgatgtaacacttcactttcagatagtgaggttttctaaacagatatacgtgtgggttggatgcaacacagcaaagtttggccatttatatgctgctgcaaccactagaccggataacagagtgagtgttacctctgtactaggaggaacatctgataacaccggttcaatgctgaagactggcctgaacatagtcctggcatgcaacatcccaaaggacagccccatacttgaggctgctgcggagaggaagctggttgagaagctgaaaggtttgggctacattaaaaccccagctgtgggggctaacacttcctcggcacaatgatccgtggtgtgatctagtgagctttcggtcgacgtgtagcttcatcactacatccagcagagagcggttgtgatttttggcgggctttgactgtgctacctgttctctcatgtggcaaaaggttattgtgaacatgttcgttgtgatgtactccgccctaaaataaacccccttcgtatttcaaggagaaacaatcttaattctgactaaatatataccaaaaatactgatatttatgataccggataaacatcattagattaatcatgtcatacattttatagtaaatatgtttagagatccaaatgtagatacaatttttaacctaatgaaagttaagattgattgatctgtcgaaataatgagatgaggacgtagggagtaaatacgatagtggaatgcatattgtacaatgccttgcaactttgag

SEQ ID NO: 77381 - DNA, 2014 bp, Zea Mays
cctcactgctgtttgagattaaattcaggtgatgagatgaccagggtattctggcagtctatcaaggacaagcttatcctcccatttctggacctggacatcaagtactatgatttggggatactgcaccgtgaagcaactgatgacaaggtcacagtggaggctgcagaggctactctcaagtacaacgtggctattaagtgtgcgaccattactccagatgaaactcgggttaaggagttcaatctgaaacacatgtggaagagcccaaatggcacaattaggaacattataaatggcactgtgttcagagagcctattatatgcaaaaacgttccaagacttgttccaggatggactaagcccatctgcattggaaggcatgccttcggtgatcaataccgagctaccgatgcagttctgaaggggcctgggaagctgaagctagtttttgagggaaaagaagaacagattgatctggaggtattcaacttcactggtgctggaggagttgccttgtctatgtacaacaccgacgagtcaatccgagcttttgctgaggcttctatgacaactgcttatgagaagaaatggccactctaccttagcaccaaaaacacaatcctgaaaaaatatgatggcaggtttaaggacattttccaggaggtctatgaagctgactggaagtccaaatttgaggctgctggaatatggtatgagcatcgtcttattgatgacatggttgcgtacgcgcttaagagcgaaggaggctatgtgtgggcttgcaagaactacgatggagatgtgcagagtgatttcttagctcaaggttttggatctttgggtttgatgacatcagtgttggtgtgccctgatggaaaaaccatcgaagctgaagctgcccatggcacggttacccgtcatttccgtgtccaccagaaaggaggcgaaaccagcacgaacagcattgcttcgatctttgcatggacaagaggacttgcccacagggcaaagctcgacgacaacgctagactactcgacttcgctctcaaactcgaggctgcttgcgttgagaccgtggagtccgggaagatgactaaagatctggcgattcttgtccatggatcttccagcgtcacgagaagccattacctgaacaccgaggagttcatcgacgcagtcgctactgagctccgatcaagactgggagccaactgagcctacaagaaactttgcatggcgactttgaatgcttcgtcaccgtcaccgatctgctagtcgtcttttctgttatgaagaagtgaatgtgcgtcaccgcagtttcgatgcaagctaattatagatgtggtgtcacgtgagcgctcaaaataaaggatacacatgattaaattgtttttattttacaaaatgccttccgttcaagccgcgtactaccgcgggatcacggaccactctctcagacggccaggtggttgtggtctcccaattccgcgctccagtggcaccacgtctccaggccacgcgttccaatttccacggcgctagtgacgtcgccaaaaaaggtgagaggaaaaggagggccgcgacgaggacgaccatgccggggcaaccgacaccgggactgccgcgtgatttgtgcccttgcgcacagtactacctatctatgcgtgtgtacgatatcttgtgtgcgctgcttggctgctctgtctacgcgcgcgtggactgcgactctgaaacctttcggcagcgtacgcaattgtcggatttcaataaaggaccgtctggtctgaatctctcaataaggacatgtataagtctaggttcttggttggctttttcagtataaaaacagctaagagatcagcatgatataactctaaactttaaatcagaaatgtatttcaaagacaatatgtatagaaagttgtgttgagatatgttttttatgaagagtctgtctcttgtaccttttttagttaatccttaaatacttctcaagagaccttatattaaa

SEQ ID NO: 77382 - DNA, 2221 bp, Zea Mays
acctcaaagtcgtctacccacatcataatcgacggcccacgcggccacgcgtacgtccccgattcatacaggctggccccaccttccgatcctaataagcccgctcccacactcctttcttcccctgcctgccgtctctcttccaccttccaccacaagcgccgccgcagccggtgcctgctccttcccgatccccgaggcaaagctgcgactccgcaaccgccgccatggcgttcgagaagatcaaggtctccaacccaatcgtcgagatggacggtgatgagatgaccagggtattctggcagtctatcaaggacaagcttatcctcccatttctggacctggacatcaagtactatgatttggggatactgcaccgtgaagcaactgatgacaaggtcacagtggaggctgcagaggctactctcaagtacaacgtggctattaagtgtgcgaccattactccagatgaaactcgggttaaggagttcaatctgaaacacatgtggaagagcccaaatggcacaattaggaacattataaatggcactgtgttcagagagcctattatatgcaaaaacgttccaagacttgttccaggatggactaagcccatctgcattggaaggcatgccttcggtgatcaataccgagctaccgatgcagttctgaaggggcctgggaagctgaagctagtttttgagggaaaagaagaacagattgatctggaggtattcaacttcactggtgctggaggagttgccttgtctatgtacaacaccgacgagtcaatccgagcttttgctgaggcttctatgacaactgcttatgagaagaaatggccactctaccttagcaccaaaaacacaatcctgaaaaaatatgatggcaggtttaaggacattttccaggaggtctatgaagctgactggaagtccaaatttgaggctgctggaatatggtatgagcatcgtcttattgatgacatggttgcgtacgcgcttaagagcgaaggaggctatgtgtgggcttgcaagaactacgatggagatgtgcagagtgatttcttagctcaaggttttggatctttgggtttgatgacatcagtgttggtgtgccctgatggaaaaaccatcgaagctgaagctgcccatggcacggttacccgtcatttccgtgtccaccagaaaggaggcgaaaccagcacgaacagcattgcttcgatctttgcatggacaagaggacttgcccacagcgtcacgagaagccattacctgaacaccgaggagttcatcgacgcagtcgctactgagctccgatcaagactgggagccaactgagcctacaagaaactttgcatggcgactttgaatgcttcgtcaccgtcaccgatctgctagtcgtcttttctgttatgaagaagtgaatgtgcgtcaccgcagtttcgatgcaagctaattatagatgtggtgtcacgtgagcgctcaaaataaaggatacacatgattaaattgtttttatgtcagtactaagctcagtcatccccccccccccagtatttttgtcgtttttctcctttgatttgcgtgtccattgtgttgtgtagtttacaaaatgccttccgttcaagccgcgtactaccgcgggatcacggaccactctctcagacggccaggtggttgtggtctcccaattccgcgctccagtggcaccacgtctccaggccacgcgttccaatttccacggcgctagtgacgtcgccaaaaaaggtgagaggaaaaggagggccgcgacgaggacgaccatgccggggcaaccgacaccgggactgccgcgtgatttgtgcccttgcgcacagtactacctatctatgcgtgtgtacgatatcttgtgtgcgctgcttggctgctctgtctacgcgcgcgtggactgcgactctgaaacctttcggcagcgtacgcaattgtcggatttcaataaaggaccgtctggtctgaatctctcaataaggacatgtataagtctaggttcttggttggctttttcagtataaaaacagctaagagatcagcatgatataactctaaactttaaatcagaaatgtatttcaaagacaatatgtatagaaagttgtgttgagatatgttttttatgaagagtctgtctcttgtaccttttttagttaatccttaaatacttctcaagagaccttatattaaa

SEQ ID NO: 77383 - DNA, 2329 bp, Zea Mays
acctcaaagtcgtctacccacatcataatcgacggcccacgcggccacgcgtacgtccccgattcatacaggctggccccaccttccgatcctaataagcccgctcccacactcctttcttcccctgcctgccgtctctcttccaccttccaccacaagcgccgccgcagccggtgcctgctccttcccgatccccgaggcaaagctgcgactccgcaaccgccgccatggcgttcgagaagatcaaggtctccaacccaatcgtcgagatggacggtgatgagatgaccagggtattctggcagtctatcaaggacaagcttatcctcccatttctggacctggacatcaagtactatgatttggggatactgcaccgtgaagcaactgatgacaaggtcacagtggaggctgcagaggctactctcaagtacaacgtggctattaagtgtgcgaccattactccagatgaaactcgggttaaggagttcaatctgaaacacatgtggaagagcccaaatggcacaattaggaacattataaatggcactgtgttcagagagcctattatatgcaaaaacgttccaagacttgttccaggatggactaagcccatctgcattggaaggcatgccttcggtgatcaataccgagctaccgatgcagttctgaaggggcctgggaagctgaagctagtttttgagggaaaagaagaacagattgatctggaggtattcaacttcactggtgctggaggagttgccttgtctatgtacaacaccgacgagtcaatccgagcttttgctgaggcttctatgacaactgcttatgagaagaaatggccactctaccttagcaccaaaaacacaatcctgaaaaaatatgatggcaggtttaaggacattttccaggaggtctatgaagctgactggaagtccaaatttgaggctgctggaatatggtatgagcatcgtcttattgatgacatggttgcgtacgcgcttaagagcgaaggaggctatgtgtgggcttgcaagaactacgatggagatgtgcagagttttggatctttgggtttgatgacatcagtgttggtgtgccctgatggaaaaaccatcgaagctgaagctgcccatggcacggttacccgtcatttccgtgtccaccagaaaggaggcgaaaccagcacgaacagcattgcttcgatctttgcatggacaagaggacttgcccacagggcaaagctcgacgacaacgctagactactcgacttcgctctcaaactcgaggctgcttgcgttgagaccgtggagtccgggaagatgactaaagatctggcgattcttgtccatggatcttccagcgtcacgagaagccattacctgaacaccgaggagttcatcgacgcagtcgctactgagctccgatcaagactgggagccaactgagcctacaagaaactttgcatggcgactttgaatgcttcgtcaccgtcaccgatctgctagtcgtcttttctgttatgaagaagtgaatgtgcgtcaccgcagtttcgatgcaagctaattatagatgtggtgtcacgtgagcgctcaaaataaaggatacacatgattaaattgtttttatgtcagtactaagctcagtcatccccccccccccagtatttttgtcgtttttctcctttgatttgcgtgtccattgtgttgtgtagtttacaaaatgccttccgttcaagccgcgtactaccgcgggatcacggaccactctctcagacggccaggtggttgtggtctcccaattccgcgctccagtggcaccacgtctccaggccacgcgttccaatttccacggcgctagtgacgtcgccaaaaaaggtgagaggaaaaggagggccgcgacgaggacgaccatgccggggcaaccgacaccgggactgccgcgtgatttgtgcccttgcgcacagtactacctatctatgcgtgtgtacgatatcttgtgtgcgctgcttggctgctctgtctacgcgcgcgtggactgcgactctgaaacctttcggcagcgtacgcaattgtcggatttcaataaaggaccgtctggtctgaatctctcaataaggacatgtataagtctaggttcttggttggctttttcagtataaaaacagctaagagatcagcatgatataactctaaactttaaatcagaaatgtatttcaaagacaatatgtatagaaagttgtgttgagatatgttttttatgaagagtctgtctcttgtaccttttttagttaatccttaaatacttctcaagagaccttatattaaa

SEQ ID NO: 77384 - DNA, 2357 bp, Zea Mays
acctcaaagtcgtctacccacatcataatcgacggcccacgcggccacgcgtacgtccccgattcatacaggctggccccaccttccgatcctaataagcccgctcccacactcctttcttcccctgcctgccgtctctcttccaccttccaccacaagcgccgccgcagccggtgcctgctccttcccgatccccgaggcaaagctgcgactccgcaaccgccgccatggcgttcgagaagatcaaggtctccaacccaatcgtcgagatggacggtgatgagatgaccagggtattctggcagtctatcaaggacaagcttatcctcccatttctggacctggacatcaagtactatgatttggggatactgcaccgtgaagcaactgatgacaaggtcacagtggaggctgcagaggctactctcaagtacaacgtggctattaagtgtgcgaccattactccagcatgtgatagatgaaactcgggttaaggagttcaatctgaaacacatgtggaagagcccaaatggcacaattaggaacattataaatggcactgtgttcagagagcctattatatgcaaaaacgttccaagacttgttccaggatggactaagcccatctgcattggaaggcatgccttcggtgatcaataccgagctaccgatgcagttctgaaggggcctgggaagctgaagctagtttttgagggaaaagaagaacagattgatctggaggtattcaacttcactggtgctggaggagttgccttgtctatgtacaacaccgacgagtcaatccgagcttttgctgaggcttctatgacaactgcttatgagaagaaatggccactctaccttagcaccaaaaacacaatcctgaaaaaatatgatggcaggtttaaggacattttccaggaggtctatgaagctgactggaagtccaaatttgaggctgctggaatatggtatgagcatcgtcttattgatgacatggttgcgtacgcgcttaagagcgaaggaggctatgtgtgggcttgcaagaactacgatggagatgtgcagagtgatttcttagctcaaggttttggatctttgggtttgatgacatcagtgttggtgtgccctgatggaaaaaccatcgaagctgaagctgcccatggcacggttacccgtcatttccgtgtccaccagaaaggaggcgaaaccagcacgaacagcattgcttcgatctttgcatggacaagaggacttgcccacagggcaaagctcgacgacaacgctagactactcgacttcgctctcaaactcgaggctgcttgcgttgagaccgtggagtccgggaagatgactaaagatctggcgattcttgtccatggatcttccagcgtcacgagaagccattacctgaacaccgaggagttcatcgacgcagtcgctactgagctccgatcaagactgggagccaactgagcctacaagaaactttgcatggcgactttgaatgcttcgtcaccgtcaccgatctgctagtcgtcttttctgttatgaagaagtgaatgtgcgtcaccgcagtttcgatgcaagctaattatagatgtggtgtcacgtgagcgctcaaaataaaggatacacatgattaaattgtttttatgtcagtactaagctcagtcatccccccccccccagtatttttgtcgtttttctcctttgatttgcgtgtccattgtgttgtgtagtttacaaaatgccttccgttcaagccgcgtactaccgcgggatcacggaccactctctcagacggccaggtggttgtggtctcccaattccgcgctccagtggcaccacgtctccaggccacgcgttccaatttccacggcgctagtgacgtcgccaaaaaaggtgagaggaaaaggagggccgcgacgaggacgaccatgccggggcaaccgacaccgggactgccgcgtgatttgtgcccttgcgcacagtactacctatctatgcgtgtgtacgatatcttgtgtgcgctgcttggctgctctgtctacgcgcgcgtggactgcgactctgaaacctttcggcagcgtacgcaattgtcggatttcaataaaggaccgtctggtctgaatctctcaataaggacatgtataagtctaggttcttggttggctttttcagtataaaaacagctaagagatcagcatgatataactctaaactttaaatcagaaatgtatttcaaagacaatatgtatagaaagttgtgttgagatatgttttttatgaagagtctgtctcttgtaccttttttagttaatccttaaatacttctcaagagaccttatattaaa

SEQ ID NO: 77385 - DNA, 2377 bp, Zea Mays
acctcaaagtcgtctacccacatcataatcgacggcccacgcggccacgcgtacgtccccgattcatacaggctggccccaccttccgatcctaataagcccgctcccacactcctttcttcccctgcctgccgtctctcttccaccttccaccacaagcgccgccgcagccggtgcctgctccttcccgatccccgaggcaaagctgcgactccgcaaccgccgccatggcgttcgagaagatcaaggtctccaacccaatcgtcgagatggacggtgatgagatgaccagggtattctggcagtctatcaaggacaagcttatcctcccatttctggacctggacatcaagtactatgatttggggatactgcaccgtgaagcaactgatgacaaggtcacagtggaggctgcagaggctactctcaagtacaacgtggctattaagtgtgcgaccattactccaggtacatttgattgttatgtggacgcaatatatgaaactcgggttaaggagttcaatctgaaacacatgtggaagagcccaaatggcacaattaggaacattataaatggcactgtgttcagagagcctattatatgcaaaaacgttccaagacttgttccaggatggactaagcccatctgcattggaaggcatgccttcggtgatcaataccgagctaccgatgcagttctgaaggggcctgggaagctgaagctagtttttgagggaaaagaagaacagattgatctggaggtattcaacttcactggtgctggaggagttgccttgtctatgtacaacaccgacgagtcaatccgagcttttgctgaggcttctatgacaactgcttatgagaagaaatggccactctaccttagcaccaaaaacacaatcctgaaaaaatatgatggcaggtttaaggacattttccaggaggtctatgaagctgactggaagtccaaatttgaggctgctggaatatggtatgagcatcgtcttattgatgacatggttgcgtacgcgcttaagagcgaaggaggctatgtgtgggcttgcaagaactacgatggagatgtgcagagtgatttcttagctcaaggttttggatctttgggtttgatgacatcagtgttggtgtgccctgatggaaaaaccatcgaagctgaagctgcccatggcacggttacccgtcatttccgtgtccaccagaaaggaggcgaaaccagcacgaacagcattgcttcgatctttgcatggacaagaggacttgcccacagggcaaagctcgacgacaacgctagactactcgacttcgctctcaaactcgaggctgcttgcgttgagaccgtggagtccgggaagatgactaaagatctggcgattcttgtccatggatcttccagcgtcacgagaagccattacctgaacaccgaggagttcatcgacgcagtcgctactgagctccgatcaagactgggagccaactgagcctacaagaaactttgcatggcgactttgaatgcttcgtcaccgtcaccgatctgctagtcgtcttttctgttatgaagaagtgaatgtgcgtcaccgcagtttcgatgcaagctaattatagatgtggtgtcacgtgagcgctcaaaataaaggatacacatgattaaattgtttttatgtcagtactaagctcagtcatccccccccccccagtatttttgtcgtttttctcctttgatttgcgtgtccattgtgttgtgtagtttacaaaatgccttccgttcaagccgcgtactaccgcgggatcacggaccactctctcagacggccaggtggttgtggtctcccaattccgcgctccagtggcaccacgtctccaggccacgcgttccaatttccacggcgctagtgacgtcgccaaaaaaggtgagaggaaaaggagggccgcgacgaggacgaccatgccggggcaaccgacaccgggactgccgcgtgatttgtgcccttgcgcacagtactacctatctatgcgtgtgtacgatatcttgtgtgcgctgcttggctgctctgtctacgcgcgcgtggactgcgactctgaaacctttcggcagcgtacgcaattgtcggatttcaataaaggaccgtctggtctgaatctctcaataaggacatgtataagtctaggttcttggttggctttttcagtataaaaacagctaagagatcagcatgatataactctaaactttaaatcagaaatgtatttcaaagacaatatgtatagaaagttgtgttgagatatgttttttatgaagagtctgtctcttgtaccttttttagttaatccttaaatacttctcaagagaccttatattaaa

SEQ ID NO: 77386 - DNA, 4492 bp, Zea Mays
gaaaatcaaccaacaattttccttccccattttctccacccacgaactcgtcgtctctcatccccggccgccaccgcctcccctccgttctcgcaccccaccaaaaccctagccgccgtaccccagcgcgctcgcggtcccctctccccgccgccacgtctgtctagatccgcgcgcgccctagggcttcaagggccccgcgtcgccagcttccgcatctgggctggtagtttttcagttagggttggcccgccatgcctcggagctcgcgtcacaggtcgcaccggtcccacaggcgaggagggtccgctgaccggtcggagtcagatggcgaggagtcggctccggtcgccggcgcgcgcgaggaggccgcggcggctagggtttccagagatcccgagcctgagaggcgccgctcgtcctcgggacaggaggccgtgagatcagggaacgggtacgctgagcacgggaagaagaggaaggagagggttgaggaggccgtggttgatgtggtcagcgaccggtggaacagtggcgtctgtgacgatcacctggtcgacaagaggtccaagagcgagacctttgggcatgctgaagtggagaagctggccgacaggtccaggggatcaggggatgagtccaagaggtcaagcagacgagcagtggctgtggatgacagggctgaggaggttctgtctaagagtgactctgggaaacggaggtcagagaaacagaaggatgtggggaggaaggagagtaccgggcattataaggataacagagatagggagaacgaaagggaaaggggggaagaatgggagcggcagaaggagcgagataggggaaggagtagggatagagagcgtgagaaggaaagagcacgagagaaggagagggagagagaacgggagcgtgagaaagatagggaccgagagcgggacagggagcatgagagggagcgtgataggcagaaggagcgggagtgggacaagaaagatcatgattccaagcacgagaggtatgaggatggcgggagcaggaagagtggcttgaagatgagtaggacggaacaggaggcctactcatataggagagatacagatgtcaatggcagaaatttcagcgaaagagaagtacaataatcctgatatgcaagctgaaaaacacagccgaagaaaagatgattctgaagatacagataagtggtccactgacaatagagacagtgatgacagaaagaccctgtccagatatgaacatggtaaatctaggagctctaaggaacaaaggtttgatgacgacaagtataaggaaaagtacaaggatgattacgtaagggataagaggcaacatgacgacaagttttctaatgagcgagtggcccgtagtcatgaaagtgatagagctgaatataagagtgctaaagatggacgcagaagctcagagagccattacagaaaggatgcagttcaagatgttgatcattatgaggattacaacaataggtacaaggaaagtagagggaaaaaacgacctcctgaggaaaatgatgaccaatatgatttaaagcctccaagcacacgtgatcaacgtgtgcatttggaaaaatcttcaggcagtgggcgtctggattctctgactgagagagcaagacctgatcgtagttctagtccaagtaaaatccactcaagaagttcacctagcccaagttcttatcatgacaaagatcagagccggcatgggtctaaagtggtggatcatggaaagagagaaattccatatgatgagagaaataatcgtccaagagcatcttctggtagagaaaggacacctgcttctagacttcgtgacagggatgcagaaaattggtcgtctgaaaggcttaaacagaaggatgattaccaacctcgtgatgtaacattggaaatttctacatcacactatgaccgcacacctagcaaagataagcatacttcaccaaaacaactgtctgaaaaatctccatcttcaggtgaccataggttttcaggtaggcttagtggtgggcgtagtcttgataataaaggagaaagaaagagccttacgaaatacagagatagagatggtgacatagctcaagagcgatcacatcatcaagatcgaatgccagctaaggttccattcagggagccaacaccgtcaaattcatccataagtagaggtggtcattttttgggcagttcaccaaataatcctttgccacctgcacggaacggtgacccttccttccagggtccacatgatgatgaccgtaggcctcaaaatggagataggaggttccatggtcatcaaaaaaggaatgacatgaattctgttcgtggacatggacatggctggaacagccagccaaactggccttctccagtttctaatggtttcgtccccatccaacatggtggtgctcctggttttcatccacctgtccatcagtttccaggcccacctatgtttaaccttagacctcaaatgaaattaaaccaacctggagtttcatatcctatgcatgatgctgttgataggttttcgacccacatgcgcccatttgggtggcctaatcatctggatgaatcatgcccacctcatatgcaagtttggaatggaggtagtggtgtatttcctggtgaaccctatatctatggtagacaagagtgggatcagaatagacctcatgctggtagcagaggttgggagctgactggtgatgtatccaagggaccaaatgatgtgccggatgctgaacttctggtagctaagaaggatcctgactctgcaataactgctgtttctgattctggtggacaacacaatcttcaacctgaggctgaccaaaaggaaattggacgcttgactgctgaaaactttgaagcgaagaatcatactaaaagttcaaaaagtttggaagctcctcaaggagcacaacttgtgacttctatgctgtcaaagaatagcgtggtcttttgtaaaaactatctatccagaatcagtgtttcacatgatcttgttgagcctgagttgtacaaaaggtgtatatccttgctgggagatttggacgtaacaaaaacctctcatttggttaggaatgaaattcaggataatggaaatattggaaaaatgtcaacaaaatatggaaacctcaaccctttcagttcacgttacctcaaaagtgacaatactatctttgagagagctttggcccttcataagaaccagactcaaaagggtttaactactgcctctgcatctgtaaaaatggaagagaagatggctgtaccagaagatgaccatgacatggaattgcttgaaccagtggtgagcaatcctgctccacaacgtcacactgatgtcatggaggaaggatcagtatcaaaacatgaacttggtgatggcatagggagaactattgctgcaactataggatctggggttctggatgcacctccagaaatttcacttccccaacctgaggtggtggtggcaacaacagtaatcacacagccgaacaagcacatggaggatgtgttgcctccagcaattgaggatggtgcactacaagcaaccctcgaacatgctgttggcataccggaagttacacccgctgatgtcttgctggatgttgcaccttctgctgttggagaatcaggtgatgacatggagatcataccctctgctatggcagaacctcaactaggcaaggagcctgctcctgttgctagtcctgacagtcaagagaagcccttcatgcttgattctgagacaggtatggaggttgaggttaaggttatcgatgataatcctggggatggtagggtgagctctatactcggcaccaaacttgattttgctgcaattgatggggattctgaagctttgttggtggaaagtagggtaaatttaagtcggatacctaattccccagaaagtacacattgaactcttcctattttattttaattccttttctgagggtcttgtgccctcagcctagccttttgagctgccatattctgtttacatctgggcgttcttctgtagtgtaatgttcccagtgagataggtatgcttatggggaacttggacgtacctgcgggacgcaggacctgctgcaatggcacgcctctcaagtagtgcgtgcccatccagctgcgtctcttgttctctgcttggacgcactagtgccccttgttggcataaatgtctcgctgcagcttttgctaaggtcgcccaacacattctcctgggattggattgtcgattgttagaaaaaacgagggtcccaaataaaaagtgcattagcgtttcgtctttttaattggcagtcaactagtttagatatgcttcattgcccaagcattttagttctatcgatattcacacaaatttacttattaagtaccaaattttggtataaatttggaaaatttcttctaatctatttgctgattctcacttttca

SEQ ID NO: 77387 - DNA, 4495 bp, Zea Mays
gaaaatcaaccaacaattttccttccccattttctccacccacgaactcgtcgtctctcatccccggccgccaccgcctcccctccgttctcgcaccccaccaaaaccctagccgccgtaccccagcgcgctcgcggtcccctctccccgccgccacgtctgtctagatccgcgcgcgccctagggcttcaagggccccgcgtcgccagcttccgcatctgggctggtagtttttcagttagggttggcccgccatgcctcggagctcgcgtcacaggtcgcaccggtcccacaggcgaggagggtccgctgaccggtcggagtcagatggcgaggagtcggctccggtcgccggcgcgcgcgaggaggccgcggcggctagggtttccagagatcccgagcctgagaggcgccgctcgtcctcgggacaggaggccgtgagatcagggaacgggtacgctgagcacgggaagaagaggaaggagagggttgaggaggccgtggttgatgtggtcagcgaccggtggaacagtggcgtctgtgacgatcacctggtcgacaagaggtccaagagcgagacctttgggcatgctgaagtggagaagctggccgacaggtccaggggatcaggggatgagtccaagaggtcaagcagacgagcagtggctgtggatgacagggctgaggaggttctgtctaagagtgactctgggaaacggaggtcagagaaacagaaggatgtggggaggaaggagagtaccgggcattataaggataacagagatagggagaacgaaagggaaaggggggaagaatgggagcggcagaaggagcgagataggggaaggagtagggatagagagcgtgagaaggaaagagcacgagagaaggagagggagagagaacgggagcgtgagaaagatagggaccgagagcgggacagggagcatgagagggagcgtgataggcagaaggagcgggagtgggacaagaaagatcatgattccaagcacgagaggtatgaggatggcgggagcaggaagagtggcttgaagatgagtaggacggaacaggaggcctactcatataggagagatacagatgtcaatggcagaaatttcagcgaaagagaagtacaataatcctgatatgcaagctgaaaaacacagccgaagaaaagatgattctgaagatacagataagtggtccactgacaatagagacagtgatgacagaaagaccctgtccagatatgaacatggtaaatctaggagctctaaggaacaaaggtttgatgacgacaagtataaggaaaagtacaaggatgattacgtaagggataagaggcaacatgacgacaagttttctaatgagcgagtggcccgtagtcatgaaagtgatagagctgaatataagagtgctaaagatggacgcagaagctcagagagccattacagaaaggatgcagttcaagatgttgatcattatgaggattacaacaataggtacaaggaaagtagagggaaaaaacgacctcctgaggaaaatgatgaccaatatgatttaaagcctccaagcacacgtgatcaacgtgtgcatttggaaaaatcttcaggcagtgggcgtctggattctctgactgagagagcaagacctgatcgtagttctagtccaagtaaaatccactcaagaagttcacctagcccaagttcttatcatgacaaagatcagagccggcatgggtctaaagtggtggatcatggaaagagagaaattccatatgatgagagaaataatcgtccaagagcatcttctggtagagaaaggacacctgcttctagacttcgtgacagggatgcagaaaattggtcgtctgaaaggcttaaacagaaggatgattaccaacctcgtgatgtaacattggaaatttctacatcacactatgaccgcacacctagcaaagataagcatacttcaccaaaacaactgtctgaaaaatctccatcttcaggtgaccataggttttcaggtaggcttagtggtgggcgtagtcttgataataaaggagaaagaaagagccttacgaaatacagagatagagatggtgacatagctcaagagcgatcacatcatcaagatcgaatgccagctaaggttccattcagggagccaacaccgtcaaattcatccataagtagaggtggtcattttttgggcagttcaccaaataatcctttgccacctgcacggaacggtgacccttccttccagggtccacatgatgatgaccgtaggcctcaaaatggagataggaggttccatggtcatcaaaaaaggaatgacatgaattctgttcgtggacatggacatggctggaacagccagccaaactggccttctccagtttctaatggtttcgtccccatccaacatggtggtgctcctggttttcatccacctgtccatcagtttccaggcccacctatgtttaaccttagacctcaaatgaaattaaaccaacctggagtttcatatcctatgcatgatgctgttgataggttttcgacccacatgcgcccatttgggtggcctaatcatctggatgaatcatgcccacctcatatgcaagtttggaatggaggtagtggtgtatttcctggtgaaccctatatctatggtagacaagagtgggatcagaatagacctcatgctggtagcagaggttgggagctgactggtgatgtatccaagggaccaaatgatgtgccggatgctgaacttctggtagctaagaaggatcctgactctgcaataactgctgtttctgattctggtggacaacacaatcttcaacctgaggctgaccaaaaggaaattggacgcttgactgctgaaaactttgaagcgaagaatcatactaaaagttcaaaaagtttggaagctcctcaaggagcacaacttgtgacttctatgctgtcaaagaatagcgtggtcttttgtaaaaactatctatccagaatcagtgtttcacatgatcttgttgagcctgagttgtacaaaaggtgtatatccttgctgggagatttggacgtaacaaaaacctctcatttggttaggaatgaaattcagcaggataatggaaatattggaaaaatgtcaacaaaatatggaaacctcaaccctttcagttcacgttacctcaaaagtgacaatactatctttgagagagctttggcccttcataagaaccagactcaaaagggtttaactactgcctctgcatctgtaaaaatggaagagaagatggctgtaccagaagatgaccatgacatggaattgcttgaaccagtggtgagcaatcctgctccacaacgtcacactgatgtcatggaggaaggatcagtatcaaaacatgaacttggtgatggcatagggagaactattgctgcaactataggatctggggttctggatgcacctccagaaatttcacttccccaacctgaggtggtggtggcaacaacagtaatcacacagccgaacaagcacatggaggatgtgttgcctccagcaattgaggatggtgcactacaagcaaccctcgaacatgctgttggcataccggaagttacacccgctgatgtcttgctggatgttgcaccttctgctgttggagaatcaggtgatgacatggagatcataccctctgctatggcagaacctcaactaggcaaggagcctgctcctgttgctagtcctgacagtcaagagaagcccttcatgcttgattctgagacaggtatggaggttgaggttaaggttatcgatgataatcctggggatggtagggtgagctctatactcggcaccaaacttgattttgctgcaattgatggggattctgaagctttgttggtggaaagtagggtaaatttaagtcggatacctaattccccagaaagtacacattgaactcttcctattttattttaattccttttctgagggtcttgtgccctcagcctagccttttgagctgccatattctgtttacatctgggcgttcttctgtagtgtaatgttcccagtgagataggtatgcttatggggaacttggacgtacctgcgggacgcaggacctgctgcaatggcacgcctctcaagtagtgcgtgcccatccagctgcgtctcttgttctctgcttggacgcactagtgccccttgttggcataaatgtctcgctgcagcttttgctaaggtcgcccaacacattctcctgggattggattgtcgattgttagaaaaaacgagggtcccaaataaaaagtgcattagcgtttcgtctttttaattggcagtcaactagtttagatatgcttcattgcccaagcattttagttctatcgatattcacacaaatttacttattaagtaccaaattttggtataaatttggaaaatttcttctaatctatttgctgattctcacttttca

SEQ ID NO: 77388 - DNA, 4650 bp, Zea Mays
aagacacccgcgtcggcgcgcctcgactcctttctctcgtgcccaatccggccgcgcgccccttcggccgcgccgcaccgcaccgcagcgaagcaaaccaccaccaggccgggaccaaatcccaactaaacccgtcccggcaaccctccaaatccaaagccggaaaatcaaccaacaattttccttccccattttctccacccacgaactcgtcgtctctcatccccggccgccaccgcctcccctccgttctcgcaccccaccaaaaccctagccgccgtaccccagcgcgctcgcggtcccctctccccgccgccacgtctgtctagatccgcgcgcgccctagggcttcaagggccccgcgtcgccagcttccgcatctgggctggtagtttttcagttagggttggcccgccatgcctcggagctcgcgtcacaggtcgcaccggtcccacaggcgaggagggtccgctgaccggtcggagtcagatggcgaggagtcggctccggtcgccggcgcgcgcgaggaggccgcggcggctagggtttccagagatcccgagcctgagaggcgccgctcgtcctcgggacaggaggccgtgagatcagggaacgggtacgctgagcacgggaagaagaggaaggagagggttgaggaggccgtggttgatgtggtcagcgaccggtggaacagtggcgtctgtgacgatcacctggtcgacaagaggtccaagagcgagacctttgggcatgctgaagtggagaagctggccgacaggtccaggggatcaggggatgagtccaagaggtcaagcagacgagcagtggctgtggatgacagggctgaggaggttctgtctaagagtgactctgggaaacggaggtcagagaaacagaaggatgtggggaggaaggagagtaccgggcattataaggataacagagatagggagaacgaaagggaaaggggggaagaatgggagcggcagaaggagcgagataggggaaggagtagggatagagagcgtgagaaggaaagagcacgagagaaggagagggagagagaacgggagcgtgagaaagatagggaccgagagcgggacagggagcatgagagggagcgtgataggcagaaggagcgggagtgggacaagaaagatcatgattccaagcacgagaggtatgaggatggcgggagcaggaagagtggcttgaagatgagtaggacggaacaggaggcctactcatataggagagatacagatgtcaatgaaatttcagcgaaagagaagtacaataatcctgatatgcaagctgaaaaacacagccgaagaaaagatgattctgaagatacagataagtggtccactgacaatagagacagtgatgacagaaagaccctgtccagatatgaacatggtaaatctaggagctctaaggaacaaaggtttgatgacgacaagtataaggaaaagtacaaggatgattacgtaagggataagaggcaacatgacgacaagttttctaatgagcgagtggcccgtagtcatgaaagtgatagagctgaatataagagtgctaaagatggacgcagaagctcagagagccattacagaaaggatgcagttcaagatgttgatcattatgaggattacaacaataggtacaaggaaagtagagggaaaaaacgacctcctgaggaaaatgatgaccaatatgatttaaagcctccaagcacacgtgatcaacgtgtgcatttggaaaaatcttcaggcagtgggcgtctggattctctgactgagagagcaagacctgatcgtagttctagtccaagtaaaatccactcaagaagttcacctagcccaagttcttatcatgacaaagatcagagccggcatgggtctaaagtggtggatcatggaaagagagaaattccatatgatgagagaaataatcgtccaagagcatcttctggtagagaaaggacacctgcttctagacttcgtgacagggatgcagaaaattggtcgtctgaaaggcttaaacagaaggatgattaccaacctcgtgatgtaacattggaaatttctacatcacactatgaccgcacacctagcaaagataagcatacttcaccaaaacaactgtctgaaaaatctccatcttcaggtgaccataggttttcaggtaggcttagtggtgggcgtagtcttgataataaaggagaaagaaagagccttacgaaatacagagatagagatggtgacatagctcaagagcgatcacatcatcaagatcgaatgccagctaaggttccattcagggagccaacaccgtcaaattcatccataagtagaggtggtcattttttgggcagttcaccaaataatcctttgccacctgcacggaacggtgacccttccttccagggtccacatgatgatgaccgtaggcctcaaaatggagataggaggttccatggtcatcaaaaaaggaatgacatgaattctgttcgtggacatggacatggctggaacagccagccaaactggccttctccagtttctaatggtttcgtccccatccaacatggtggtgctcctggttttcatccacctgtccatcagtttccaggcccacctatgtttaaccttagacctcaaatgaaattaaaccaacctggagtttcatatcctatgcatgatgctgttgataggttttcgacccacatgcgcccatttgggtggcctaatcatctggatgaatcatgcccacctcatatgcaagtttggaatggaggtagtggtgtatttcctggtgaaccctatatctatggtagacaagagtgggatcagaatagacctcatgctggtagcagaggttgggagctgactggtgatgtatccaagggaccaaatgatgtgccggatgctgaacttctggtagctaagaaggatcctgactctgcaataactgctgtttctgattctggtggacaacacaatcttcaacctgaggctgaccaaaaggaaattggacgcttgactgctgaaaactttgaagcgaagaatcatactaaaagttcaaaaagtttggaagctcctcaaggagcacaacttgtgacttctatgctgtcaaagaatagcgtggtcttttgtaaaaactatctatccagaatcagtgtttcacatgatcttgttgagcctgagttgtacaaaaggtgtatatccttgctgggagatttggacgtaacaaaaacctctcatttggttaggaatgaaattcaggataatggaaatattggaaaaatgtcaacaaaatatggaaacctcaaccctttcagttcacgttacctcaaaagtgacaatactatctttgagagagctttggcccttcataagaaccagactcaaaagggtttaactactgcctctgcatctgtaaaaatggaagagaagatggctgtaccagaagatgaccatgacatggaattgcttgaaccagtggtgagcaatcctgctccacaacgtcacactgatgtcatggaggaaggatcagtatcaaaacatgaacttggtgatggcatagggagaactattgctgcaactataggatctggggttctggatgcacctccagaaatttcacttccccaacctgaggtggtggtggcaacaacagtaatcacacagccgaacaagcacatggaggatgtgttgcctccagcaattgaggatggtgcactacaagcaaccctcgaacatgctgttggcataccggaagttacacccgctgatgtcttgctggatgttgcaccttctgctgttggagaatcaggtgatgacatggagatcataccctctgctatggcagaacctcaactaggcaaggagcctgctcctgttgctagtcctgacagtcaagagaagcccttcatgcttgattctgagacaggtatggaggttgaggttaaggttatcgatgataatcctggggatggtagggtgagctctatactcggcaccaaacttgattttgctgcaattgatggggattctgaagctttgttggtggaaagtagggtaaatttaagtcggatacctaattccccagaaagtacacattgaactcttcctattttattttaattccttttctgagggtcttgtgccctcagcctagccttttgagctgccatattctgtttacatctgggcgttcttctgtagtgtaatgttcccagtgagataggtatgcttatggggaacttggacgtacctgcgggacgcaggacctgctgcaatggcacgcctctcaagtagtgcgtgcccatccagctgcgtctcttgttctctgcttggacgcactagtgccccttgttggcataaatgtctcgctgcagcttttgctaaggtcgcccaacacattctcctgggattggattgtcgattgttagaaaaaacgagggtcccaaataaaaagtgcattagcgtttcgtctttttaattggcagtcaactagtttagatatgcttcattgcccaagcattttagttctatcgatattcacacaaatttacttattaagtaccaaattttggtataaatttggaaaatttcttctaatctatttgctgattctcacttttca

SEQ ID NO: 77389 - DNA, 1580 bp, Zea Mays
gcgcagtctgcgctgactgacagcacggcaataggtctcgtgctgtaccatcccagccgtccgctcgaagcagaaactgggaactgggatccacgccggcaataggtctcctactcctacgcaagaattggattccgccgactggccactgacaggtaggccacgaggaatcaatcggcctgtcccaaccagaggaatctgtggggcgggcgcagagcaggcaagagcatctggctggctggtagggtggatagcaatttggcgctgatttgatgccggccactttcatcgatcagccatggtggggaaagaagcgctggttcgatgaagctgcataaataaagccagcacgcgaaccagcagcgttcaggggaagaccatttacatatatgcccttgccccggttcctttccccggccccaactccattatttgcttgatccttgacgagcgggagagagagagagaggaagacgagaggcagcgaaggaaacagtagttcttcagttaggcaggagggcacaggaggaggaagatggcgtcgaagaggatccagaaggagctcaaggatcttcagaaggaccctcccacctcgtgcagtgcaggtcctgttggtgaagatatattccactggcaggcaacaataatgggtccatctgatagcccatattctggtggagttttcctagttacaatccattttcctcccgattatcctttcaaaccaccaaaggtggcattccgcaccaaggtgttccatccaaacatcaacagcaacgggagcatctgccttgacatcctgaaggaccagtggagcccggcgctaaccatctccaaggtgctgctgtccatctgctccctgctgaccgatccgaaccccgacgatcctctggtccccgagatagcgcacatgtacaagacggaccggaacaagtacgagaacaccgcgaggacctggacccagaggtacgccatgtagggagggggtaccctacctggccctttgggggtccgccggaattgccgctgctgcgttgtgttcctggacctggacctggactggagactggacgtgtctccgtgtattcgatcctgtgctgtataatgatgcatcagattgggtttgcagtgcagtgcgccgtgtggtgctgaatgctgtattgtgccgcttggaggctgtaattctgaatgccaaaaaactggtgattggaaccattttgcgttggatgctgctgcagacgaggccatgtttgcgtccgtcgtattggaagaaagggcgatccggagcaggtggtttcattttttttaccggcatttcaattcttttttttttcactaaggaggccttggatcaggaattagaatctatttaatagagtagactatctggtttggaattcgacattccaccactttctaaagtctacctcaaatttatatttatagggtggagaatagaaattgattccatgtatcttcgaactgtgtttctattctgcaatctgtaacatgttgttccgcttgctctcctacaataaaaatgtatggagtagcatatataattatctcctcttcatgac

SEQ ID NO: 77390 - DNA, 3099 bp, Zea Mays
caaccatgagaatgctaactggtcaaataatgattttgctaactgtaggagcatggtttatcattcctagtgtcagttaatatacttctgttaggtaaatggattttattctacagagttgaaatatgaaaaagtggaagcactgttgctacttgtgcacatgtttatgttcacaaccagagaacaaaaacttaaaaatagatggtatccattggactgccttttcagtattggactactcatgcttttatgggacaaggggaaggtatgtgaccgtcaaaaatcagcttctaagcctaatggctactaaacaaaggttaggggacagttttcagatatcagggcgaaaattaagttagtttttagctaaactccgaggccacaatctttggtcatctttaattgtgcggcgatgtctataattctgtatagtttatagtatgcaaatcaggtgatgcatctagctactcatggtacctaaagagatcatctggtcaaaaaggatgaccataaattatctaagtattattattaagtgcaaaaggattatattctaggaaacagataccaaactctggcaagaacatgtcaattacttgatgtttaacagcagatcattcaagcagaagttgtcacataaaaaaatgaatactatagaagtcctatcatttttaatataaaaaacacctccttttatagatcaactcagcacagcttctttaattacctggtaagagtattgagtatgcaagtcgatcgatgatagaaagcatgtttgtgaaggatgagtctggaaaaggtgaagaaggcgtcaattctcaggaacagttaaagaaaatgaccattccttccaagcctctaagaacactagaaaagaatttaagagcaagaatgtgcaaatagtaaaaaaagatgaggtccatgctctgcagtaataaaacaagttgaatttgattgacatgatatcactctttcttcatccttttctatataggtagtccctctcttccaaattgtaagtagtttagctttattttaagtcaaacttgtctagctttgaccaagtctatagaaaaatgcacaaatatctacaacaagtaataagattcattagatacacatgaaatatattctgatagtgcatttattaggtattataatattaatatattttttctgacttagtcaaagttaggcaactttaatttaagacaaagctaaaacgacttacaatttgaaacagagggagtagattactccttatgacatgcatcttatttctgcagcgttttcgaaacagcaaacacaatatatagaatagctaatgaaatttctacttgccgcttattctgaaggatccaaggtaacaataataccatgttaattctcatttcatgtgagacatgcaactatcatactattaaggggcagatgccaaagtcagcgtgttactgttcccagaaagaatccagtacattttatactgctcctcgatatggctaatgcaagaaaggcatgttatatacttatctgtagtactttctgcgatgaatgttatcagttcaatataattgctgaaacatgttcgaatgtagcgataaagtgactgttctgaacgtttatcttgattattattattattagtttctatatgaactaaatatattctgttcatctgtattaaaagtgaactccaatgctaaatagatgaacattttctccctcaaaattaacaagagaacatcaaatttcactgattagaagaaaggctgttacatgagttccaaaggagatgcggaaagggcgagaacagcaaatttcactgattagaagaaaggctgttacatgagttccaaaggagatggcgaaagggcttaactcgctcattattctcgttttatgggagaaggttgaagcagcaccttgttgggtggacagtcaaaatgaaacaattagagaaggggatgatcttgcatgggctcatgtggatgatgcaatcggtgcttctagttcacttcaaggtcgcaacttcccaagaagagcccgatatgagtctgtttattcaaggcgttgtcaagctgctgctacacaggaggagagagttatggaagaggaagagcaaggcaatgagggcaatgaacaagatgacgaagagtacatgtctaattatgatgaagaagtggatgactttggtgaatccccacataacagtccaactcaagctggtgctggtggtgaagaaaatgcaatggatgatcttgatttgggagatatttagggtatctagtatctatctagctacaacagcagcttagatctaatggagtttatttcctttcaagtttgaactatattttcttgctatttgttttccaatttgaactatatgactgttatgacttatgagtttatgacttatcacttatgtggctgatttggttcagtttgaggcttcaaatgaggtaagacttgctgtttatttcagtttcgttcaatttcaaacttcaaaagaggtaaaacatcctctttcttcatatataattgatatattgtctatatgaagccattatataggcaaaacagccactatattggcaagtccacgactagtcgactgacttatcgactagtcaccaagtcggtaccttgtcgactcgactcgacttactgacttgaaaaccttgtgtggaagcaccggaattcttgtgtgtttgaaggggctgtctaatatccatacccttcttcagaccatagatgatgaatgcagtttgtggtgtatggctgaagcatcaaagctgaatgaattgctagcaaggtcgttggtccagattacccagtgtttggagtagtttgttcaggtcctggtcatgtatcttcccacccctcccttttttcagtgtgggtgggagtgtgttcggttatttacggcgagttgggcttctttcaaaatccaactcgttttatactctttctatcttaatgaaatgacacgcagctctcctgcttcattcacaaaaaaaaagaattgcagcaagacaaaatgaaaaaaaggctcggctctcaactgcaataaaaaagaaagaaaactaagtgtaaatg

SEQ ID NO: 77391 - DNA, 577 bp, Zea Mays
ctttgctcctctggttttgtttgactttcagtaatcagaaatgtgagattgcaaagcacttgtcccttccaccagtaaagctccattgcagcatgcttgcggaggatgccattaaagctgctgtgaaagactacgaagccaagaaggcgaagatggggcaaaagagtgaagacagtccatcagagaaagctgctgaagcatgaaagtttctgccttttttaagtgtaattgagctgatatgtttctcagtccatgactccccgctgcttcagataaatgcttctgattgcgaggcgaggcgagggaccgcgtgtaatgttcacaaattctggtagtgcggcatgtgccttaactcttttgaggatggtgacaaccaatttcaaataaatttggtgccatcttagaattagaagtactatgtggatatcacatagtggaagtgttttctgtcaactacataattgaattacggccgtcgttgcacggaggctattttaaaatgttgtattgtatgtggtatggattcgcttacgggcctgaaactgttctattggaatcgataattttatttataggc

SEQ ID NO: 77392 - DNA, 615 bp, Zea Mays
aagtaaaacgtataatctatgaatagctactgaatgggtgaagggaaaaccaatggatgaagtcttgacaatcaagaatactgagattgcaaagcacttgtcccttccaccagtaaagctccattgcagcatgcttgcggaggatgccattaaagctgctgtgaaagactacgaagccaagaaggcgaagatggggcaaaagagtgaagacagtccatcagagaaagctgctgaagcatgaaagtttctgccttttttaagtgtaattgagctgatatgtttctcagtccatgactccccgctgcttcagataaatgcttctgattgcgaggcgaggcgagggaccgcgtgtaatgttcacaaattctggtagtgcggcatgtgccttaactcttttgaggatggtgacaaccaatttcaaataaatttggtgccatcttagaattagaagtactatgtggatatcacatagtggaagtgttttctgtcaactacataattgaattacggccgtcgttgcacggaggctattttaaaatgttgtattgtatgtggtatggattcgcttacgggcctgaaactgttctattggaatcgataattttatttataggc

SEQ ID NO: 77393 - DNA, 641 bp, Zea Mays
ctagcgccacgtctggagttctcctcgctttcccctaagtgattcgggtgtgctactgaatgggtgaagggaaaaccaatggatgaagtcttgacaatcaagaatactgagattgcaaagcacttgtcccttccaccagtaaagctccattgcagcatgcttgcggaggatgccattaaagctgctgtgaaagactacgaagccaagaaggcgaagatggggcaaaagagtgaagacagtccatcagagaaagctgctgaagcatgaaagtttctgccttttttaagtgtaattgagctgatatgtttctcagtccatgactccccgctgcttcagataaatgcttctgattgcgaggcgaggcgagggaccgcgtgtaatgttcacaaattctggtagtgcggcatgtgccttaactcttttgaggatggtgacaaccaatttcaaataaatttggtgccatcttagaattagaagtactatgtggatatcacatagtggaagtgttttctgtcaactacataattgaattacggccgtcgttgcacggaggctattttaaaatgttgtattgtatgtggtatggattcgcttacgggcctgaaactgttctattggaatcgataattttatttataggc

SEQ ID NO: 77394 - DNA, 3444 bp, Zea Mays
atggtcctcgccttagttaccgccacctcgttcaccatcctgcttcttttctctctcccctcatgcctccacctccgcgtcaccccattctcgacagagggcgtgggagcaggcacctcctccccgtattcgtccgacaccagccttgacaccgatccacacagtggctattgcacgttcacgaggacgtttcacagcatgcgtgcaccatcattttcgccgtcgtcggacatcccgttggtcttcccggccttcgtcctattcttcacccccgcccacggtcgcagccgcaagccgaccaacgctcgtcgacgcggctcacagacgtatataaatgtaggcgagggcgaggcagggagggttttggaatttggccgccgtttgcgttgcgtgggtaggggaagaagcaggcggccaggcgcagagccgcaaaagcagacgcggaagcagcccaggcccgagccgaagcggggaggcgacgccgctgcactaccactcacccggtcagcgatttgccgccttgcgggagccagttttggcgtcggcgtcggcgtggagttcccggagaggggttctggcgaggatgagcggcagcggcagcggcagcggcggagggggagccagggggcagtcggggcccgtgccggcgtccgcgaggaagctcgtgcaggggctcaaggagatcgtgaaccgtcccgacgcggagatctacgcggcgctgcgggagtgcggcatggaccccgacgaggcggtcagtcggctcctctgccaagatacttttcaagaggtaaagagcaagcgtgataagaaaaaggaggttaaagaaaccctagatccaagatctcgaggagcaagtaactcctgtcgatccagtagaggtggtatggaccgtgctggacgaagcagttcagtccagtctggatccagtggcactgattatgtgacttcaaggtcatccatattgggacctgctgtgccagttaagccaacagttcctagtttgtcaacaaacaaagatgtggtttttaatggatcagttggagcaccacaatcatcatctggttttcagcataattggtttggggtgccaggtcagatgtcaatggctgatatagtgaaaatgggaagacctcaagtgaggtcttctggaaagcctatggctgcagcagacacatcatatgctggtcaaaccccatctttatctagctctgtaaaccagaactcgaaacaatctgctagcacaaccctaccaactacttttgatcagggctttcctgctctcccagaccctattccacatactgtgaattctagtcatggttctgctgggaacaaccatacacatgagaatgattggtttcctcaggatgagcctcaatctggagttcagtccacaggcattgaggcatctgaagagaacaactcaactgcagttaaagcaacagtgtcttccgaaagacacttggaaattgtggaggaggacaatcattacaacgatgggttattgcagaactgtgcttaccaggctcaagtgcactcctatgttgataatgaagttggggtttctaatgttgatgcagaatcagccgtggcaaactttcagcatttaagcctacagaatgaagatatagttgtaaccaaatctgaagataaccatgcggttatactccctgatcatctacaagctacaaatgcagactgtgctcatctgagctttggtagttttgaatctggtgccttctctggcttgttttcatcaaaggtcacaaaagacagtttggaggacaacgaggtgcatattccagatgaatccccatcagttaatctcgatgccaggaatcaagattactacgacaacgatgctctaaatttgtcagcaaatgaggatgttgagacaagaattggtactaacatggataacattgatggaccttcagtttcacagtctgatgtaccgaggcagggggccatagatgtgcctggtcttcaatatgacatgccatcagttccaagtcatgcatattcaagcacaacgcagccaagtaaaatggaagacccacaaggaaacacacaagcacaacccctttcccatttttctggcttactgcaagcaaatactctacccaattacttgttggggtcaaatcttacccctattcgggagtttgacttctcgcagttacttcagacacagtcagctacaaagtataacccatctgcggcacctaataatctgccagcaatctccatgcaagagactttaaaaccaggaggctttcccaacactcagtctacgcaacatgttcccaatacgagcataccatcgggtcttcctctcccacaacaattgcctgtatactctcagccaactctgcctcttgggccttttaccagcctggttggctatccatatttgcctcagaactactacctaccatctgcggccttccagcaagcgtactcaagtaatgggcctttccatcaatctggtgctcctgctgtgcctggagctggtatgaagtattcgatgccacaatacaagagcagcccacctgcttcgagcctaccacagccatcatcactctctggttatggagggttcggaaatgcaaataatattcctggaaatttcagcctaaatcagggtgctccctctgcgcctacaactttgggatttgatgaagctttaggcacacaattcaaagaccccaatcactatgcagctctacagcagagtgataattcggcaatgtggcttcatggaggcgctggttcaagaacagtttctgcagttccgcctggtaacttctatggtcttcagggccagagccagcagggtggcttccgccaggcacatcagccctctcaatacggtggtcttgggtacccaagcttctaccagtcgcagtcgcaggccagtctgccacaggagcacccccagaacctcaccgagggaagcttgaacaattcccagggcgtaccatcccagccatcgcaccatctctggcagcacagctactaaaccttctgtgctctcttgggagatgcctctctacgctgccaggttatctgcaagccttggcacgctgcgccgtgaagcgaacagactagctgaactgccgtcttgagcggtgctgagcagaggacggtccatccaacagcgatggagtgcttgtttttttccctttctttcccagttgtgttctgaaactaatttaagctgtcgcggtttttatttgatagtgagtggtgttgcaaaggtgctatcttgtaacggtgaagtcctaactcatctaacagatctgcttcccatacccctgtaatatgccattttgttcttgatgcctagaagcttgaagcttctacgtgttgctgctactttcatacgcatgtatgtctatgaagctgaaatcctggtttgcggactgggtgtttggttcctac

SEQ ID NO: 77395 - DNA, 1998 bp, Zea Mays
gtctcacttcatgtgcgcaggtgcgcgccgtgctcgactttccggcttctcctctctcgccaggaaacaaaggccgtgctcgactttccgcattccggcgtcactgcgcgcaagcaatagcagtaggccccttctcctgttctaactgaggggtcgaggacaaagctcctcattgagttctccttcagtggggtttgatgcgaggtgctgccaaggtcatttcctcttgctgtgctccgcctctcgttcagataaagcggtcgggataagtttgtaaattgcttgtcaaatcaggacaagattctgaattaggggaacctaccgcatagtttgctcatcagacaggccgaaggacaatgtcatcgcctaacaattctgtcagcgcggcactgtcagaaacgacccccgtgtttcagttgagagtatggcaactgattgccattgctgtcgggatagtcatggcgatcctgctcgtcattgcgctttgcctttcgctccagaggaaaaagaagacagtgaaagggtttgacaacagttcgctggctgagatccctatcgtttctaaggaaatcaatgttgacagagttggtgctcagagtctacatgacagtgaagcgcccttcatgccagtgcgggataagtatacgcagaccaaaggtgcagggcagttgggagagagtagatccgtcgacgccgataccttcagccagttcagctcagtgtacaacgtagagaagggtgggagctcatactctgaagattacagtcacagcagctctggtccagctaggaaagggggcaggcagagaaggaatttagagttgaagttgaagccatcggccatgttcggcataagaatctggtccgccttctgggatactgcgtggaagggatacataggatgcttgtctatgaatatgtcaataatggcaacctagaacaatggcttcatggcatgaatcaacacggtgtccttagttgggaaaatcgtatgaaaattctccttggcactgcaaaagctctcgcgtaccttcatgaggccatagatcccaaagttgtacacagagatatcaagtcaagtaatatcttaattgacgatgaattcaacagcaaggtttctgattttgggttggctaaacttctgaattctgacaaaagtcatatcaatacaagagtgatgggaacatatgggtatgtagcacctgaatatgcaaacagtgggatgctaaatgaaaagagtgatatttacagtttcggagtggtgctgttagaatgtgcgaccgctagggatccagtcgattactctaagcctgcagatgaggtgaatctcatagagtggcttaaaatgatggtcaccagtaagagggcagaggaggtagtggatccaaacctcaatgttaagccaccaaaacgtgccctcaagcggacaatcctggttggtttcaagtgtgtcgatcctgacgctgacaagaggccaaagatgagtcacgttgtccagatgcttgaagcagttcagaatgcatatcatgaagatcaaagcaagctcagccaggtgggatcacagcagtcgctagaggagacctcaaacagcgctgatgcctgaacctcctattctgaacaagcacatcaaataggaccctgaatcatctgatagcaacattgatttgatcattgctcggcacttaatagagtgagcggtgatcggatttacagtttgggtttgcatatactggaggtggtggttaaatcaattagtagcaagttgtttctaaaaggttcatgtcttttacccttaggatatgtatagttttcctgtaggggagcatagaagcaccttcatctttatttgttgttcgagttacaaggagggactaacctcaggcatataactacagtcactggatttcgttacccatgtgtagtgactttttggaaagtcgttattaccctgagatatgaaaacatgaattcctgcaacgaagtactaccccgttctcg

SEQ ID NO: 77396 - DNA, 2116 bp, Zea Mays
ctccgagtctcacttcatgtgcgcaggtgcgcgccgtgctcgactttccggcttctcctctctcgccaggaaacaaaggccgtgctcgactttccgcattccggcgtcactgcgcgcaagcaatagcagtaggccccttctcctgttctaactgaggggtcgaggacaaagctcctcattgagttctccttcagtggggtttgatgcgaggtgctgccaaggtcatttcctcttgctgtgctccgcctctcgttcagataaagcggtcgggataagtttgtaaattgcttgtcaaatcaggacaagattctgaattaggggaacctaccgcatagtttgctcatcagacaggccgaaggacaatgtcatcgcctaacaattctgtcagcgcggcactgtcagaaacgacccccgtgtttcagttgagagtatggcaactgattgccattgctgtcgggatagtcatggcgatcctgctcgtcattgcgctttgcctttcgctccagaggaaaaagaagacagtgaaagggtttgacaacagttcgctggctgagatccctatcgtttctaaggaaatcaatgttgacagagttggtgctcagagtctacatgacagtgaagcgcccttcatgccagtgcgggataagtatacgcagaccaaaggtgcagggcagttgggagagagtagatccgtcgacgccgataccttcagccagttcagctcagtgtacaacgtagagaagggtgggagctcatactctgaagattacagtcacagcagctctggtccagctaggaaaggtagctcaccatatgcatattcagcatcaccgctggttggcctgcctgagttatcacatctaggctggggccactggtttaccttgagggacctggagtgtgcaacgaatcggtttgcaaagagtaatgttcttggggagggtggctatggagttgtctacaagggtcgtctggtaaatgggaccgagattgccgtgaagaagatccttaataatctgatgcttgtctatgaatatgtcaataatggcaacctagaacaatggcttcatggcatgaatcaacacggtgtccttagttgggaaaatcgtatgaaaattctccttggcactgcaaaagctctcgcgtaccttcatgaggccatagatcccaaagttgtacacagagatatcaagtcaagtaatatcttaattgacgatgaattcaacagcaaggtttctgattttgggttggctaaacttctgaattctgacaaaagtcatatcaatacaagagtgatgggaacatatgggtatgtagcacctgaatatgcaaacagtgggatgctaaatgaaaagagtgatatttacagtttcggagtggtgctgttagaatgtgcgaccgctagggatccagtcgattactctaagcctgcagatgaggtgaatctcatagagtggcttaaaatgatggtcaccagtaagagggcagaggaggtagtggatccaaacctcaatgttaagccaccaaaacgtgccctcaagcggacaatcctggttggtttcaagtgtgtcgatcctgacgctgacaagaggccaaagatgagtcacgttgtccagatgcttgaagcagttcagaatgcatatcatgaagatcaaagcaagctcagccaggtgggatcacagcagtcgctagaggagacctcaaacagcgctgatgcctgaacctcctattctgaacaagcacatcaaataggaccctgaatcatctgatagcaacattgatttgatcattgctcggcacttaatagagtgagcggtgatcggatttacagtttgggtttgcatatactggaggtggtggttaaatcaattagtagcaagttgtttctaaaaggttcatgtcttttacccttaggatatgtatagttttcctgtaggggagcatagaagcaccttcatctttatttgttgttcgagttacaaggagggactaacctcaggcatataactacagtcactggatttcgttacccatgtgtagtgactttttggaaagtcgttattaccctgagatatgaaaacatgaattcctgcaacgaagtactaccccgttctcg

SEQ ID NO: 77397 - DNA, 2236 bp, Zea Mays
ctttactccctccctctccgagtctcacttcatgtgcgcaggtgcgcgccgtgctcgactttccggcttctcctctctcgccaggaaacaaaggccgtgctcgactttccgcattccggcgtcactgcgcgcaagcaatagcagtaggccccttctcctgttctaactgaggggtcgaggacaaagctcctcattgagttctccttcagtggggtttgatgcgaggtgctgccaaggtcatttcctcttgctgtgctccgcctctcgttcagataaagcggtcgggataagtttgtaaattgcttgtcaaatcaggacaagattctgaattaggggaacctaccgcatagtttgctcatcagacaggccgaaggacaatgtcatcgcctaacaattctgtcagcgcggcactgtcagaaacgacccccgtgtttcagttgagagtatggcaactgattgccattgctgtcgggatagtcatggcgatcctgctcgtcattgcgctttgcctttcgctccagaggaaaaagaagacagtgaaagggtttgacaacagttcgctggctgagatccctatcgtttctaaggaaatcaatgttgacagagttggtgctcagagtctacatgacagtgaagcgcccttcatgccagtgcgggataagtatacgcagaccaaaggtgcagggcagttgggagagagtagatccgtcgacgccgataccttcagccagttcagctcagtgtacaacgtagagaagggtgggagctcatactctgaagattacagtcacagcagctctggtccagctaggaaaggtagctcaccatatgcatattcagcatcaccgctggttggcctgcctgagttatcacatctaggctggggccactggtttaccttgagggacctggagtgtgcaacgaatcggtttgcaaagagtaatgttcttggggagggtggctatggagttgtctacaagggtcgtctggtaaatgggaccgagattgccgtgaagaagatccttaataatctggggcaggcagagaaggaatttagagttgaagttgaagccatcggccatgttcggcataagaatctggtccgccttctgggatactgcgtggaagggatacataggatgcttgtctatgaatatgtcaataatggcaacctagaacaatggcttcatggcatgaatcaacacggtgtccttagttgggaaaatcgtatgaaaattctccttggcactgcaaaagctctcgcgtaccttcatgaggccatagatcccaaagttgtacacagagatatcaagtcaagtaatatcttaattgacgatgaattcaacagcaaggtttctgattttgggttggctaaacttctgaattctgacaaaagtcatatcaatacaagagtgatgggaacatatgggtatgtagcacctgaatatgcaaacagtgggatgctaaatgaaaagagtgatatttacagtttcggagtggtgctgttagaatgtgcgaccgctagggatccagtcgattactctaagcctgcagatgaggtgaatctcatagagtggcttaaaatgatggtcaccagtaagagggcagaggaggtagtggatccaaacctcaatgttaagccaccaaaacgtgccctcaagcggacaatcctggttggtttcaagtgtgtcgatcctgacgctgacaagaggccaaagatgagtcacgttgtccagatgcttgaagcagttcagaatgcatatcatgaagatcaaagcaagctcagccaggtgggatcacagcagtcgctagaggagacctcaaacagcgctgatgcctgaacctcctattctgaacaagcacatcaaataggaccctgaatcatctgatagcaacattgatttgatcattgctcggcacttaatagagtgagcggtgatcggatttacagtttgggtttgcatatactggaggtggtggttaaatcaattagtagcaagttgtttctaaaaggttcatgtcttttacccttaggatatgtatagttttcctgtaggggagcatagaagcaccttcatctttatttgttgttcgagttacaaggagggactaacctcaggcatataactacagtcactggatttcgttacccatgtgtagtgactttttggaaagtcgttattaccctgagatatgaaaacatgaattcctgcaacgaagtactaccccgttctcg

SEQ ID NO: 77398 - DNA, 2201 bp, Zea Mays
ctttactccctccctctccgagtctcacttcatgtgcgcaggtgcgcgccgtgctcgactttccggcttctcctctctcgccaggaaacaaaggccgtgctcgactttccgcattccggcgtcactgcgcgcaagcaatagcagtaggccccttctcctgttctaactgaggggtcgaggacaaagctcctcattgagttctccttcagtggggtttgatgcgaggtgctgccaagataaagcggtcgggataagtttgtaaattgcttgtcaaatcaggacaagattctgaattaggggaacctaccgcatagtttgctcatcagacaggccgaaggacaatgtcatcgcctaacaattctgtcagcgcggcactgtcagaaacgacccccgtgtttcagttgagagtatggcaactgattgccattgctgtcgggatagtcatggcgatcctgctcgtcattgcgctttgcctttcgctccagaggaaaaagaagacagtgaaagggtttgacaacagttcgctggctgagatccctatcgtttctaaggaaatcaatgttgacagagttggtgctcagagtctacatgacagtgaagcgcccttcatgccagtgcgggataagtatacgcagaccaaaggtgcagggcagttgggagagagtagatccgtcgacgccgataccttcagccagttcagctcagtgtacaacgtagagaagggtgggagctcatactctgaagattacagtcacagcagctctggtccagctaggaaaggtagctcaccatatgcatattcagcatcaccgctggttggcctgcctgagttatcacatctaggctggggccactggtttaccttgagggacctggagtgtgcaacgaatcggtttgcaaagagtaatgttcttggggagggtggctatggagttgtctacaagggtcgtctggtaaatgggaccgagattgccgtgaagaagatccttaataatctggggcaggcagagaaggaatttagagttgaagttgaagccatcggccatgttcggcataagaatctggtccgccttctgggatactgcgtggaagggatacataggatgcttgtctatgaatatgtcaataatggcaacctagaacaatggcttcatggcatgaatcaacacggtgtccttagttgggaaaatcgtatgaaaattctccttggcactgcaaaagcgtctcgcgtaccttcatgaggccatagatcccaaagttgtacacagagatatcaagtcaagtaatatcttaattgacgatgaattcaacagcaaggtttctgattttgggttggctaaacttctgaattctgacaaaagtcatatcaatacaagagtgatgggaacatatgggtatgtagcacctgaatatgcaaacagtgggatgctaaatgaaaagagtgatatttacagtttcggagtggtgctgttagaatgtgcgaccgctagggatccagtcgattactctaagcctgcagatgaggtgaatctcatagagtggcttaaaatgatggtcaccagtaagagggcagaggaggtagtggatccaaacctcaatgttaagccaccaaaacgtgccctcaagcggacaatcctggttggtttcaagtgtgtcgatcctgacgctgacaagaggccaaagatgagtcacgttgtccagatgcttgaagcagttcagaatgcatatcatgaagatcaaagcaagctcagccaggtgggatcacagcagtcgctagaggagacctcaaacagcgctgatgcctgaacctcctattctgaacaagcacatcaaataggaccctgaatcatctgatagcaacattgatttgatcattgctcggcacttaatagagtgagcggtgatcggatttacagtttgggtttgcatatactggaggtggtggttaaatcaattagtagcaagttgtttctaaaaggttcatgtcttttacccttaggatatgtatagttttcctgtaggggagcatagaagcaccttcatctttatttgttgttcgagttacaaggagggactaacctcaggcatataactacagtcactggatttcgttacccatgtgtagtgactttttggaaagtcgttattaccctgagatatgaaaacatgaattcctgcaacgaagtactaccccgttctcg

SEQ ID NO: 77399 - DNA, 1989 bp, Zea Mays
cttcccctttactccctccctctccgagtctcacttcatgtgcgcaggtgcgcgccgtgctcgactttccggcttctcctctctcgccaggaaacaaaggccgtgctcgactttccgcattccggcgtcactgcgcgcaagcaatagcagtaggccccttctcctgttctaactgaggggtcgaggacaaagctcctcattgagttctccttcagtggggtttgatgcgaggtgctgccaagataaagcggtcgggataagtttgtaaattgcttgtcaaatcaggacaagattctgaattaggggaacctaccgcatagtttgctcatcagacaggccgaaggacaatgtcatcgcctaacaattctgtcagcgcggcactgtcagaaacgacccccgtgtttcagttgagagtatggcaactgattgccattgctgtcgggatagtcatggcgatcctgctcgtcattgcgctttgcctttcgctccagaggaaaaagaagacagtgaaagggtttgacaacagttcgctggctgagatccctatcgtttctaaggaaatcaatgttgacagagttggtgctcagagtctacatgacagtgaagcgcccttcatgccagtgcgggataagtatacgcagaccaaaggtgcagggcagttgggagagagtagatccgtcgacgccgataccttcagccagttcagctcagtgtacaacgtagagaagggtgggagctcatactctgaagattacagtcacagcagctctggtccagctaggaaagggggcaggcagagaaggaatttagagttgaagttgaagccatcggccatgttcggcataagaatctggtccgccttctgggatactgcgtggaagggatacataggatgcttgtctatgaatatgtcaataatggcaacctagaacaatggcttcatggcatgaatcaacacggtgtccttagttgggaaaatcgtatgaaaattctccttggcactgcaaaagctctcgcgtaccttcatgaggccatagatcccaaagttgtacacagagatatcaagtcaagtaatatcttaattgacgatgaattcaacagcaaggtttctgattttgggttggctaaacttctgaattctgacaaaagtcatatcaatacaagagtgatgggaacatatgggtatgtagcacctgaatatgcaaacagtgggatgctaaatgaaaagagtgatatttacagtttcggagtggtgctgttagaatgtgcgaccgctagggatccagtcgattactctaagcctgcagatgaggtgaatctcatagagtggcttaaaatgatggtcaccagtaagagggcagaggaggtagtggatccaaacctcaatgttaagccaccaaaacgtgccctcaagcggacaatcctggttggtttcaagtgtgtcgatcctgacgctgacaagaggccaaagatgagtcacgttgtccagatgcttgaagcagttcagaatgcatatcatgaagatcaaagcaagctcagccaggtgggatcacagcagtcgctagaggagacctcaaacagcgctgatgcctgaacctcctattctgaacaagcacatcaaataggaccctgaatcatctgatagcaacattgatttgatcattgctcggcacttaatagagtgagcggtgatcggatttacagtttgggtttgcatatactggaggtggtggttaaatcaattagtagcaagttgtttctaaaaggttcatgtcttttacccttaggatatgtatagttttcctgtaggggagcatagaagcaccttcatctttatttgttgttcgagttacaaggagggactaacctcaggcatataactacagtcactggatttcgttacccatgtgtagtgactttttggaaagtcgttattaccctgagatatgaaaacatgaattcctgcaacgaagtactaccccgttctcg

SEQ ID NO: 77400 - DNA, 2235 bp, Zea Mays
ctcctctttctccaccacccctccctttgcttcccctttactccctccctctccgagtctcacttcatgtgcgcaggtgcgcgccgtgctcgactttccggcttctcctctctcgccaggaaacaaaggccgtgctcgactttccgcattccggcgtcactgcgcgcaagcaatagcagtaggccccttctcctgttctaactgaggggtcgaggacaaagctcctcattgagttctccttcagtggggtttgatgcgaggtgctgccaagataaagcggtcgggataagtttgtaaattgcttgtcaaatcaggacaagattctgaattaggggaacctaccgcatagtttgctcatcagacaggccgaaggacaatgtcatcgcctaacaattctgtcagcgcggcactgtcagaaacgacccccgtgtttcagttgagagtatggcaactgattgccattgctgtcgggatagtcatggcgatcctgctcgtcattgcgctttgcctttcgctccagaggaaaaagaagacagtgaaagggtttgacaacagttcgctggctgagatccctatcgtttctaaggaaatcaatgttgacagagttggtgctcagagtctacatgacagtgaagcgcccttcatgccagtgcgggataagtatacgcagaccaaaggtgcagggcagttgggagagagtagatccgtcgacgccgataccttcagccagttcagctcagtgtacaacgtagagaagggtgggagctcatactctgaagattacagtcacagcagctctggtccagctaggaaaggtagctcaccatatgcatattcagcatcaccgctggttggcctgcctgagttatcacatctaggctggggccactggtttaccttgagggacctggagtgtgcaacgaatcggtttgcaaagagtaatgttcttggggagggtggctatggagttgtctacaagggtcgtctggtaaatgggaccgagattgccgtgaagaagatccttaataatctggggcaggcagagaaggaatttagagttgaagttgaagccatcggccatgttcggcataagaatctggtccgccttctgggatactgcgtggaagggatacataggatgcttgtctatgaatatgtcaataatggcaacctagaacaatggcttcatggcatgaatcaacacggtgtccttagttgggaaaatcgtatgaaaattctccttggcactgcaaaagctctcgcgtaccttcatgaggccatagatcccaaagttgtacacagagatatcaagtcaagtaatatcttaattgacgatgaattcaacagcaaggtttctgattttgggttggctaaacttctgaattctgacaaaagtcatatcaatacaagagtgatgggaacatatgggtatgtagcacctgaatatgcaaacagtgggatgctaaatgaaaagagtgatatttacagtttcggagtggtgctgttagaatgtgcgaccgctagggatccagtcgattactctaagcctgcagatgaggtgaatctcatagagtggcttaaaatgatggtcaccagtaagagggcagaggaggtagtggatccaaacctcaatgttaagccaccaaaacgtgccctcaagcggacaatcctggttggtttcaagtgtgtcgatcctgacgctgacaagaggccaaagatgagtcacgttgtccagatgcttgaagcagttcagaatgcatatcatgaagatcaaagcaagctcagccaggtgggatcacagcagtcgctagaggagacctcaaacagcgctgatgcctgaacctcctattctgaacaagcacatcaaataggaccctgaatcatctgatagcaacattgatttgatcattgctcggcacttaatagagtgagcggtgatcggatttacagtttgggtttgcatatactggaggtggtggttaaatcaattagtagcaagttgtttctaaaaggttcatgtcttttacccttaggatatgtatagttttcctgtaggggagcatagaagcaccttcatctttatttgttgttcgagttacaaggagggactaacctcaggcatataactacagtcactggatttcgttacccatgtgtagtgactttttggaaagtcgttattaccctgagatatgaaaacatgaattcctgcaacgaagtactaccccgttctcg

SEQ ID NO: 77401 - DNA, 3378 bp, Zea Mays
agaacacccctcctcctcctccaaaaaaataaaaaaaattccatccgtcagtatatatgtagtatgtgcatcatcttcctacacatccagactatttcgcgcgcgcacaccacgtacacatagcaccccccatccctttcgttccctaccagcactacgctacgccccccactgccatatagccgtatacgacgctcgcttgcctggccgtcttgatctctcacttcctcgcccccgataagtgagcaagcggcaagaaccagcaggcaaccacacagtcgcagcagcagcagcagcggcggcgcgcccatgtcgtcgggagacttccactaccacgacgagctggcggcgctgttcgcgcagcggccggcgccggcgggagagatgacgatggcgctgcagcaacaggcgccggcggcgtcgtggttcgcggactacctgcacgcgggcgcccccggcatggggatggacatggactacgacctgctgtgccgcgcgctggacctgccggtgccgggggacgaggacggcgtcgtcaagcgcgagctgctgctggtggcggacacgggcgggggaggcggaggcttcgcggcgccgctcacgcccaacacgacgtcgtccatgtcctcctcgtccagcgaggcggcgggcgccgccgccggaggaggaggcggtgggagctttggcgctgcggaggaggaatcgcagtcgctggggaggtgcaagaaggaggacgacggggatggggaggagagcaaggacaaggaggcgatgaagggggaggaggacgacgcggacacgggcaagaaagggtgagtatagcatgtcctagctggaattcttcttgagattactgtctactagtctactgctacctacggcgaccaaatcctgcggtatttccttcccccttttttttcttcaacttcttgatagatctttccgctaaccatcagtttccaagagactaccgggtgtttttgggtgatccagagtacgtctcaagattagggggcgtcgatcgtcagtttctgtgccttggattctgcttcctattccctttcccttatggcccaatcagccattcattcctcttctgttccttgttccttccttctcctctttgttctcctctttctttttttaatgaggtacagccgcggcaaggcgaaggtgtgaacttgggctagggtttcacactcgcatgccacaagaaaacaaacacggggaaaagtcggtcattggtattgtatagctactatatatatataatctgctagttgcgtcctcctcttctcttcctcttttgctttatggatttcatgctagctcagctacgcctgcctaggctgagcatgcatcttcttccactcgaccaagagatattcctcccctctctgtagggatttgcgcagctacctttctgatgcaaatgcaatctatctatctgacatatggcataatattggtagaaatctgccgcatagcagaaaagggggtgtgcaaacagcagcacacagcggtgtgaacctgtttgaaaccatgtgcttactctagtctagagctgattcgtgcacccagccaacaaccgcgcgtacgtttgaagaggatcccagcaaatcgcgtatagtatcttagtcgatctgaacgaaatccgcagcacttgccgcggacccggctagctggtggacgtacgcacgggaggagctgatgagatcgacgccgacgccgacgccggctctcttgcttgttgcaggtcagcggcggggaagggcaagggcaagggcgagaagcggcagcggcagccgcggatcgcgttcatgaccaagagcgaggtcgaccacctcgaggacggctaccggtggcgcaagtacggccagaaggccgtcaagaacagcccataccccaggagctactaccggtgcacgacgcagaggtgccccgtgaagaagcgggtggagcggtcgcaccaggacccggcggtggtgatcaccacgtacgaaggcaagcacacgcaccccatcccgtccacgctccgtggcagcagcacccacctcctcgccgcgcagctgcaccaccaccaccaccacaacatcgtcggcgccttcccgccgccgccgccacccccgcagacgatgtgcttgccgttcgtcgggcggacaggcgacggcggcggcgtcatcgacatgctgggtctctgcctgcctccgcgcaaccacgccgccgtgccgccggcggcgacaggcctcgcgccgtccccctgctgcatgagcggtccggtgggcacggtggcaggcgcgacgacgacgacggcgcccaccaccaccaccgtcaccacgaccactacctcgtcgcctcctcctcctccctcgctccagacgatgcagcactttatggcgcaggacgacttcgggcttctacaggacatgctgccgtcgtcatcgtcgtcgttgtccttcgtcgtccacagcaacggcagcaacgtccagctgccctgaattcgatcagctaatagtcgtcgtcaccagtcaccaccaccacaagcgatcgagctaatgaggaaggaagctagcagagataagagatgatagtacttagtttggtccttgttaatgcttgacctctctttaatctttcgttttttttttcaccgatctactcccccctagctagatggatcgtatcgatcggttcttggttttcttttcgatcccgctgtgccgcgaccgcgagacacacgtacgccgctgcagtgcagatcgagtcttgtggcgccgggtctcgtaccgttcccttacgatgatctagctagctagcccttgcagtagcaggtagtacgtactagcggctcttgctgtacatgtacctagctaatcaacccccagctcatgcgcgcgtttgcactctgtctgatctgatcatctgatgcagtagtgtggccatgcacgagcctatgataatttatgctagctcctctttgcagtactcctcctgtccatctccattagtacaggacaggacaacactactgcatcatgttcggcagcaagatggtgcactgctagctagctgcaggtgcatggatcgaccgttccgtgtatgtgtctgctagctaatagcctgttgtcatgcgtgatgggactgttcgtgcgtggttggtgcaaagagttgttatggaaaagcactgggcgtcattttgctccttgtcttcttttttttctctcccgtgcatgcatgcactattaatgtggcctggtcaggtcgttccaggagccagtactagtagtaccaccactcatgcatgtagtgatgtgaacctgcctacctagaactagctacaatggccgcgtagtatatgattgattgaacaaggatttg

SEQ ID NO: 77402 - DNA, 2434 bp, Zea Mays
agaacacccctcctcctcctccaaaaaaataaaaaaaattccatccgtcagtatatatgtagtatgtgcatcatcttcctacacatccagactatttcgcgcgcgcacaccacgtacacatagcaccccccatccctttcgttccctaccagcactacgctacgccccccactgccatatagccgtatacgacgctcgcttgcctggccgtcttgatctctcacttcctcgcccccgataagtgagcaagcggcaagaaccagcaggcaaccacacagtcgcagcagcagcagcagcggcggcgcgcccatgtcgtcgggagacttccactaccacgacgagctggcggcgctgttcgcgcagcggccggcgccggcgggagagatgacgatggcgctgcagcaacaggcgccggcggcgtcgtggttcgcggactacctgcacgcgggcgcccccggcatggggatggacatggactacgacctgctgtgccgcgcgctggacctgccggtgccgggggacgaggacggcgtcgtcaagcgcgagctgctgctggtggcggacacgggcgggggaggcggaggcttcgcggcgccgctcacgcccaacacgacgtcgtccatgtcctcctcgtccagcgaggcggcgggcgccgccgccggaggaggaggcggtgggagctttggcgctgcggaggaggaatcgcagtcgctggggaggtgcaagaaggaggacgacggggatggggaggagagcaaggacaaggaggcgatgaagggggaggaggacgacgcggacacgggcaagaaagggtcagcggcggggaagggcaagggcaagggcgagaagcggcagcggcagccgcggatcgcgttcatgaccaagagcgaggtcgaccacctcgaggacggctaccggtggcgcaagtacggccagaaggccgtcaagaacagcccataccccaggagctactaccggtgcacgacgcagaggtgccccgtgaagaagcgggtggagcggtcgcaccaggacccggcggtggtgatcaccacgtacgaaggcaagcacacgcaccccatcccgtccacgctccgtggcagcagcacccacctcctcgccgcgcagctgcaccaccaccaccaccacaacatcgtcggcgccttcccgccgccgccgccacccccgcagacgatgtgcttgccgttcgtcgggcggacaggcgacggcggcggcgtcatcgacatgctgggtctctgcctgcctccgcgcaaccacgccgccgtgccgccggcggcgacaggcctcgcgccgtccccctgctgcatgagcggtccggtgggcacggtggcaggcgcgacgacgacgacggcgcccaccaccaccaccgtcaccacgaccactacctcgtcgcctcctcctcctccctcgctccagacgatgcagcactttatggcgcaggacgacttcgggcttctacaggacatgctgccgtcgtcatcgtcgtcgttgtccttcgtcgtccacagcaacggcagcaacgtccagctgccctgaattcgatcagctaatagtcgtcgtcaccagtcaccaccaccacaagcgatcgagctaatgaggaaggaagctagcagagataagagatgatagtacttagtttggtccttgttaatgcttgacctctctttaatctttcgttttttttttcaccgatctactcccccctagctagatggatcgtatcgatcggttcttggttttcttttcgatcccgctgtgccgcgaccgcgagacacacgtacgccgctgcagtgcagatcgagtcttgtggcgccgggtctcgtaccgttcccttacgatgatctagctagctagcccttgcagtagcaggtagtacgtactagcggctcttgctgtacatgtacctagctaatcaacccccagctcatgcgcgcgtttgcactctgtctgatctgatcatctgatgcagtagtgtggccatgcacgagcctatgataatttatgctagctcctctttgcagtactcctcctgtccatctccattagtacaggacaggacaacactactgcatcatgttcggcagcaagatggtgcactgctagctagctgcaggtgcatggatcgaccgttccgtgtatgtgtctgctagctaatagcctgttgtcatgcgtgatgggactgttcgtgcgtggttggtgcaaagagttgttatggaaaagcactgggcgtcattttgctccttgtcttcttttttttctctcccgtgcatgcatgcactattaatgtggcctggtcaggtcgttccaggagccagtactagtagtaccaccactcatgcatgtagtgatgtgaacctgcctacctagaactagctacaatggccgcgtagtatatgattgattgaacaaggatttg

SEQ ID NO: 77403 - DNA, 1508 bp, Zea Mays
ctgtcgtcccccagctggtgggatctcctccgttcgagctggatcccagctaccggcggatggtgatcgcgtgcttcatccagggggtgtacctgctggagctggaccggcaggacaagcgcgacgagcgcaccgcccttgcgccgcagtggtggcgccacttcatgtacaggctctcccagacactcgtcgacgagcgcgacggctccatctacggcgccgtgctcgagtgggaccgccgggccttgctggctggctacgcgccgttccgccccgccggcgccccggccgccgtcgtggcgctccgcggcacgctgctgagcggggccacgttccggcgcgacgtcgtggacgacctccggttcctggcctgggacagcctcaagggctccgtgcggttcgccggcgcgctggccgcgctgcggtccgcggcgcgcaggcacggcacggggaacgtgtgcgtgggcgggcactcgctgggcgccgggttcgcgctccaggtgggcaaggcgctggccaaggaaggcgtgttcgtggagtgccacgtgttcaacccgccgtcggtgtctctggccacgagcctcaggggcttcgcggagacggccggcgagatgtggggctacgtgcgcgcgtggctgccctacgtgggctcggctgcggcggcggacgcgggcggcgaggccaaggaagtgtcgctggggcgcgccgggacggccaagtggttgccgcacctgtatatcaacaccaacgactacatctgctgctactacaccgacactgcggccgggacggcgaccgtgacggccagaggagggagcgggggcagtaaggttgctggaggggacggtggcatcggcaagccggggctggcgaggatgttgacggtgtccaaggggccgaccaagttccttgatgcgcacgggctgcagcagtggtgggctgacgatgtggagctgcaggtcgccctcaaccacagcaaactcatcgaccgccagctcaggtcgctctatgccgcgcagccggcctcgccgcaagtgaaccagtaggctgtgtagctctgtagcagctcacaaaacgctgagaaaaaaacgcaacgctagcatgatgctgttgatggattggactccgctgcgtgatggtccgctgagcgcacggatgatgagcgttccaaacatttcggatttgaaacagttgtgggcttgtggcaaatttaaaaaattcaaaaagtgaatttcaaaataatacgactccgctggggatcgaaacccagaatctctggttccgtagaccagcgccttatccattgggctacggagtcatttttgttttgaattgttaaccagattttatgtccttttgcacctcatacaaatttatcacgaatttccagataaactgatttgatacagtaattcggtgtgctcagtatatagttttccgaataaatgaattcgatacgataattcggcgtgctcagtatatttgacagttgatatgtcatttgtttt

SEQ ID NO: 77404 - DNA, 867 bp, Zea Mays
gcgagaattacggcccattagggttcacttccaaactcggcatctataaacacttctctcacgccccgccgccgcctccgctcgccaccgtcgtctaagttaggctagggttcgaccagctagcggaaatggtggccttcaggttccatcagtaccaggtggtggggcgcgcgctgccgacgcccggcgatgagcaccccaagatctaccgcatgaagctctgggccaccaacgaggtccgcgccaagagcaagttctggtacttcttgaggaagttgaagaaggttaagaagagcaacggccaggtcctggccatcaacgagatctttgagcgtaacccgacgacaatcaagaactacggcatctggctgcgctaccagagcagaaccggctaccacaacatgtacaaggagtaccgcgacacaaccctgaatggcgctgtggagcagatgtacaacgagatggcctctcgccaccgcgtgaggtccccctgcatccagatcatcaagactgcgacggtgcacttcaagctctgcaagagggacaacactaagcagttccacaacagtgagatcaagttcccgctcgtgcaccgcaaggtcaggccgccgaccaggaagctgaggaccacgttcaaggcttcgaggcccaacctgttcatgtgatttagctgtggtcagtgtatgcgatcataagagtcacaagtgtttctgtttttttttaagttttgacttcctaatagtaatacttaatcggtttgatgattcaactcgttttgaagcgagcttggtgaaccaatcgacgtgttgcgggttgttcgctctcggcatacttgaagtgattttcaccttgttcatgagaagctct

SEQ ID NO: 77405 - DNA, 648 bp, Zea Mays
gcgagaattacggcccattagggttcacttccaaactcggcatctataaacacttctctcacgccccgccgccgcctccgctcgccaccgtcgtctaagttaggctagggttcgaccagctagcggaaatggtggccttcaggttccatcagtaccaggtggtggggcgcgcgctgccgacgcccggcgatgagcaccccaagatctaccgcatgaagctctgggccaccaacgaggtccgcgccaagagcaagttctggtacttcttgaggaagttgaagaaggttaagaagagcaacggccaggtcctggccatcaacgagatctttgagcgtaacccgacgacaatcaagaactacggcatctggctgcgctaccagagcagaaccggctaccacaacactaagcagttccacaacagtgagatcaagttcccgctcgtgcaccgcaaggtcaggccgccgaccaggaagctgaggaccacgttcaaggcttcgaggcccaacctgttcatgtgatttagctgtgcgagcttggtgaaccaatcgacgtgttgcgggttgttcgctctcggcatacttgaagtgtctcatggaaagaagttccaaaaatcgtaaggtccatggagatccaaaattcctcgaggtg

SEQ ID NO: 77406 - DNA, 913 bp, Zea Mays
atcaacaaacaaacaaacaacgcgcaattccctagttctctcgtgaccgccttccctcctctcctgcgtcccaactgggcaattccccaaacctaactaacctttgccaccgcgggagccaccatgggtggccagatgccggacgccgacgggaaggcccgctcggcggactcctcgtcctcttacgggtacccgccgtcggcgccgccgcagcaccagtacggcacctttggtcccccatccggagcctccggggagtttccgcagccggcggtcgggttcccccagccggcggcgccgcctgggatgcagcactacccgcagcctcctccggcgtcgtatgccgtctacccacccccgcagcaaccctactcggccgccgcgccgtactacgcccaaggctaccagatcgctcaaggttatattcctgttgttgaaggaaggcctgttagaatccgtcctcttccatgttgtggccttggcatggggtggtttctgtttataattgggttcttctttgctgccattccatggtatcttggagcttttgtgctgatttgtgtccgagtacgtgattacagggagaaaccaggatatgttgcttgcactattgctgcctcgcttgctgcaattgctgtgctgcttggcgccacaaaaggagcggaggtgtggtcatgaaaacttgcataactccattgacgaagctatcatgttgaagagaaatcagaacaagttatgttatacttatataggatatgtaccacttccatgcgcacctgtggtgggagatcgagatccagtgtggcctcaaccaccccaacgttccacgatgaagaacgagtcgtcctcatcctcgagcacgcggcccttggcgagatcaataagatccttcacgccactggccgctcagtaa

SEQ ID NO: 77407 - DNA, 1592 bp, Zea Mays
atcaacaaacaaacaaacaacgcgcaattccctagttctctcgtgaccgccttccctcctctcctgcgtcccaactgggcaattccccaaacctaactaacctttgccaccgcgggagccaccatgggtggccagatgccggacgccgacgggaaggcccgctcggcggactcctcgtcctcttacgggtacccgccgtcggcgccgccgcagcaccagtacggcacctttggtcccccatccggagcctccggggagtttccgcagccggcggtcgggttcccccagccggcggcgccgcctgggatgcagcactacccgcagcctcctccggcgtcgtatgccgtctacccacccccgcagcaaccctactcggccgccgcgccgtactacgcccaaggctaccagatcgctcaaggtacggaagcgccttacgaggcgctgcatcccggttcattttttttcataggatcgatcaacgggaggcgttcttttgaccgaggagtcttgtgtggctgattcatcgtgtagatcttttcaatcgcctaacccctttgcttatttgcattacattgtaagctcaaaatttaggtgttgtcctgcccagctgtcttcctgtttatctcctgtgtatctgaatctgcagttcctgctgcatccctttttttttccccatcacttctaagttgcaggccaacggcgttggtgttgctcatcccaaattagacacttgagatcggtagttcatggagttcgagggaaactgaatttctctttgaacttcgaagtgttctgaaatgttaaagtaaatgagcaggaaatttgatttgtaggaacaaccaaatatatgcagggcagttcattttcagcgaaggattgcataaataattcaactctccaaataaatccgtaaaatgaataattcagtatataatttatatttatgttcgaaatggtggaagatatgaagtcaacaactacactggaactttgactgaacttgggtaattatttgtttgcattttggtgctttgtaggttatattcctgttgttgaaggaaggcctgttagaatccgtcctcttccatgttgtggccttggcatggggtggtttctgtttataattgggttcttctttgctgccattccatggtatcttggagcttttgtgctgatttgtgtccgagtacgtgattacagggagaaaccaggatatgttgcttgcactattgctgcctcgcttgctgcaattgctgtgctgcttggcgccacaaaaggagcggaggtgtggtgagcattatgccttcaattaccagcagtccggttaatgtaaatgtccgttgctcggctactttgttacctgtgttgtacatgtgttgtgcgtacaaaggatagggtgtaacgaaaatgatgtatgctcctatttgtagttggacatatacatttgacaaacggagtagcatgaatgcacaccctcattaatcatttgatgtaaaatttactggaatgccaccatgttatggtagtctggtcgacaatatatccatgagtaccgttgagaccttttcgtacttttgacatgggatgatggg

SEQ ID NO: 77408 - DNA, 3020 bp, Zea Mays
caagatccatgtccacaccttcctggagagcacaaaagcggagagaatgtgattgatggactcctctcaaggtggaactttataattttgttgcgtgttttcataatgaaattagggaatgcctatggtggaaaaaatgtagaggtgatgataaggcatagttgtttgacttagcctgccttagctatttcttgaagctaagggaaataataattggtgttatggcatttagaaatatggtttgcactccccaagtcattaatcttacatcagactcagagagagggcaagctcaaggaggcaatggtagtgagatatctgagcaaggtgcacaacatgctgtcagagttgtaggaaatgcaatgaacattggtctctctggtgtgcgaagttactatgatatgagcataaatcatcaccatcagtctgttcataacccacccccgaatttaggtgttgattctggttttgtcttcgcatcaaatatgtacaatccctgcatgtcatcaacatcaatgaacagacatgtttctcatgctcagagctttggatcagggaatcaagtgttgcctcaaaaccaagtcccaggaactatggatgagagtagcagaaatgacagtattggtgaaagtgctagagagcatattaaaaggaaaaatgctgcagttgctggaagctatcattttgttaatggatttgcaagctcaagctcatcttctcatgcacctcaaaatcctatgcttgggccttgggacccttcttttgaatcaactgtttcttctaatgttgcaccattcaacccatcagaatatcatggacacaacaacagttggccgtccttagaaggatcttccataacaggaagtaatggattcaactcaatggttgttcatccagactcagtacagcgtgggaactatacatttccacccactcatattagccattcatggatgtcccatgctacaaatggtattgctgatggagttccccagtgggaatatgccaatgcaactgctaatattcaaggcagatttgcccattcaggagccacagaaatcgcaaatgttggttttcatgaatatcagaatggcccttcaactatttgtcggggaccagtaccttatttccaccagcatgcgatgcatggcatgcaagctcttgatcctactcaaatgcaagttccttatcaacaatgccacagtaatggtttcttgcatggtggtattaattaccctggaaaccgtctccaattaggtccacgaaatccagttctcttcaccagttctgaacgtgcttttgggcctccacagcatccgttcctggcaaatccagttaaccaccgcaacataaggattctaccacccgagcatgctacaataatggatttttcgagattgtatgaagtgtcaaatactgtagatgagcatagagatatgcgtctagatatagacagcatgacgtatgaggagcttttagcattagaagagcagattggagatgtcaatactggtctgacaaaaagtcacattgtagataaattgaggactagcctatatgttccaggaatatcgagcatgtctgatcagccatctaaatcttctctagagaatgatgcttgcataatatgccaggaggagtaccaggctagagactgcgttggcacccttgactgcggtcacaggtaccacgcggagtgcgtgaagcagtggctgatggtgaagaacttgtgccccatctgcaagacgacagcattgtctgccaacagaagacaaggacagtgagcgggaatggagaagcctgttggttatttgctttgacaaacgttcagctcaattttgtatataaagaagtggtagacaatggcgctacctgtatttgttgttcactttgttgtgactgggagtactcagcttcctgaaactgtacagccataacatttgttatttttcttcaaatgtagaatgttttaaatcgctcagttcgcccccaatgtgtatgataactgataaggcgaaccaaggagacggagcttccgaaatggcatctctaggcagccttgtaactattagctttgatgaaactagtcgcacatggatcgtcctgtacattttttaggagttgacggcatcacaattgctcgttatcattatcagcgcggccagtggataaagttttctgcagtccaatgttgggttttcaaaattccaggagcgggtatattgcgcactcttgctccaagctgtcaaaacatgccaatgtttacatccaaatcagtggaaatacaatcgaggacaggattgcaagtcagcgaaacatcatggcgccctctccgaaccacgttgtcaatgtcgagtgccaatcacccgtaaccacttgacgatgtcaagaaagattgtcatcacgttttgtgttccttaaaccagtagagcgtatgcttgaccagggctaagacgaaaaggtagttggaaaaaagaaagagaaacgaaaagctaggccgagcagcacccgcccgcgttcacgggcgagacctctcgtccttggcggcgtcgacgtcgatggtcttgcctctggacggcgcggcggggtcgtccccgatgtcgagcgcgttccggctcacgacgtggtagatctggcggagcacctcggcgaaggcgcgctctacgttggtggcgtccagcgccgacgtctccatggagaaggtgccgtggcgctgggcgaaggccgcggcgtcctcgggtgacacggcgcgcaggtggcgcaggtcggccttgttgcccaccagcatgaccacgatgttggcgtccgtgtggtcccgcagccagcgctccgcgttgtcgaaggtgacgcggcggggcaccaggggcgtgccaggatttagagaatgggtattcgaaatggttagagagaaaaaaaattggatggcctaaagcctatcctaatagccttttttactagaaagtaaactaaatcataactcacgttaaaataataggtcataagatgatgttgttcaacac

SEQ ID NO: 77409 - DNA, 2958 bp, Zea Mays
ctcaagatccatgtccacaccttcctggagagcacaaaagcggagagaatgtgattgatggactcctctcaaggtagaggtgatgataaggcatagttgtttgacttagcctgccttagctatttcttgaagctaagggaaataataattggtgttatggcatttagaaatatggtttgcactccccaagtcattaatcttacatcagactcagagagagggcaagctcaaggaggcaatggtagtgagatatctgagcaaggtgcacaacatgctgtcagagttgtaggaaatgcaatgaacattggtctctctggtgtgcgaagttactatgatatgagcataaatcatcaccatcagtctgttcataacccacccccgaatttaggtgttgattctggttttgtcttcgcatcaaatatgtacaatccctgcatgtcatcaacatcaatgaacagacatgtttctcatgctcagagctttggatcagggaatcaagtgttgcctcaaaaccaagtcccaggaactatggatgagagtagcagaaatgacagtattggtgaaagtgctagagagcatattaaaaggaaaaatgctgcagttgctggaagctatcattttgttaatggatttgcaagctcaagctcatcttctcatgcacctcaaaatcctatgcttgggccttgggacccttcttttgaatcaactgtttcttctaatgttgcaccattcaacccatcagaatatcatggacacaacaacagttggccgtccttagaaggatcttccataacaggaagtaatggattcaactcaatggttgttcatccagactcagtacagcgtgggaactatacatttccacccactcatattagccattcatggatgtcccatgctacaaatggtattgctgatggagttccccagtgggaatatgccaatgcaactgctaatattcaaggcagatttgcccattcaggagccacagaaatcgcaaatgttggttttcatgaatatcagaatggcccttcaactatttgtcggggaccagtaccttatttccaccagcatgcgatgcatggcatgcaagctcttgatcctactcaaatgcaagttccttatcaacaatgccacagtaatggtttcttgcatggtggtattaattaccctggaaaccgtctccaattaggtccacgaaatccagttctcttcaccagttctgaacgtgcttttgggcctccacagcatccgttcctggcaaatccagttaaccaccgcaacataaggattctaccacccgagcagcatgctacaataatggatttttcgagattgtatgaagtgtcaaatactgtagatgagcatagagatatgcgtctagatatagacagcatgacgtatgaggagcttttagcattagaagagcagattggagatgtcaatactggtctgacaaaaagtcacattgtagataaattgaggactagcctatatgttccaggaatatcgagcatgtctgatcagccatctaaatcttctctagagaatgatgcttgcataatatgccaggaggagtaccaggctagagactgcgttggcacccttgactgcggtcacaggtaccacgcggagtgcgtgaagcagtggctgatggtgaagaacttgtgccccatctgcaagacgacagcattgtctgccaacagaagacaaggacagtgagcgggaatggagaagcctgttggttatttgctttgacaaacgttcagctcaattttgtatataaagaagtggtagacaatggcgctacctgtatttgttgttcactttgttgtgactgggagtactcagcttcctgaaactgtacagccataacatttgttatttttcttcaaatgtagaatgttttaaatcgctcagttcgcccccaatgtgtatgataactgataaggcgaaccaaggagacggagcttccgaaatggcatctctaggcagccttgtaactattagctttgatgaaactagtcgcacatggatcgtcctgtacattttttaggagttgacggcatcacaattgctcgttatcattatcagcgcggccagtggataaagttttctgcagtccaatgttgggttttcaaaattccaggagcgggtatattgcgcactcttgctccaagctgtcaaaacatgccaatgtttacatccaaatcagtggaaatacaatcgaggacaggattgcaagtcagcgaaacatcatggcgccctctccgaaccacgttgtcaatgtcgagtgccaatcacccgtaaccacttgacgatgtcaagaaagattgtcatcacgttttgtgttccttaaaccagtagagcgtatgcttgaccagggctaagacgaaaaggtagttggaaaaaagaaagagaaacgaaaagctaggccgagcagcacccgcccgcgttcacgggcgagacctctcgtccttggcggcgtcgacgtcgatggtcttgcctctggacggcgcggcggggtcgtccccgatgtcgagcgcgttccggctcacgacgtggtagatctggcggagcacctcggcgaaggcgcgctctacgttggtggcgtccagcgccgacgtctccatggagaaggtgccgtggcgctgggcgaaggccgcggcgtcctcgggtgacacggcgcgcaggtggcgcaggtcggccttgttgcccaccagcatgaccacgatgttggcgtccgtgtggtcccgcagccagcgctccgcgttgtcgaaggtgacgcggcggggcaccaggggcgtgccaggatttagagaatgggtattcgaaatggttagagagaaaaaaaattggatggcctaaagcctatcctaatagccttttttactagaaagtaaactaaatcataactcacgttaaaataataggtcataagatgatgttgttcaacac

SEQ ID NO: 77410 - DNA, 2989 bp, Zea Mays
gaactttgctaggctaactagcattattttgctgcttttggtggaactttataattttgttgcgtgttttcataatgaaattagggaatgcctatggtggaaaaaatgtagaggtgatgataaggcatagttgtttgacttagcctgccttagctatttcttgaagctaagggaaataataattggtgttatggcatttagaaatatggtttgcactccccaagtcattaatcttacatcagactcagagagagggcaagctcaaggaggcaatggtagtgagatatctgagcaaggtgcacaacatgctgtcagagttgtaggaaatgcaatgaacattggtctctctggtgtgcgaagttactatgatatgagcataaatcatcaccatcagtctgttcataacccacccccgaatttaggtgttgattctggttttgtcttcgcatcaaatatgtacaatccctgcatgtcatcaacatcaatgaacagacatgtttctcatgctcagagctttggatcagggaatcaagtgttgcctcaaaaccaagtcccaggaactatggatgagagtagcagaaatgacagtattggtgaaagtgctagagagcatattaaaaggaaaaatgctgcagttgctggaagctatcattttgttaatggatttgcaagctcaagctcatcttctcatgcacctcaaaatcctatgcttgggccttgggacccttcttttgaatcaactgtttcttctaatgttgcaccattcaacccatcagaatatcatggacacaacaacagttggccgtccttagaaggatcttccataacaggaagtaatggattcaactcaatggttgttcatccagactcagtacagcgtgggaactatacatttccacccactcatattagccattcatggatgtcccatgctacaaatggtattgctgatggagttccccagtgggaatatgccaatgcaactgctaatattcaaggcagatttgcccattcaggagccacagaaatcgcaaatgttggttttcatgaatatcagaatggcccttcaactatttgtcggggaccagtaccttatttccaccagcatgcgatgcatggcatgcaagctcttgatcctactcaaatgcaagttccttatcaacaatgccacagtaatggtttcttgcatggtggtattaattaccctggaaaccgtctccaattaggtccacgaaatccagttctcttcaccagttctgaacgtgcttttgggcctccacagcatccgttcctggcaaatccagttaaccaccgcaacataaggattctaccacccgagcatgctacaataatggatttttcgagattgtatgaagtgtcaaatactgtagatgagcatagagatatgcgtctagatatagacagcatgacgtatgaggagcttttagcattagaagagcagattggagatgtcaatactggtctgacaaaaagtcacattgtagataaattgaggactagcctatatgttccaggaatatcgagcatgtctgatcagccatctaaatcttctctagagaatgatgcttgcataatatgccaggaggagtaccaggctagagactgcgttggcacccttgactgcggtcacaggtaccacgcggagtgcgtgaagcagtggctgatggtgaagaacttgtgccccatctgcaagacgacagcattgtctgccaacagaagacaaggacagtgagcgggaatggagaagcctgttggttatttgctttgacaaacgttcagctcaattttgtatataaagaagtggtagacaatggcgctacctgtatttgttgttcactttgttgtgactgggagtactcagcttcctgaaactgtacagccataacatttgttatttttcttcaaatgtagaatgttttaaatcgctcagttcgcccccaatgtgtatgataactgataaggcgaaccaaggagacggagcttccgaaatggcatctctaggcagccttgtaactattagctttgatgaaactagtcgcacatggatcgtcctgtacattttttaggagttgacggcatcacaattgctcgttatcattatcagcgcggccagtggataaagttttctgcagtccaatgttgggttttcaaaattccaggagcgggtatattgcgcactcttgctccaagctgtcaaaacatgccaatgtttacatccaaatcagtggaaatacaatcgaggacaggattgcaagtcagcgaaacatcatggcgccctctccgaaccacgttgtcaatgtcgagtgccaatcacccgtaaccacttgacgatgtcaagaaagattgtcatcacgttttgtgttccttaaaccagtagagcgtatgcttgaccagggctaagacgaaaaggtagttggaaaaaagaaagagaaacgaaaagctaggccgagcagcacccgcccgcgttcacgggcgagacctctcgtccttggcggcgtcgacgtcgatggtcttgcctctggacggcgcggcggggtcgtccccgatgtcgagcgcgttccggctcacgacgtggtagatctggcggagcacctcggcgaaggcgcgctctacgttggtggcgtccagcgccgacgtctccatggagaaggtgccgtggcgctgggcgaaggccgcggcgtcctcgggtgacacggcgcgcaggtggcgcaggtcggccttgttgcccaccagcatgaccacgatgttggcgtccgtgtggtcccgcagccagcgctccgcgttgtcgaaggtgacgcggcggggcaccaggggcgtgccaggatttagagaatgggtattcgaaatggttagagagaaaaaaaattggatggcctaaagcctatcctaatagccttttttactagaaagtaaactaaatcataactcacgttaaaataataggtcataagatgatgttgttcaacac

SEQ ID NO: 77411 - DNA, 3328 bp, Zea Mays
tcctctctcctctttctcccctttcgcctctctcttcttctaccaccactcttctgctcgctaaaaaaagcttctcgagcttataaatacgttccccttccccccggcgccaagttcctccccccgatccgcttcccccttccacccgccgatcgccctccgctcgctccaccgcggcgggcgatcgctcatctccccctaacctcccccgctcgcgattcccgaggcgaggtgccacccaccgcagatttcttccgacggacggttggctcgctcaccccctacttcgctgatcggatcgcgtgctgcccgagggaatcaagtgttgcctcaaaaccaagtcccaggaactatggatgagagtagcagaaatgacagtattggtgaaagtgctagagagcatattaaaaggaaaaatgctgcagttgctggaagctatcattttgttaatggatttgcaagctcaagctcatcttctcatgcacctcaaaatcctatgcttgggccttgggacccttcttttgaatcaactgtttcttctaatgttgcaccattcaacccatcagaatatcatggacacaacaacagttggccgtccttagaaggatcttccataacaggaagtaatggattcaactcaatggttgttcatccagactcagtacagcgtgggaactatacatttccacccactcatattagccattcatggatgtcccatgctacaaatggtattgctgatggagttccccagtgggaatatgccaatgcaactgctaatattcaaggcagatttgcccattcaggagccacagaaatcgcaaatgttggttttcatgaatatcagaatggcccttcaactatttgtcggggaccagtaccttatttccaccagcatgcgatgcatggcatgcaagctcttgatcctactcaaatgcaagttccttatcaacaatgccacagtaatggtttcttgcatggtggtattaattaccctggaaaccgtctccaattaggtccacgaaatccagttctcttcaccagttctgaacgtgcttttgggcctccacagcatccgttcctggcaaatccagttaaccaccgcaacataaggattctaccacccgagcatgctacaataatggatttttcgagattgtatgaagtgtcaaatactgtagatgagcatagagatatgcgtctagatatagacagcatgacgtatgaggagcttttagcattagaagagcagattggagatgtcaatactggtctgacaaaaagtcacattgtagataaattgaggactagcctatatgttccaggaatatcgagcatgtctgatcagccatctaaatcttctctagagaatgatgcttgcataatatgccaggtcctactccttcactgtatactctatttattgacaattaaatctcagctgtcccaaacaaagaatcatcatccacctacctgccccaggtttgacataaacattgcagctgctgggctcgtatcgccttgcaatcagccttgatggctgattgcatcacttctcttccactggtagcttgaataatgtttagtgtgcatctgttgacgctgcagataaaaatatgaagtatctaatataacaccaccataggggcactaataaataaaatccagatcgcacaagttggaagtctttcaaataatttcaaagcagtaatatatttttgtacatttgttgagaactaaatataatatacaatgcatctttaagagaaatggttcgtacatgcttcaagctgcttctacagtagtaatatgtagatttagtgtgaatgaagcattacctgaagcaatggaaagatccatgaagtgtgtcatcagggatgaaagcactttgtccctctccagttcatagttctaaggaagttttgctgggtgcatctcgcaggaggagtaccaggctagagactgcgttggcacccttgactgcggtcacaggtaccacgcggagtgcgtgaagcagtggctgatggtgaagaacttgtgccccatctgcaagacgacagcattgtctgccaacagaagacaaggacagtgagcgggaatggagaagcctgttggttatttgctttgacaaacgttcagctcaattttgtatataaagaagtggtagacaatggcgctacctgtatttgttgttcactttgttgtgactgggagtactcagcttcctgaaactgtacagccataacatttgttatttttcttcaaatgtagaatgttttaaatcgctcagttcgcccccaatgtgtatgataactgataaggcgaaccaaggagacggagcttccgaaatggcatctctaggcagccttgtaactattagctttgatgaaactagtcgcacatggatcgtcctgtacattttttaggagttgacggcatcacaattgctcgttatcattatcagcgcggccagtggataaagttttctgcagtccaatgttgggttttcaaaattccaggagcgggtatattgcgcactcttgctccaagctgtcaaaacatgccaatgtttacatccaaatcagtggaaatacaatcgaggacaggattgcaagtcagcgaaacatcatggcgccctctccgaaccacgttgtcaatgtcgagtgccaatcacccgtaaccacttgacgatgtcaagaaagattgtcatcacgttttgtgttccttaaaccagtagagcgtatgcttgaccagggctaagacgaaaaggtagttggaaaaaagaaagagaaacgaaaagctaggccgagcagcacccgcccgcgttcacgggcgagacctctcgtccttggcggcgtcgacgtcgatggtcttgcctctggacggcgcggcggggtcgtccccgatgtcgagcgcgttccggctcacgacgtggtagatctggcggagcacctcggcgaaggcgcgctctacgttggtggcgtccagcgccgacgtctccatggagaaggtgccgtggcgctgggcgaaggccgcggcgtcctcgggtgacacggcgcgcaggtggcgcaggtcggccttgttgcccaccagcatgaccacgatgttggcgtccgtgtggtcccgcagccagcgctccgcgttgtcgaaggtgacgcggcggggcaccaggggcgtgccaggatttagagaatgggtattcgaaatggttagagagaaaaaaaattggatggcctaaagcctatcctaatagccttttttactagaaagtaaactaaatcataactcacgttaaaataataggtcataagatgatgttgttcaacac

SEQ ID NO: 77412 - DNA, 3745 bp, Zea Mays
tcctctctcctctttctcccctttcgcctctctcttcttctaccaccactcttctgctcgctaaaaaaagcttctcgagcttataaatacgttccccttccccccggcgccaagttcctccccccgatccgcttcccccttccacccgccgatcgccctccgctcgctccaccgcggcgggcgatcgctcatctccccctaacctcccccgctcgcgattcccgaggcgaggtgccacccaccgcagatttcttccgacggacggttggctcgctcaccccctacttcgctgatcggatcgcgtgctgcccgaggtagaggtgatgataaggcatagttgtttgacttagcctgccttagctatttcttgaagctaagggaaataataattggtgttatggcatttagaaatatggtttgcactccccaagtcattaatcttacatcagactcagagagagggcaagctcaaggaggcaatggtagtgagatatctgagcaaggtgcacaacatgctgtcagagttgtaggaaatgcaatgaacattggtctctctggtgtgcgaagttactatgatatgagcataaatcatcaccatcagtctgttcataacccacccccgaatttaggtgttgattctggttttgtcttcgcatcaaatatgtacaatccctgcatgtcatcaacatcaatgaacagacatgtttctcatgctcagagctttggatcagggaatcaagtgttgcctcaaaaccaagtcccaggaactatggatgagagtagcagaaatgacagtattggtgaaagtgctagagagcatattaaaaggaaaaatgctgcagttgctggaagctatcattttgttaatggatttgcaagctcaagctcatcttctcatgcacctcaaaatcctatgcttgggccttgggacccttcttttgaatcaactgtttcttctaatgttgcaccattcaacccatcagaatatcatggacacaacaacagttggccgtccttagaaggatcttccataacaggaagtaatggattcaactcaatggttgttcatccagactcagtacagcgtgggaactatacatttccacccactcatattagccattcatggatgtcccatgctacaaatggtattgctgatggagttccccagtgggaatatgccaatgcaactgctaatattcaaggcagatttgcccattcaggagccacagaaatcgcaaatgttggttttcatgaatatcagaatggcccttcaactatttgtcggggaccagtaccttatttccaccagcatgcgatgcatggcatgcaagctcttgatcctactcaaatgcaagttccttatcaacaatgccacagtaatggtttcttgcatggtggtattaattaccctggaaaccgtctccaattaggtccacgaaatccagttctcttcaccagttctgaacgtgcttttgggcctccacagcatccgttcctggcaaatccagttaaccaccgcaacataaggattctaccacccgagcatgctacaataatggatttttcgagattgtatgaagtgtcaaatactgtagatgagcatagagatatgcgtctagatatagacagcatgacgtatgaggagcttttagcattagaagagcagattggagatgtcaatactggtctgacaaaaagtcacattgtagataaattgaggactagcctatatgttccaggaatatcgagcatgtctgatcagccatctaaatcttctctagagaatgatgcttgcataatatgccaggtcctactccttcactgtatactctatttattgacaattaaatctcagctgtcccaaacaaagaatcatcatccacctacctgccccaggtttgacataaacattgcagctgctgggctcgtatcgccttgcaatcagccttgatggctgattgcatcacttctcttccactggtagcttgaataatgtttagtgtgcatctgttgacgctgcagataaaaatatgaagtatctaatataacaccaccataggggcactaataaataaaatccagatcgcacaagttggaagtctttcaaataatttcaaagcagtaatatatttttgtacatttgttgagaactaaatataatatacaatgcatctttaagagaaatggttcgtacatgcttcaagctgcttctacagtagtaatatgtagatttagtgtgaatgaagcattacctgaagcaatggaaagatccatgaagtgtgtcatcagggatgaaagcactttgtccctctccagttcatagttctaaggaagttttgctgggtgcatctcgcaggaggagtaccaggctagagactgcgttggcacccttgactgcggtcacaggtaccacgcggagtgcgtgaagcagtggctgatggtgaagaacttgtgccccatctgcaagacgacagcattgtctgccaacagaagacaaggacagtgagcgggaatggagaagcctgttggttatttgctttgacaaacgttcagctcaattttgtatataaagaagtggtagacaatggcgctacctgtatttgttgttcactttgttgtgactgggagtactcagcttcctgaaactgtacagccataacatttgttatttttcttcaaatgtagaatgttttaaatcgctcagttcgcccccaatgtgtatgataactgataaggcgaaccaaggagacggagcttccgaaatggcatctctaggcagccttgtaactattagctttgatgaaactagtcgcacatggatcgtcctgtacattttttaggagttgacggcatcacaattgctcgttatcattatcagcgcggccagtggataaagttttctgcagtccaatgttgggttttcaaaattccaggagcgggtatattgcgcactcttgctccaagctgtcaaaacatgccaatgtttacatccaaatcagtggaaatacaatcgaggacaggattgcaagtcagcgaaacatcatggcgccctctccgaaccacgttgtcaatgtcgagtgccaatcacccgtaaccacttgacgatgtcaagaaagattgtcatcacgttttgtgttccttaaaccagtagagcgtatgcttgaccagggctaagacgaaaaggtagttggaaaaaagaaagagaaacgaaaagctaggccgagcagcacccgcccgcgttcacgggcgagacctctcgtccttggcggcgtcgacgtcgatggtcttgcctctggacggcgcggcggggtcgtccccgatgtcgagcgcgttccggctcacgacgtggtagatctggcggagcacctcggcgaaggcgcgctctacgttggtggcgtccagcgccgacgtctccatggagaaggtgccgtggcgctgggcgaaggccgcggcgtcctcgggtgacacggcgcgcaggtggcgcaggtcggccttgttgcccaccagcatgaccacgatgttggcgtccgtgtggtcccgcagccagcgctccgcgttgtcgaaggtgacgcggcggggcaccaggggcgtgccaggatttagagaatgggtattcgaaatggttagagagaaaaaaaattggatggcctaaagcctatcctaatagccttttttactagaaagtaaactaaatcataactcacgttaaaataataggtcataagatgatgttgttcaacac

SEQ ID NO: 77413 - DNA, 3263 bp, Zea Mays
tcctctctcctctttctcccctttcgcctctctcttcttctaccaccactcttctgctcgctaaaaaaagcttctcgagcttataaatacgttccccttccccccggcgccaagttcctccccccgatccgcttcccccttccacccgccgatcgccctccgctcgctccaccgcggcgggcgatcgctcatctccccctaacctcccccgctcgcgattcccgaggcgaggtgccacccaccgcagatttcttccgacggacggttggctcgctcaccccctacttcgctgatcggatcgcgtgctgcccgaggtggaactttataattttgttgcgtgttttcataatgaaattagggaatgcctatggtggaaaaaatgtagaggtgatgataaggcatagttgtttgacttagcctgccttagctatttcttgaagctaagggaaataataattggtgttatggcatttagaaatatggtttgcactccccaagtcattaatcttacatcagactcagagagagggcaagctcaaggaggcaatggtagtgagatatctgagcaaggtgcacaacatgctgtcagagttgtaggaaatgcaatgaacattggtctctctggtgtgcgaagttactatgatatgagcataaatcatcaccatcagtctgttcataacccacccccgaatttaggtgttgattctggttttgtcttcgcatcaaatatgtacaatccctgcatgtcatcaacatcaatgaacagacatgtttctcatgctcagagctttggatcagggaatcaagtgttgcctcaaaaccaagtcccaggaactatggatgagagtagcagaaatgacagtattggtgaaagtgctagagagcatattaaaaggaaaaatgctgcagttgctggaagctatcattttgttaatggatttgcaagctcaagctcatcttctcatgcacctcaaaatcctatgcttgggccttgggacccttcttttgaatcaactgtttcttctaatgttgcaccattcaacccatcagaatatcatggacacaacaacagttggccgtccttagaaggatcttccataacaggaagtaatggattcaactcaatggttgttcatccagactcagtacagcgtgggaactatacatttccacccactcatattagccattcatggatgtcccatgctacaaatggtattgctgatggagttccccagtgggaatatgccaatgcaactgctaatattcaaggcagatttgcccattcaggagccacagaaatcgcaaatgttggttttcatgaatatcagaatggcccttcaactatttgtcggggaccagtaccttatttccaccagcatgcgatgcatggcatgcaagctcttgatcctactcaaatgcaagttccttatcaacaatgccacagtaatggtttcttgcatggtggtattaattaccctggaaaccgtctccaattaggtccacgaaatccagttctcttcaccagttctgaacgtgcttttgggcctccacagcatccgttcctggcaaatccagttaaccaccgcaacataaggattctaccacccgagcatgctacaataatggatttttcgagattgtatgaagtgtcaaatactgtagatgagcatagagatatgcgtctagatatagacagcatgacgtatgaggagcttttagcattagaagagcagattggagatgtcaatactggtctgacaaaaagtcacattgtagataaattgaggactagcctatatgttccaggaatatcgagcatgtctgatcagccatctaaatcttctctagagaatgatgcttgcataatatgccaggaggagtaccaggctagagactgcgttggcacccttgactgcggtcacaggtaccacgcggagtgcgtgaagcagtggctgatggtgaagaacttgtgccccatctgcaagacgacagcattgtctgccaacagaagacaaggacagtgagcgggaatggagaagcctgttggttatttgctttgacaaacgttcagctcaattttgtatataaagaagtggtagacaatggcgctacctgtatttgttgttcactttgttgtgactgggagtactcagcttcctgaaactgtacagccataacatttgttatttttcttcaaatgtagaatgttttaaatcgctcagttcgcccccaatgtgtatgataactgataaggcgaaccaaggagacggagcttccgaaatggcatctctaggcagccttgtaactattagctttgatgaaactagtcgcacatggatcgtcctgtacattttttaggagttgacggcatcacaattgctcgttatcattatcagcgcggccagtggataaagttttctgcagtccaatgttgggttttcaaaattccaggagcgggtatattgcgcactcttgctccaagctgtcaaaacatgccaatgtttacatccaaatcagtggaaatacaatcgaggacaggattgcaagtcagcgaaacatcatggcgccctctccgaaccacgttgtcaatgtcgagtgccaatcacccgtaaccacttgacgatgtcaagaaagattgtcatcacgttttgtgttccttaaaccagtagagcgtatgcttgaccagggctaagacgaaaaggtagttggaaaaaagaaagagaaacgaaaagctaggccgagcagcacccgcccgcgttcacgggcgagacctctcgtccttggcggcgtcgacgtcgatggtcttgcctctggacggcgcggcggggtcgtccccgatgtcgagcgcgttccggctcacgacgtggtagatctggcggagcacctcggcgaaggcgcgctctacgttggtggcgtccagcgccgacgtctccatggagaaggtgccgtggcgctgggcgaaggccgcggcgtcctcgggtgacacggcgcgcaggtggcgcaggtcggccttgttgcccaccagcatgaccacgatgttggcgtccgtgtggtcccgcagccagcgctccgcgttgtcgaaggtgacgcggcggggcaccaggggcgtgccaggatttagagaatgggtattcgaaatggttagagagaaaaaaaattggatggcctaaagcctatcctaatagccttttttactagaaagtaaactaaatcataactcacgttaaaataataggtcataagatgatgttgttcaacac

SEQ ID NO: 77414 - DNA, 4463 bp, Zea Mays
aaattgcaacagccaacaaggcacatgaaagatgctatatacagtcccatggcacataagatcacacgcagaaacaaagagattgggcaattggcgtcacacgctctgtcgctcttgtgtcaattctttccattcgcctctctctattgtaaaaggaaaaaaaaaacagcagacggataaaaaggggctcgcaaatgctatatcccaaaaaaacgatacgcaccagagcctcttgctcctcgttagggatggcaatgggtcgggttcggatcgggtatggtaaatatccgcccgcgacaatacccgcgggcattactcatacccgcccgcgactatacccgcgggtaggattttgtacccgtgcccgtacccatcgggtatcgggcgggtatcggatacccgtggatataattacaatccacacaaataaaacacatgattcacaaacaaatgacaaggtagaaaaaacaaaacataattaatctaattactgttacagaagcaaacaaaaaacacatggttagctttgctcagtacctgtgctcggcttgatgcctactacagtactggctgggcaggacgccgcccgacccacctccttgagcttctcgctcagcttcacgttcctgctctgcatgatgaccgagccatcgacgagagaggaccgtcctaggccttctgcaccaacaaggagacacagcggcggcgggtggcgtccacggccaccggcaccgtggccagcacaacgcgccccaggaagcccaagcggtggagggacaaggaagcagcagcacaggagcgacgagcatggatgtggcgagttattgcgcggccgagggggagggggacattgcgattgccgccatggttgctttccttctttcttccttgatttcgacggaggatgccttatgcctactgcagtactggctggggcaggacgccagggatgcagggtcgctctcgctcgtcttgatgcctactgctggcggccgggtgggacttggtcacttggagcctagggttagcccagccgatcacaagttgggcctgcaattgggccacagttggctacttctctcctgtctacatattttcggatatccgcgggtacccgcgggtaaaatacaatatccgaacccgatccgatgttacctcgggtcgggtatgggtaaaacccgtgagtaaaatattgtacccgaaaccgaacccaacgggtcggatatccgcggatatccgaacccacgggtaatattgccatccgtcctctctcctctttctcccctttcgcctctctcttcttctaccaccactcttctgctcgctaaaaaaagcttctcgagcttataaatacgttccccttccccccggcgccaagttcctccccccgatccgcttcccccttccacccgccgatcgccctccgctcgctccaccgcggcgggcgatcgctcatctccccctaacctcccccgctcgcgattcccgaggcgaggtgccacccaccgcagatttcttccgacggacggttggctcgctcaccccctacttcgctgatcggatcgcgtgctgcccgaggtagaggtgatgataaggcatagttgtttgacttagcctgccttagctatttcttgaagctaagggaaataataattggtgttatggcatttagaaatatggtttgcactccccaagtcattaatcttacatcagactcagagagagggcaagctcaaggaggcaatggtagtgagatatctgagcaaggtgcacaacatgctgtcagagttgtaggaaatgcaatgaacattggtctctctggtgtgcgaagttactatgatatgagcataaatcatcaccatcagtctgttcataacccacccccgaatttaggtgttgattctggttttgtcttcgcatcaaatatgtacaatccctgcatgtcatcaacatcaatgaacagacatgtttctcatgctcagagctttggatcagggaatcaagtgttgcctcaaaaccaagtcccaggaactatggatgagagtagcagaaatgacagtattggtgaaagtgctagagagcatattaaaaggaaaaatgctgcagttgctggaagctatcattttgttaatggatttgcaagctcaagctcatcttctcatgcacctcaaaatcctatgcttgggccttgggacccttcttttgaatcaactgtttcttctaatgttgcaccattcaacccatcagaatatcatggacacaacaacagttggccgtccttagaaggatcttccataacaggaagtaatggattcaactcaatggttgttcatccagactcagtacagcgtgggaactatacatttccacccactcatattagccattcatggatgtcccatgctacaaatggtattgctgatggagttccccagtgggaatatgccaatgcaactgctaatattcaaggcagatttgcccattcaggagccacagaaatcgcaaatgttggttttcatgaatatcagaatggcccttcaactatttgtcggggaccagtaccttatttccaccagcatgcgatgcatggcatgcaagctcttgatcctactcaaatgcaagttccttatcaacaatgccacagtaatggtttcttgcatggtggtattaattaccctggaaaccgtctccaattaggtccacgaaatccagttctcttcaccagttctgaacgtgcttttgggcctccacagcatccgttcctggcaaatccagttaaccaccgcaacataaggattctaccacccgagcagcatgctacaataatggatttttcgagattgtatgaagtgtcaaatactgtagatgagcatagagatatgcgtctagatatagacagcatgacgtatgaggagcttttagcattagaagagcagattggagatgtcaatactggtctgacaaaaagtcacattgtagataaattgaggactagcctatatgttccaggaatatcgagcatgtctgatcagccatctaaatcttctctagagaatgatgcttgcataatatgccaggaggagtaccaggctagagactgcgttggcacccttgactgcggtcacaggtaccacgcggagtgcgtgaagcagtggctgatggtgaagaacttgtgccccatctgcaagacgacagcattgtctgccaacagaagacaaggacagtgagcgggaatggagaagcctgttggttatttgctttgacaaacgttcagctcaattttgtatataaagaagtggtagacaatggcgctacctgtatttgttgttcactttgttgtgactgggagtactcagcttcctgaaactgtacagccataacatttgttatttttcttcaaatgtagaatgttttaaatcgctcagttcgcccccaatgtgtatgataactgataaggcgaaccaaggagacggagcttccgaaatggcatctctaggcagccttgtaactattagctttgatgaaactagtcgcacatggatcgtcctgtacattttttaggagttgacggcatcacaattgctcgttatcattatcagcgcggccagtggataaagttttctgcagtccaatgttgggttttcaaaattccaggagcgggtatattgcgcactcttgctccaagctgtcaaaacatgccaatgtttacatccaaatcagtggaaatacaatcgaggacaggattgcaagtcagcgaaacatcatggcgccctctccgaaccacgttgtcaatgtcgagtgccaatcacccgtaaccacttgacgatgtcaagaaagattgtcatcacgttttgtgttccttaaaccagtagagcgtatgcttgaccagggctaagacgaaaaggtagttggaaaaaagaaagagaaacgaaaagctaggccgagcagcacccgcccgcgttcacgggcgagacctctcgtccttggcggcgtcgacgtcgatggtcttgcctctggacggcgcggcggggtcgtccccgatgtcgagcgcgttccggctcacgacgtggtagatctggcggagcacctcggcgaaggcgcgctctacgttggtggcgtccagcgccgacgtctccatggagaaggtgccgtggcgctgggcgaaggccgcggcgtcctcgggtgacacggcgcgcaggtggcgcaggtcggccttgttgcccaccagcatgaccacgatgttggcgtccgtgtggtcccgcagccagcgctccgcgttgtcgaaggtgacgcggcggggcaccaggggcgtgccaggatttagagaatgggtattcgaaatggttagagagaaaaaaaattggatggcctaaagcctatcctaatagccttttttactagaaagtaaactaaatcataactcacgttaaaataataggtcataagatgatgttgttcaacac

SEQ ID NO: 77415 - DNA, 1378 bp, Zea Mays
aaccatcacccgcccacacggagcacgctccacgccccgcgcggaaaagacggagagagaacaaaaaagttaggggggggaagaggagactcggcggcccgaacgacaagcgctgacgcacgtacgtcggcaagtaatgtaccaggccatcccctacagcagcgcccggccgtggctgatgccggcgggcgaggcggccgccgtcgtcgccgtgaagccggagcctgagccggcggcggcggcgaccgtcgcggaggagcgcgcccgggccgacgccgcgggcgggacggacgacgacggcgacggcggcagggcggaggtcgggagggccgtggcggagagcccggtgctggtggtggggcggcgcgggtgctgcctgagccacgtggtgaagcggctgctgcaggggctcggggtgaacccggccgtgcacgaggtcgcggacgaggccgcgctcgccggggtcgtcccggccggcgcggaggccgccgccgccgcgctgcccgcggtgttcgtgggcgggaagctcctcggcgggctcgaccggctcatggccgtccacatctccggcgagctcgtgcccatcctcaagaaggccggtgccctctggctctaattttaaatctgtcaggcaggcgtatctcttccttcttcgttttcccttttctcccccttccggaaaacgattggcgtcgtggtttggccgttggaccgagttaagattacatcacgccgccaccgccgctgatggatgcgttggaatagggctttgatctctctctctctgttttttttttcatttgctttattaggggaaacagaagaagaagaaaaaaaaggaatgatgagaattctaatcacataatttagtctagctttatctggtgggtagcgtgtggtgatgactgctcgcttcgcgtcgcgcttcgtccatcatgtacagtcgtttccgtttcagattctagtgaggaatgagctgtccagtttcccattctcccgtggcctggaccatttgcgtacatcacctgatatgtgtactacgtcactggcttttgatgcgatcagatggcacgtcaaggctgcacctacctttgctcctcgagctttttgctcccccattctgatgagtaaaattcaaagcctggttactttactggtgccagaaatggaaaacgatgcaattaaaagaagaaacatatcttgtgcaccaattatatttaggtacaaccgtacaagcaatcaatcttgtgcatgtaatcgaaatctaatggaaactgctattttatatttaaccacaatttaaaacctactagtattttatatttatcatttttctctctctcttgaaaatagtagtatattagattttaattggata

SEQ ID NO: 77416 - DNA, 1604 bp, Zea Mays
cttttgcgcggcctgtcattcccctggggatcagccttggcgttgcctcatatgggggcgagctgaggagcaaagcggacaacaagaggctttcgatcgatctccctccctatctctctctctctgctatcccttcccctgcttccctcccccctagcttttagtagaaagaggagggccgggacgtggtgacaaggctaggctagcttggggccggcggagatcgatcgtcgtcgtcgacggccatgacatggtgcaacagcttcaacgacgtgcgtgccgtggaggacaacctggccaccgccgccgccgccaagaaacagcagctgcaggcctcctcccacgtcaacctcatcaggacctgcccctcctgcggacaccgcgcgcagtatgacgaacaggtgtcggcaaagacggactgatccggcacttcttccaccgcccgtccaaggcttacacgacggggacgaggaagcggcggaaggtccacaccgacgaggagggaggcgagacgcggtggcacaagacgggcaagacccggccggtgttcaccggcggaaaactcagcggctacaagaagattctggtactctacactaactacgggaagcagcggaagccggagaagacaaactgggtgatgcatcagtaccacatggggtccgacgaggaggagaaagacggcgagctcgttgtctccaaggtgttctaccagacgcagccgaggcagtgcggcaccgtttcgtcgacagctagggacgctgtcccactggctgccagcgcgacgactggtcaccaccaccatgacggtggcaatggcggcgacgacgagaacagcatgctgatgaaggaagtaggcattgtagatttctatagccgggggggggggggggggggggggcgctaatcggctacaaccagacggctcctaacaacggggcggctgcttctgctatagtgggagctgctggctttgaggtgcacactacagtaggagctgctggctttggaccctgaccaagacgtgcaagtgcaactattcaactgatataggtagaagggagagagacaaatggaggcagggataatggcaccgtcatgaacgcaatagcttactgcaggcggtggacgagtttactgaaccgtaatgctggacaatatataagaggactggagtacgtggttgagtggcggcttgacgtacagatgctgaagtgtagggattggtacaactatacattgttcattaattgttacacatatacgtaacttgtcgctatcaattttttgtttaatgatatgttagttcttaattaactaaagggcttgtacatgcatgtatacaatgcacctttctttttgaagaatgcatctggtgtataagtttgttgattgttgctcaacccttcttcgagcaaagtaaaataagcaatgtataactttgattacattcatatattgattattaatttgcttcgctcttatgaaaatacttggaattctctttaagaaagtcttatataatcatatatggattttctggccactggacttgtctgtctaagttgtattctagggacttgataaatttatttgaacttttt

SEQ ID NO: 77417 - DNA, 1984 bp, Zea Mays
gcgatcgattttcttggtctgttctcccagcgagagacggaaggtagcgccgcgcaccaagcggccggtagcttttaacagggacaagcttcctctccctgccctcttttctctctctttgttcttgtctcggccactttgttccctcgccctcttcttttgcgcggcctgtcattcccctggggatcagccttggcgttgcctcatatgggggcgagctgaggagcaaagcggacaacaagaggctttcgatcgatctccctccctatctctctctctctgctatcccttcccctgcttccctcccccctagcttttagtagaaagaggagggccgggacgtggtgacaaggctaggctagcttggggccggcggagatcgatcgtcgtcgtcgacggccatgacatggtgcaacagcttcaacgacgtgcgtgccgtggaggacaacctggccaccgccgccgccgccaagaaacagcagctgcaggcctcctcccacgtcaacctcatcaggacctgcccctcctgcggacaccgcgcgcagtatgacgaacagcgatcggatcgtcgtccatcaggtgcagcaggcggcggcgatccaggacctgccggggctgccggcgggcgtgaagttcgatccgacggaccaggagctgctggagcacctggaggggaaggcgaggccggacacccgcaagctgcacccgctcgtcgacgagttcatccccaccatcgagggcgagaacggcatctgctacacgcatccggagagacttcctggtgtcggcaaagacggactgatccggcacttcttccaccgcccgtccaaggcttacacgacggggacgaggaagcggcggaaggtccacaccgacgaggagggaggcgagacgcggtggcacaagacgggcaagacccggccggtgttcaccggcggaaaactcagcggctacaagaagattctggtactctacactaactacgggaagcagcggaagccggagaagacaaactgggtgatgcatcagtaccacatggggtccgacgaggaggagaaagacggcgagctcgttgtctccaaggtgttctaccagacgcagccgaggcagtgcggcaccgtttcgtcgacagctagggacgctgtcccactggctgccagcgcgacgactggtcaccaccaccatgacggtggcaatggcggcgacgacgagaacagcatgctgatgaaggaagtaggcattgtagatttctatagccgggggggggggggggggggggggcgctaatcggctacaaccagacggctcctaacaacggggcggctgcttctgctatagtgggagctgctggctttgaggtgcacactacagtaggagctgctggctttggaccctgaccaagacgtgcaagtgcaactattcaactgatataggtagaagggagagagacaaatggaggcagggataatggcaccgtcatgaacgcaatagcttactgcaggcggtggacgagtttactgaaccgtaatgctggacaatatataagaggactggagtacgtggttgagtggcggcttgacgtacagatgctgaagtgtagggattggtacaactatacattgttcattaattgttacacatatacgtaacttgtcgctatcaattttttgtttaatgatatgttagttcttaattaactaaagggcttgtacatgcatgtatacaatgcacctttctttttgaagaatgcatctggtgtataagtttgttgattgttgctcaacccttcttcgagcaaagtaaaataagcaatgtataactttgattacattcatatattgattattaatttgcttcgctcttatgaaaatacttggaattctctttaagaaagtcttatataatcatatatggattttctggccactggacttgtctgtctaagttgtattctagggacttgataaatttatttgaacttttt

SEQ ID NO: 77418 - DNA, 1978 bp, Zea Mays
ggtaggggtactagtggcgatcgattttcttggtctgttctcccagcgagagacggaaggtagcgccgcgcaccaagcggccggtagcttttaacagggacaagcttcctctccctgccctcttttctctctctttgttcttgtctcggccactttgttccctcgccctcttcttttgcgcggcctgtcattcccctggggatcagccttggcgttgcctcatatgggggcgagctgaggagcaaagcggacaacaagaggctttcgatcgatctccctccctatctctctctctctgctatcccttcccctgcttccctcccccctagcttttagtagaaagaggagggccgggacgtggtgacaaggctaggctagcttggggccggcggagatcgatcgtcgtcgtcgacggccatgacatggtgcaacagcttcaacgacgtgcgtgccgtggaggacaacctggccaccgccgccgccgccaagaaacagcagctgcaggcctcctcccacgtcaacctcatcaggacctgcccctcctgcggacaccgcgcgcagtatgacgaacaggtgcagcaggcggcggcgatccaggacctgccggggctgccggcgggcgtgaagttcgatccgacggaccaggagctgctggagcacctggaggggaaggcgaggccggacacccgcaagctgcacccgctcgtcgacgagttcatccccaccatcgagggcgagaacggcatctgctacacgcatccggagagacttcctggtgtcggcaaagacggactgatccggcacttcttccaccgcccgtccaaggcttacacgacggggacgaggaagcggcggaaggtccacaccgacgaggagggaggcgagacgcggtggcacaagacgggcaagacccggccggtgttcaccggcggaaaactcagcggctacaagaagattctggtactctacactaactacgggaagcagcggaagccggagaagacaaactgggtgatgcatcagtaccacatggggtccgacgaggaggagaaagacggcgagctcgttgtctccaaggtgttctaccagacgcagccgaggcagtgcggcaccgtttcgtcgacagctagggacgctgtcccactggctgccagcgcgacgactggtcaccaccaccatgacggtggcaatggcggcgacgacgagaacagcatgctgatgaaggaagtaggcattgtagatttctatagccgggggggggggggggggggggggcgctaatcggctacaaccagacggctcctaacaacggggcggctgcttctgctatagtgggagctgctggctttgaggtgcacactacagtaggagctgctggctttggaccctgaccaagacgtgcaagtgcaactattcaactgatataggtagaagggagagagacaaatggaggcagggataatggcaccgtcatgaacgcaatagcttactgcaggcggtggacgagtttactgaaccgtaatgctggacaatatataagaggactggagtacgtggttgagtggcggcttgacgtacagatgctgaagtgtagggattggtacaactatacattgttcattaattgttacacatatacgtaacttgtcgctatcaattttttgtttaatgatatgttagttcttaattaactaaagggcttgtacatgcatgtatacaatgcacctttctttttgaagaatgcatctggtgtataagtttgttgattgttgctcaacccttcttcgagcaaagtaaaataagcaatgtataactttgattacattcatatattgattattaatttgcttcgctcttatgaaaatacttggaattctctttaagaaagtcttatataatcatatatggattttctggccactggacttgtctgtctaagttgtattctagggacttgataaatttatttgaacttttt

SEQ ID NO: 77419 - DNA, 1112 bp, Zea Mays
ccactttgttccctcgccctcttcttttgcgcggcctgtcattcccctggggatcagccttggcgttgcctcatatgggggcgagctgaggagcaaagcggacaacaagaggctttcgatcgatctccctccctatctctctctctctgctatcccttcccctgcttccctcccccctagcttttagtagaaagaggagggccgggacgtggtgacaaggctaggctagcttggggccggcggagatcgatcgtcgtcgtcgacggccatgacatggtgcaacagcttcaacgacgtgcgtgccgtggaggacaacctggccaccgccgccgccgccaagaaacagcagctgcaggcctcctcccacgtcaacctcatcaggacctgcccctcctgcggacaccgcgcgcagtatgacgaacaggtgcagcaggcggcggcgatccaggacctgccggggctgccggcgggcgtgaagttcgatccgacggaccaggagctgctggagcacctggaggggaaggcgaggccggacacccgcaagctgcacccgctcgtcgacgagttcatccccaccatcgagggcgagaacggcatctgctacacgcatccggagagacttcctggtaccttgccggctggaaatctaagatccgcaaccgtgttgcaatgcctcttaactatatgtcggcgatggtggtccctaatcgggtgcttaatgccattgatcgccttcgccgtgtgttcttctagacgggttacggatttgtgctatggttttaaatgtcttgttgcctgggacaacgtttgtcgcctcaaggacatcggtggtcttgccataaaaaatcttaagcttcaaaaccaatgtcttcttctgaagtttgccgtcaagttgctccatggtaaccatgttccctggattacttggtgctgcaggggctctaatccagtcttgatcctctctctcccacctccccagtttacatgggccacgcctacaattcttcccttgacatatgaacgaatgtttagggaaacgtcgcctgaactatagattacgtaccttaccatagataatttgggggatactttagattacctttctaatgccc

SEQ ID NO: 77420 - DNA, 1827 bp, Zea Mays
cgggaaggagggaaccgcacactccagcctctaaagcctcctaaagcctgtgggcacgcggctggtggcgtaggcgtgcgatcctcatcacttcctcagaacggagaccctgctgtcctggaaccccgctgttgaggtctgggctcagaccattccagcccacgcatcctcctcggcattccgtcgaacacctctcttaccaccgcccccatgccgccggccaactccacgccgcccaaatggccgaagaccctcaccgcagaccacctccaccgcctggttcgggccgaacgggaccctcgccgcgcccttgcgatcttcgacggtgccaccgccgccgcttccacttcggcgccagaccccatcaccccgtctctggccaccgtctctctccttacctctcgcctcgcctccgccggccacctccccctcgccacctccctcctctcccgctcacgcggggtcttcccctccgttgccgctctcgagcctcccttcctcggcctcctccgcgccttctcccgcacgcaccgcccgctcgccgctctccacctcttccgctccgccccctccgacctcgcgctcccccactctgctcgctcctacaacgccgtcctcgccgctctcgtcgcgcactcgcacctccccctggcccgctccctactcgccgacatgcgcgccgccggattcgcccccaccgctgccacgtacaacgtcctcctcaaggcccactgctccgacgccgccgctcacatcgaagatgctctccgtcttttccggaacatccccaaacccgatgtatgctcctacaacaccatcatcgacgggctctgccgccgcggccgcctggcggaggccctcgacatgttctctgagatggttgggaaatgcattgcacctaccgtcgttacttacaccactgttatccattggcttgcaagggagggctgctttgatgatgccttaaagatatttcatgaaatggggaggagaggggtctcgcctaatctggtcacttatagttcactgattgatggactgtgcaagggtggacgtgccacatcggcattagaattgctggatagaatgatcaaggagaagaaactgccaaatatgatcacatatagctcggtgattgatggactctgtaaggagcacatgctgagtgaggcaatggagatcttggaccggatgcgactacaggggaggaagcctgatgctgggttgtttgggaagctaattgttgggctatgtgatgcaggaagggctgtggaagctgcaaattacctggatgagatggttcttgccggtattgaaccaaaccgggtgacttggagcttgcatgccaggataaacaataccgtgctgacagcattatgtgataagggtgaacttggcagggcttttcaggtctaccagagcacaaggactcgtagtatttctaccgacccaaccactttccatcttcttgttgagagcttctccaaaaataacatagagaaagctgcccgtgttgtgcttgacatgctgtcggagagatgcatccctgagagggagacatgggatgttattatcagtgggtactggagtaagaaaaaggtgaggcaagaagccaaggaaatctgggaccatataacagttagttgattttagaatttggctctatgttgtgttattacctggcgtcgcctagcgcgggagcttactcgtcagtggatctttggatgtggatgtggggagagtctttctattatcgagacatctgtgctagcaatattgagaacttaagatttataatttattgacaaagtaaaatagagttaagtt

SEQ ID NO: 77421 - DNA, 1132 bp, Zea Mays
ctttttgctcttctctcctgttcaggtggctgtgcctgtgcggcggctcacctctccctgtccaacaccgccctgcaccttcctcctcggtgtcagcatctcaccgtcctcgacggcggcggcccagcagcagtctgcagcggcggcggcccagcagccattagcaccaagatgagtacatcaaccgacgatttgggatcaattacaacagattcaattatgctcaaaaactcatgatcaacatagatggcttccatcatctacggggatctacacttccaagtctgcatatgagcgtttctgcttggggacaacagattttgaacccacttctcgtatctagaagagttggcctccacctaaatgcagattctttttatggctggcagccttgaacagatgttggactgctgaccgtctggctcggcagggattggaacatccagaacactgccttttttgtgatcaggaggaagaaagaattgagcacattcttctcagttgtgttttttctagagaagtttggtatatgccgctatcaatggtaggactgcagcaaggcttcacggaaaggtattccaaaattggtagaaactggcagaggtacaagtgccacccatacaaaggaaaggatttaacaccctggtttcacttgtggcttggatgatgtggaaacatcggaatgcatgtgtctttgataaggctccaccaagcattgccaagatcatccaggaagtcagagatgaggcttctctttggtgtttggctggagcagcagggctgcgtggtctttggccataactgttatgtaatgtggtaaaggtcctctattgttttgtatcctagatgagtccttttaggttcctttgttttcggcctcccgcctccgtaaggagtcctttgtatttggtctgttccagacccttattcttcttcttaatataatgagacgcagctctcctgcgttttcgagagaaaaaaggtgatatcatccaaatcgaactttaggcaatatatgagatttagtataattcgattatagatacatagggccatacaaaagcaacaaaatgctcatcctcactttttcccaagttcccctaaacataatcaactcaaatctcaccagttg

SEQ ID NO: 77422 - DNA, 1133 bp, Zea Mays
atcagctcgactaatcgtccggtcgtccgattagtcgtcgactaaacacgattagtcgtccagtttaggtcgggacgattaattttccagggctcctgtttcggcctgtttgggatatgggctggacgactgggcccattagtgtaacagtaaaacacacattagggtttaggtcaccttctcctctcctgttccggcggctttttgctcttctctcctgttcaggtggctgtgcctgtgcggcggctcacctctccctgtccaacaccgccctgcaccttcctcctcggtgtcagcatctcaccgtcctcgacggcggcggcccagcagcagtctgcagcggcggcggcccagcagccattagcaccaagatgagtacatcaaccgacgccttgaacagatgttggactgctgaccgtctggctcggcagggattggaacatccagaacactgccttttttgtgatcaggaggaagaaagaattgagcacattcttctcagttgtgttttttctagagaagtttggtatatgccgctatcaatggtaggactgcagcaaggcttcacggaaaggtattccaaaattggtagaaactggcagaggtacaagtgccacccatacaaaggaaaggatttaacaccctggtttcacttgtggcttggatgatgtggaaacatcggaatgcatgtgtctttgataaggctccaccaagcattgccaagatcatccaggaagtcagagatgaggcttctctttggtgtttggctggagcagcagggctgcgtggtctttggccataactgttatgtaatgtggtaaaggtcctctattgttttgtatcctagatgagtccttttaggttcctttgttttcggcctcccgcctccgtaaggagtcctttgtatttggtctgttccagacccttattcttcttcttaatataatgagacgcagctctcctgcgttttcgagagaaaaaaggtgatatcatccaaatcgaactttaggcaatatatgagatttagtataattcgattatagatacatagggccatacaaaagcaacaaaatgctcatcctcactttttcccaagttcccctaaacataatcaactcaaatctcaccagttg

SEQ ID NO: 77423 - DNA, 1511 bp, Zea Mays
atcagctcgactaatcgtccggtcgtccgattagtcgtcgactaaacacgattagtcgtccagtttaggtcgggacgattaattttccagggctcctgtttcggcctgtttgggatatgggctggacgactgggcccattagtgtaacagtaaaacacacattagggtttaggtcaccttctcctctcctgttccggcggctttttgctcttctctcctgttcaggtggctgtgcctgtgcggcggctcacctctccctgtccaacaccgccctgcaccttcctcctcggtgtcagcatctcaccgtcctcgacggcggcggcccagcagcagtctgcagcggcggcggcccagcagccattagcaccaagatgagtacatcaaccgacggtaacttcaatcactgcacctttcttttgatctgtgccccctcttgaatcccctctgcacctttctcttgatctgtccccccctcttgaatcccctcttcaatctgctgctgccttagccacgattagtcgacctagtcgtcgtcctaatcgcgattagtcgcctagtcgcccaggtgtgtcgactagcaagtcgctcgacttgaaatcattgcattggattactgacataagggatggcttccatcatctacggggatctacacttccaagtctgcatatgagcgtttctgcttggggacaacagattttgaacccacttctcgtatctagaagagttggcctccacctaaatgcagattctttttatggctggcagccttgaacagatgttggactgctgaccgtctggctcggcagggattggaacatccagaacactgccttttttgtgatcaggaggaagaaagaattgagcacattcttctcagttgtgttttttctagagaagtttggtatatgccgctatcaatggtaggactgcagcaaggcttcacggaaaggtattccaaaattggtagaaactggcagaggtacaagtgccacccatacaaaggaaaggatttaacaccctggtttcacttgtggcttggatgatgtggaaacatcggaatgcatgtgtctttgataaggctccaccaagcattgccaagatcatccaggaagtcagagatgaggcttctctttggtgtttggctggagcagcagggctgcgtggtctttggccataactgttatgtaatgtggtaaaggtcctctattgttttgtatcctagatgagtccttttaggttcctttgttttcggcctcccgcctccgtaaggagtcctttgtatttggtctgttccagacccttattcttcttcttaatataatgagacgcagctctcctgcgttttcgagagaaaaaaggtgatatcatccaaatcgaactttaggcaatatatgagatttagtataattcgattatagatacatagggccatacaaaagcaacaaaatgctcatcctcactttttcccaagttcccctaaacataatcaactcaaatctcaccagttg

SEQ ID NO: 77424 - DNA, 2545 bp, Zea Mays
cacgcccccaccagatttcgccggatctcagcccacatgcggacggactccgccgagagctcaagcaaataccttggcatatccgtctcgcactccgaggtccaccacgctcgctctccgcttcccgccttccccagccccacacccgtttttattcctccccgctccgcacctcgagctcgctctcggcgctataggcagctcacggacttggcggttttacattggggggctgcctgcaactgcaagtgcatagccgccctccactcctccctctctttccccgccgcttcctcctcccgcctcggattcccacccccagctccggctcctcacctcacggcaccaacccaaaactctagcccgcgcatggcgtcccccgcgcgccccgctgccgcctccgtctccggcgccttcggcctgcccccggacgcgcgctgctcctacgatcagcccctgccccgccgccgcgagggcttgcaggacgggaggctggtgcggacgttcgtggccgcctacggccagccgccgccgccgcagcagcagcagcagcagcaggacggtttcttgtaccccaaggacgccgtggtggcggccgtggaggagtgcacgcggaagcaggccgacgcactgctgcactcgctcggcgccatcgggggcaggctctcccagctcgagctctactgctacaagctcgagaggtccatcggggagctgcgcagcgacgtcatggactaccacagcgacagcaacgccaacttcaaatgcatcgacaggaacctcagacaggtccacaaatcgctccagcttcttcaggatagacaagacttagccgaaactgcaaaagaactcagcaagcttcagatagcacacgaggcgccttctcagacgaagggtgaggccgccggtttccccatgctcgcggcaagggaaaacggccacagcacgcgagccccaaaacacgaggtcgcccttttgccgcttcaccaggtcaatgggacgatgcactcccctgccgtgcccgtgcaggtccagaccagcaacggcttcgttctgcagcacctggtgcccgtcgctttgagcacgcagcagcatgagcagcagcagctgaaccaggctcccgtgttctacgtgcaaagccgggaccgtgctaaatgcaccgagggcaaggcggcgttggagcctctggttcaggttgtgcagccgcttgcgcacagccctgatgccgtggtgcaagtcgagctgcctcagaaagctagtcaagcagcagcagctgaactgtaccctcagcctcagactcagagtcacaggctgcagacgcctacccagcaggttgatctgcatacatggcatccccagcagcccatggtgcaagtgcaacagcagcagtacagtatccaacaagtttcacgacatatggtggtggctcagcagccgtcctcgtctcctcagtctcagctgagcgctccacaagccacacccttgtttcctccattcagttccgtgaaaccttcgagttgtaacacggagacaattacaagaagaatggctgggcagcctccatactcttcatcacagcagcaataccagcagcagcagcatgaagttgcccattcattctatggccaaggcaacacagtattgcttcctgtagcagatcataacgctcagcatcagcaaccgcaaccagtgcagctacacagccagggcccctcctgtccacctcagccaggcaagcccagtcactgcagcgccgcaccctatgctgttcaaggaaacggccagacctacagctccgcatacaagaacccttctaactgccctgcaactgcagccgttgtagctcttctgcctcagcctcctgccatcgcctgtatggcgtaccatcccttgggaccacaggtcgtgcacaaccatccatttggaaatactatggttgaaacgtccaggtccagcgtggtagggtacccacgggatcagtttgagatgctcccggcgattactgccgcccaacctgtactaccggttgataagctcaatgctggcagcaatgtaacatcgtcccctagggaatggtcagcatagcggtggacggtgcgcggtcttgcatttcactgcttccacacagcattctactatacgtattgcagctgggagctcgtcgggtctattttatctggctcttttttcccccatcagccagcagattagaacggatccttctacctttttcagctgaaggtcggtatggaataagataagtaggttggctgagtgatcactggtcgctgttggcatatgccctcacttttaatgggcatatgtgcttgtaaccaggtgcgagcttatattatatgcctttcttatatgagtacatgacgggtttacatcagcttgtcagatgtttttttgtaactgtgaattgcattactcatcctctgcaacagagatgtcaatagaaaatttcccaccaggtacggacacctgttacccattcctatgaagttacactcatctacatcttcgtatccgtcatgggtataag

SEQ ID NO: 77425 - DNA, 2858 bp, Zea Mays
gcgccacagccgcagcccgcaggagcagcagagcacgagcacggcaggtcacccctagaggcctatccaccgccacgcccccaccagatttcgccggatctcagcccacatgcggacggactccgccgagagctcaagcaaataccttggcatatccgtctcgcactccgaggtccaccacgctcgctctccgcttcccgccttccccagccccacacccgtttttattcctccccgctccgcacctcgagctcgctctcggcgctataggcagctcacggacttggcggttttacattggggggctgcctgcaactgcaagtgcatagccgccctccactcctccctctctttccccgccgcttcctcctcccgcctcggattcccacccccagctccggctcctcacctcacggcaccaacccaaaactctagcccgcgcatggcgtcccccgcgcgccccgctgccgcctccgtctccggcgccttcggcctgcccccggacgcgcgctgctcctacgatcagcccctgccccgccgccgcgagggcttgcaggacgggaggctggtgcggacgttcgtggccgcctacggccagccgccgccgccgcagcagcagcagcagcagcaggacggtttcttgtaccccaaggacgccgtggtggcggccgtggaggagtgcacgcggaagcaggccgacgcactgctgcactcgctcggcgccatcgggggcaggctctcccagctcgagctctactgctacaagctcgagaggtccatcggggagctgcgcagcgacgtcatggactaccacagcgacagcaacgccaacttcaaatgcatcgacaggaacctcagacaggtagataaagactggatcccggtgcaccggcttctcgcgccgacgagtgcaatggcagtgcgatttggacttctcacttatgtttggtttggtgtagtaaaatgatagtctgtttccctgaaacctagtacattcagtggagtcaacttatggttcccggagatgagattctgcatcactttggatgtgagactaacatcatcttttgataactactagatctacattttgggttgccaggtccacaaatcgctccagcttcttcaggatagacaagacttagccgaaactgcaaaagaactcagcaagcttcagatagcacacgaggcgccttctcagacgaagggtgaggccgccggtttccccatgctcgcggcaagggaaaacggccacagcacgcgagccccaaaacacgaggtcgcccttttgccgcttcaccaggtcaatgggacgatgcactcccctgccgtgcccgtgcaggtccagaccagcaacggcttcgttctgcagcacctggtgcccgtcgctttgagcacgcagcagcatgagcagcagcagctgaaccaggctcccgtgttctacgtgcaaagccgggaccgtgctaaatgcaccgagggcaaggcggcgttggagcctctggttcaggttgtgcagccgcttgcgcacagccctgatgccgtggtgcaagtcgagctgcctcagaaagctagtcaagcagcagcagctgaactgtaccctcagcctcagactcagagtcacaggctgcagacgcctacccagcaggttgatctgcatacatggcatccccagcagcccatggtgcaagtgcaacagcagcagtacagtatccaacaagtttcacgacatatggtggtggctcagcagccgtcctcgtctcctcagtctcagctgagcgctccacaagccacacccttgtttcctccattcagttccgtgaaaccttcgagttgtaacacggagacaattacaagaagaatggctgggcagcctccatactcttcatcacagcagcaataccagcagcagcagcatgaagttgcccattcattctatggccaaggcaacacagtattgcttcctgtagcagatcataacgctcagcatcagcaaccgcaaccagtgcagctacacagccagggcccctcctgtccacctcagccaggcaagcccagtcactgcagcgccgcaccctatgctgttcaaggaaacggccagacctacagctccgcatacaagaacccttctaactgccctgcaactgcagccgttgtagctcttctgcctcagcctcctgccatcgcctgtatggcgtaccatcccttgggaccacaggtcgtgcacaaccatccatttggaaatactatggttgaaacgtccaggtccagcgtggtagggtacccacgggatcagtttgagatgctcccggcgattactgccgcccaacctgtactaccggttgataagctcaatgctggcagcaatgtaacatcgtcccctagggaatggtcagcatagcggtggacggtgcgcggtcttgcatttcactgcttccacacagcattctactatacgtattgcagctgggagctcgtcgggtctattttatctggctcttttttcccccatcagccagcagattagaacggatccttctacctttttcagctgaaggtcggtatggaataagataagtaggttggctgagtgatcactggtcgctgttggcatatgccctcacttttaatgggcatatgtgcttgtaaccaggtgcgagcttatattatatgcctttcttatatgagtacatgacgggtttacatcagcttgtcagatgtttttttgtaactgtgaattgcattactcatcctctgcaacagagatgtcaatagaaaatttcccaccaggtacggacacctgttacccattcctatgaagttacactcatctacatcttcgtatccgtcatgggtataag

SEQ ID NO: 77426 - DNA, 1144 bp, Zea Mays
cagaaagagctacacatttttttcttctgaaccactgaaatgacgctctaaagcagaaatctctacttccttcatttgaatctgcagaaatgcgcaacttagctgagacattgttaagggatataattcgtggaagtccagatgttaaatgggaaagcataaaaggtctggagaatgcaaagcgtcttctcaaagaagcagttgtaatgccaattaaatatcccaaatacttcacaggtctattatcaccttggaaaggcatattactgtttggtccacctggaacaggaaagacaatgctagctaaagctgtggctactgagtgcaaaacaacttttttcaatatttctgcctcgtcgattgtaagcaagtggcgcggtgactcggagaaactagtgaaagtgttattcgaacttgcaaggcatcatgcaccatctactattttccttgatgagattgatgctatcattagtcaacgtggtgaagctcgtagtgaacatgaagctagccggcgattgaaaactgagctattaatacagatggatgggttgactaagacagatgagcttgtttttgttctagcagcaacaaatttaccatgggaattggatgcagcaatgctgcgtcggctggagaagcgtattcttgttccattgccagagccggatgctagacatgctatgtttgaagagctcctgccatatacacctggcacaatggagattccctatgatgttcttgtggagaaaactgaagggtattctggctctgatattcgcctggtatgcaaggaagcagcaatgcagcccctaagacgggtaatggcagttcttgaaggcaggaaagaagaggtccctgagggtgagttgcctgaagttggcccagtaactacagaagatattgaacttgctttgaggaatacaagaccgtctgcacatcttcatgcacatagatacgaaaagttcaaccaagattatggcagtcatgtacatggctaaaggggagaagcttgttgtagggtttaatttgtatgctcatgcgtgggccaataggtgactactgaattcatcgacatgctgagtgatgcacgcagatgaagaccctcgatctgacaggaggatacgacggacgggtgtatgagcag

SEQ ID NO: 77427 - DNA, 1668 bp, Zea Mays
gcggggtcacggagaaaccgagccccgtaccatggaagcgccctcccgttccgtgcgtctgggctcgggaaagaccataccagcgcggcagcgcagattccatcgacgccccgctgtcccgggctcccggccgcttgtttgttgtttacttctattttttttgcccgtcagccccaccgcaaccgacgcctccagtcctactcctccacccagctcgccgcttcaggaatccggagagctcgcgtcgcgcgtgcgtgggcgtgggtgcgtgcggcggcgaagcaccagcaccaccctctcgcgtcgcgcgcgcgcgcgcgtctcgatggccgacggcgagccttccctcacgcgctggaccttcgaggatttcgtggtccactacgaggcgcgcttcggcctccggcgcgaggccgacggcgacgacgcacccccgccgcgcggatccgatcatggggccagccgccccgccactgcccgcgccaacggcggcgcggacctcgccgtcttcgagcagttcgagcggatggagaggaaggtggagataagcaatggagcaatagaggatggtccactgcagaaatctctacttccttcatttgaatctgcagaaatgcgcaacttagctgagacattgttaagggatataattcgtggaagtccagatgttaaatgggaaagcataaaaggtctggagaatgcaaagcgtcttctcaaagaagcagttgtaatgccaattaaatatcccaaatacttcacaggtctattatcaccttggaaaggcatattactgtttggtccacctggaacaggaaagacaatgctagctaaagctgtggctactgagtgcaaaacaacttttttcaatatttctgcctcgtcgattgtaagcaagtggcgcggtgactcggagaaactagtgaaagtgttattcgaacttgcaaggcatcatgcaccatctactattttccttgatgagattgatgctatcattagtcaacgtggtgaagctcgtagtgaacatgaagctagccggcgattgaaaactgagctattaatacagatggatgggttgactaagacagatgagcttgtttttgttctagcagcaacaaatttaccatgggaattggatgcagcaatgctgcgtcggctggagaagcgtattcttgttccattgccagagccggatgctagacatgctatgtttgaagagctcctgccatatacacctggcacaatggagattccctatgatgttcttgtggagaaaactgaagggtattctggctctgatattcgcctggtatgcaaggaagcagcaatgcagcccctaagacgggtaatggcagttcttgaaggcaggaaagaagaggtccctgagggtgagttgcctgaagttggcccagtaactacagaagatattgaacttgctttgaggaatacaagaccgtctgcacatcttcatgcacatagatacgaaaagttcaaccaagattatggcagtcatgtacatggctaaaggggagaagcttgttgtagggtttaatttgtatgctcatgcgtgggccaataggtgactactgaattcatcgacatgctgagtgatgcacgcagatgaagaccctcgatctgacaggaggatacgacggacgggtgtatgagcag

SEQ ID NO: 77428 - DNA, 2503 bp, Zea Mays
gacgccccgctgtcccgggctcccggccgcttgtttgttgtttacttctattttttttgcccgtcagccccaccgcaaccgacgcctccagtcctactcctccacccagctcgccgcttcaggaatccggagagctcgcgtcgcgcgtgcgtgggcgtgggtgcgtgcggcggcgaagcaccagcaccaccctctcgcgtcgcgcgcgcgcgcgcgtctcgatggccgacggcgagccttccctcacgcgctggaccttcgaggatttcgtggtccactacgaggcgcgcttcggcctccggcgcgaggccgacggcgacgacgcacccccgccgcgcggatccgatcatggggccagccgccccgccactgcccgcgccaacggcggcgcggacctcgccgtcttcgagcagttcgagcggatggagaggaaggtggagataagcaatggagcaatagaggatggtccactgcagaaatctctacttccttcatttgaatctgcagaaatgcgcaacttagctgagacattgttaagggatataattcgtggaagtccagatgttaaatgggaaagcataaaaggtctggagaatgcaaagcgtcttctcaaagaagcagttgtaatgccaattaaatatcccaaatacttcacaggtctattatcaccttggaaaggcatattactgtttggtccacctggaacaggaaagacaatgctagctaaagctgtggctactgagtgcaaaacaacttttttcaatatttctgcctcgtcgattgtaagcaagtggcgcggtgactcggagaaactagtgaaagtgttattcgaacttgcaaggcatcatgcaccatctactattttccttgatgagattgatgctatcattagtcaacgtggtgaagctcgtagtgaacatgaagctagccggcgattgaaaactgagctattaatacagatggatgggttgactaagacagatgagcttgtttttgttctagcagcaacaaatttaccatgggaattggatgcagcaatgctgcgtcggctggagaagcgtgtatccttttctaaataatcttgtgtttcaaatcttagttgatttacaaatttcatgcatattgttagagatatgtatagacttgtatatctttgtactcaccttacacatcaagccatacaaccttgtataccaaaccgtacagacttgtggtgtttgggtgtgttgtgtttccctaattctctacatggtatcatgagtttgggcctaaacctagctcttcccctccgctgcccatttgaatctgatcccatagtggctgatttggtgacaagggatcacgggaggattgaaggggattgagggggaaattaggcgctgctggctcccctccgctctctatttgttgaccccaaaccctagggcatcatcggcctctccctccctccctactacatccctgatcacagccgtgggtctcctctcctaggcactgattggcgctggtccatctcctggttgccatcacccttgttctgatggcaccaccaaattccagtgactccatcaccacgttcacgacaaaggatgcctcctccagcaaccaggagtagctggcggtggttgtcaacctctatgccatcgtctgcctcaagtcccacattcccatgatgttggagatgcagaactccagctatatcaagtgggcacgagcccacatcaatggcacgggcgctgccaatcccactgatccgcaaagatcaggcggactgttgcgtctgcaagtccaggacacggagctcgtcctcaaccttctatgcgtccttaaccctcccttcgccaaaccatctctgttttttaatcaaagctgaaacctcatgacaaatctgaaggaacttttttccccataacttgtcaatcagattcttgttccattgccagagccggatgctagacatgctatgtttgaagagctcctgccatatacacctggcacaatggagattccctatgatgttcttgtggagaaaactgaagggtattctggctctgatattcgcctggtatgcaaggaagcagcaatgcagcccctaagacgggtaatggcagttcttgaaggcaggaaagaagaggtccctgagggtgagttgcctgaagttggcccagtaactacagaagatattgaacttgctttgaggaatacaagaccgtctgcacatcttcatgcacatagatacgaaaagttcaaccaagattatggcagtcatgtacatggctaaaggggagaagcttgttgtagggtttaatttgtatgctcatgcgtgggccaataggtgactactgaattcatcgacatgctgaggtatccttgtaaacactatgcttatccttgtatgctgtacactatcattcatttgatgagcaataagctgtttggtaactcagtctcacctggataaggagaaactacgattttccctgcatttggctcgatttatcta

SEQ ID NO: 77429 - DNA, 633 bp, Zea Mays
aagaggttgatacaatataagcattatgatataggagtgctgctgcacaaccaaggttgcttattccagtggtacttgtgatgatgtataacagatggaatcagatattagttccggattatggtttcatgcagcttgagttaataccaatgcttgttgggttttttacctataagattgctacattcgctcaagcaatccaggattctatacctccagtcggaaatcgtgaaggttgaaaagtgtcatgttgtatataaacgaaggtggtagccatggtccctggtcagtggtcacccagatagtaaggtatgtatagaagaatctggtctggtgtcatcgccaagtagatgagatgctcgttgaggacgccatttgaaaatctcgagtgcttaactatgttctgcacaaatattttgacgaaaggtgatgttaccacattcattccatattacacgcagatcatcagtgtataaatttacggctccgaacttttaccacaacgattaattgacaaaacaattgtatgattgaattcacatttagcactggatgcaaattatgcagtctgcaagtacactcatttaaagcaagtcggtcagaagtacaccttactaatggtgagatcttcag

SEQ ID NO: 77430 - DNA, 1369 bp, Zea Mays
gagtcgacgatctcccgttcagccgtcccagttccggatcactctctcggctgccactggtccgctccccgcgtctgcggcttccactctccgctcttcgctcctcctcccgccaagatatttccggagaatttgagagccccctcctggtcatgtcgctgctcgccgtcgcctcctccacccgcgccgcggcagtgcggccgctgtgcgcctcggcggcctcggacgaggcggtgccggcgcctgctgtggcggataccgcagggcggaggccggtgaaggtgatcctaccaaagaagaaaccgcagaagtggtcgacggggatggcaccgggtgagtacggcggtgggccggccaccatcaagccgcgcaagtactggtgggggaaggaggaccgcgaccccgtggggaacaccgacgacttcatctggaacaaggacttcctcccccacatggaacgcgtcatcgccaacggcggcgccgatgcagaacccaccatcacccgccttgcgccggtggatgaggagggggagtccgggtttctgagcatcaaccgcgcaatgagccttgacagcgtggaggttgatctgagccaggagcttcaggcgccgaccaggccaatcttgcaaacccaggttgaggctgcctggagaggacgggcaattggtgctgaggctgtgaatggagccagcgctcctagatggaggctagtccctactcgcagggagcaggcaaagtgggacagagcggccaaggcagccactggtggaagtgatgttatactaagggagtcaaagtcaagagtgcagcaaggagaccctaaggtattggcagctcggtccagagaagactacttacagctgaaacaaagattacagtggttcactttaggcattggtggcgttggtgtaatctctgcttatatttcatacactcctgaaattgctgtcagctttggtgcagggttgattggatcattggtgtatctccgcatgcttggaaccagtatagattccctagcaggtggaactggagaaactgtcaagtatgtatagaagaatctggtctggtgtcatcgccaagtagatgagatgctcgttgaggacgccatttgaaaatctcgagtgcttaactatgttctgcacaaatattttgacgaaaggtgatgttaccacattcattccatattacacgcagatcatcagtgtataaatttacggctccgaacttttaccacaacgattaattgacaaaacaattgtatgattgaattcacatttagcactggatgcaaattatgcagtctgcaagtacactcatttaaagcaagtcggtcagaagtacaccttactaatggtgagatcttcag

SEQ ID NO: 77431 - DNA, 1069 bp, Zea Mays
gagtcgacgatctcccgttcagccgtcccagttccggatcactctctcggctgccactggtccgctccccgcgtctgcggcttccactctccgctcttcgctcctcctcccgccaagatatttccggagaatttgagagccccctcctggtcatgtcgctgctcgccgtcgcctcctccacccgcgccgcggcagtgcggccgctgtgcgcctcggcggcctcggacgaggcggtgccggcgcctgctgtggcggataccgcagggcggaggccggtgaaggtgatcctaccaaagaagaaaccgcagaagtggtcgacggggatggcaccgggtgagtacggcggtgggccggccaccatcaagccgcgcaagtactggtgggggaaggaggaccgcgaccccgtggggaacaccgacgacttcatctggaacaaggacttcctcccccacatggaacgcgtcatcgccaacggcggcgccgatgcagaacccaccatcacccgccttgcgccggtggatgaggagggggagtccgggtttctgagcatcaaccgcgcaatgagccttgacagcgtggaggttgatctgagccaggagcttcaggcgccgaccaggccaatcttgcaaacccaggttgaggctgcctggagaggacgggcaattggtgctgaggctgtgaatggagccagcgctcctagatggaggctagtccctactcgcagggagcaggcaaagtgggacagagcggccaaggcagccactggtggaagtgatgttatactaagggagtcaaagtcaagagtgcagcaaggagaccctaaggtattggcagctcggtccagagaagactacttacagctgaaacaaagattacagtggttcactttaggcattggtggcgttggtgtaatctctgcttatatttcatacactcctgaaattgctgtcagctttggtgcagggttgattggatcattggtgtatctccgcatgcttggaaccagtatagattccctagcaggtggaactggagaaactgtcaagtagtagacagacaagcacttgtg

SEQ ID NO: 77432 - DNA, 2024 bp, Zea Mays
aggcaccagccaccaaaaccacctgctgctcgacctttttcgagatcctggtgggcccggagcaccctccgccttccacggccccctccacttcctctgtccttcgccctcctgtcctttcaaaccccacggcggtgcagagcgcatcgccgagcccccgcccacccgacagcctcacctcgaattcttctccagcagttcgttgccctcctccttccccttccctcctcgacaggtgtccggcggcttggatctatgcggacccggcatctgtattttacctcattggggatggaggtgcaggtgctggatttgtcttccgattccgagggcgaggtgtcggcgcactcgcccgatcacaagcgcccctctcagcagccgggtgtagaccccaatcgccgggttggcgacaatggttccagcgccgtggacagcctcttcgaggaagcgggcgcggcgaggccaccgcgtcaccccagcgacgcgctgaacaaagggaaggagaaggtcgtcgatgtggagagcgtggagtctccaaagcacggtggggaatcgctcggtgctgctggccgcgtcctgggagctgggagtgatccgtggagcgcactggtgagcaagtgcaaggctggggacagtgggaataatggaactgagtgttgggatagttggggtgactggggtgatcagcttactaactcggcccccgtggcgcgtctagggtcagagaggacggggtttcatgagacatatgaactgcgagggacgcctcagcttcacagtgactcttcagcattcagtgaccagtggaagggtattctgggtgcaagccctgctgatcctgtcaactcactgtggtgctccagggatactagcatgaaagatagtgaggatgaaaccttgtctcaaaggtcaaggggctgaacttcccacttcctgatgagcatcagttgagaaccaggcagattgagaatgatgagatgtttgcccgtagacttcaggagcagctcaatcagcaacagccaggatctcagcattctgaagcggttgataaaacaatagcctggacattacatgagcaagatgctgagcatgccagatttgctgcaagagaagtccagtctagttctagccagagggacagatcaatggcacacctatattcttatggacgtcactcacctgttcaaagttttgcttcttgggcatcaaatcatactccaatttcaatgtcaagcagaggcggcttgcaaagaaactccaactgccctcaagcggagcaacgcaatatgcttatctctcagttaaccagaggatgcttcagagaagacatggatctacaaacgagattgggctgtactggactcactttctgaagcatttaggaactgcgaggacacgcactctccagattcggatgatgatgattacgaggaccaaatagcgctcggcgtcgacagccagcaaagaggcgcctctgatgatcagataaacagcctgccactatcagtaatcgagggtgaaggtcgttccgatgaaccctgcaatatatgcttggactgccctgctgctggtgattcactccggcgtttgccatgcatgcacaagtttcacaaagagtgcattgacaggtggctcgggatgaagatatggtgtccggtttgcaagtcaaatgtgttctcccagtaggccgtgagcatctcttatactttttggagcagcatcgaagctagattatagttggctgatacgaggcattgttacggctgcagtgtgtacattgcgttcttgacttgtgctctcttctgctccgtggggagcatttgaatgctctttttccgcggagagtttttttggctgtgagagaaggcacggaaaacctcattctgctattctcatttcttgtatacgtgtatgtaggctgacatgcatacaactacctagcgtacgtcagtcttgggcggtgccatgggggtatgaagcgctgagatgggacttgcaccctgaccttgggttgccgaaggccg

SEQ ID NO: 77433 - DNA, 2162 bp, Zea Mays
ctcaaatcaaccaatgaaaccaagtgatggagtaccttaaggtcgaggagcgagccacaggacctgcggcgcacgagcttgaaggcacggatcggagggtgctgtgctccattcccagaaggcaccagccaccaaaaccacctgctgctcgacctttttcgagatcctggtgggcccggagcaccctccgccttccacggccccctccacttcctctgtccttcgccctcctgtcctttcaaaccccacggcggtgcagagcgcatcgccgagcccccgcccacccgacagcctcacctcgaattcttctccagcagttcgttgccctcctccttccccttccctcctcgacaggtgtccggcggcttggatctatgcggacccggcatctgtattttacctcattggggatggaggtgcaggtgctggatttgtcttccgattccgagggcgaggtgtcggcgcactcgcccgatcacaagcgcccctctcagcagccgggtgtagaccccaatcgccgggttggcgacaatggttccagcgccgtggacagcctcttcgaggaagcgggcgcggcgaggccaccgcgtcaccccagcgacgcgctgaacaaagggaaggagaaggtcgtcgatgtggagagcgtggagtctccaaagcacggtggggaatcgctcggtgctgctggccgcgtcctgggagctgggagtgatccgtggagcgcactggtgagcaagtgcaaggctggggacagtgggaataatggaactgagtgttgggatagttggggtgactggggtgatcagcttactaactcggcccccgtggcgcgtctagggtcagagaggacggggtttcatgagacatatgaactgcgagggacgcctcagcttcacagtgactcttcagcattcagtgaccagtggaagggtattctgggtgcaagccctgctgatcctgtcaactcactgtggtgctccagggatactagcatgaaagatagtgaggatgaaaccttgtctcaaagctcgtcatggctgtcgaaggtcaaggggctgaacttcccacttcctgatgagcatcagttgagaaccaggcagattgagaatgatgagatgtttgcccgtagacttcaggagcagctcaatcagcaacagccaggatctcagcattctgaagcggttgataaaacaatagcctggacattacatgagcaagatgctgagcatgccagatttgctgcaagagaagtccagtctagttctagccagagggacagatcaatggcacacctatattcttatggacgtcactcacctgttcaaagttttgcttcttgggcatcaaatcatactccaatttcaatgtcaagcagaggcggcttgcaaagaaactccaactgccctcaagcggagcaacgcaatatgcttatctctcagttaaccagaggatgcttcagagaagacatggatctacaaacgagattgggctgtactggactcactttctgaagcatttaggaactgcgaggacacgcactctccagattcggatgatgatgattacgaggaccaaatagcgctcggcgtcgacagccagcaaagaggcgcctctgatgatcagataaacagcctgccactatcagtaatcgagggtgaaggtcgttccgatgaaccctgcaatatatgcttggactgccctgctgctggtgattcactccggcgtttgccatgcatgcacaagtttcacaaagagtgcattgacaggtggctcgggatgaagatatggtgtccggtttgcaagtcaaatgtgttctcccagtaggccgtgagcatctcttatactttttggagcagcatcgaagctagattatagttggctgatacgaggcattgttacggctgcagtgtgtacattgcgttcttgacttgtgctctcttctgctccgtggggagcatttgaatgctctttttccgcggagagtttttttggctgtgagagaaggcacggaaaacctcattctgctattctcatttcttgtatacgtgtatgtaggctgacatgcatacaactacctagcgtacgtcagtcttgggcggtgccatgggggtatgaagcgctgagatgggacttgcaccctgaccttgggttgccgaaggccg

SEQ ID NO: 77434 - DNA, 2554 bp, Zea Mays
ctcaattccttctcatggcattttcatcggctcgcaaaaatcgccaagtctactcaaatcaaccaatgaaaccaaggtgtagtgaatttgcatattcaatcccaagatgtcaactgaattcccgcagccgattaatccgtcatcccacacgatatgaagtgatggagtaccttaaggtcgaggagcgagccacaggacctgcggcgcacgagcttgaaggcacggatcggagggtgctgtgctccattcccagaaggcaccagccaccaaaaccacctgctgctcgacctttttcgagatcctggtgggcccggagcaccctccgccttccacggccccctccacttcctctgtccttcgccctcctgtcctttcaaaccccacggcggtgcagagcgcatcgccgagcccccgcccacccgacagcctcacctcgaattcttctccagcagttcgttgccctcctccttccccttccctcctcgacaggtgtccggcggcttggatctatgcggacccggcatctgtattttacctcattggggatggaggtgcaggtgctggatttgtcttccgattccgagggcgaggtgtcggcgcactcgcccgatcacaagcgcccctctcagcagccgggtgtagaccccaatcgccgggttggcgacaatggttccagcgccgtggacagcctcttcgaggaagcgggcgcggcgaggccaccgcgtcaccccagcgacgcgctgaacaaagggaaggagaaggtcgtcgatgtggagagcgtggagtctccaaagcacggtggggaatcgctcggtgctgctggccgcgtcctgggagctgggagtgatccgtggagcgcactggtgagcaagtgcaaggctggggacagtgggaataatggaactgagtgttgggatagttggggtgactggggtgatcagcttactaactcggcccccgtggcgcgtctagggtcagagaggacggggtttcatgagacatatgaactgcgagggacgcctcagcttcacagtgactcttcagcattcagtgaccagtggaagggtattctgggtgcaagccctgctgatcctgtcaactcactgtggtgctccagggatactagcatgaaagatagtgaggatgaaaccttgtctcaaaggtctgtgtctgttcgtgaaatttctagctgtgattattttcttaccgaagatagtagctcgtcatggctgtcgaaggtcaaggggctgaacttcccacttcctgatgagcatcagttgagaaccaggcagattgagaatgatgagatgtttgcccgtagacttcaggagcagctcaatcagcaacagccaggatctcagcattctgaagcggttgataaaacaatagcctggacattacatgagcaagatgctgagcatgccagatttgctgcaagagaagtccagtctagttctgtaagttgtcacgtggcgaggatagtttatcgtttgtgaattcaatgtagatatgtttatgcatagtcagatcttttatttatgaacggttatgttgatacctataggttttttttttgaaagttatggaacgcattatcaagctggccaagagctatgtgttgaaacggaagaggatggcataacatcatatattcatatctgcctagccagagggacagatcaatggcacacctatattcttatggacgtcactcacctgttcaaagttttgcttcttgggcatcaaatcatactccaatttcaatgtcaagcagaggcggcttgcaaagaaactccaactgccctcaagcggagcaacgcaatatgcttatctctcagttaaccagaggatgcttcagagaagacatggatctacaaacgagattgggctgtactggactcactttctgaagcatttaggaactgcgaggacacgcactctccagattcggatgatgatgattacgaggaccaaatagcgctcggcgtcgacagccagcaaagaggcgcctctgatgatcagataaacagcctgccactatcagtaatcgaggtcgttccgatgaaccctgcaatatatgcttggactgccctgctgctggtgattcactccggcgtttgccatgcatgcacaagtttcacaaagagtgcattgacaggtggctcgggatgaagatatggtgtccggtttgcaagtcaaatgtgttctcccagtaggccgtgagcatctcttatactttttggagcagcatcgaagctagattatagttggctgatacgaggcattgttacggctgcagtgtgtacattgcgttcttgacttgtgctctcttctgctccgtggggagcatttgaatgctctttttccgcggagagtttttttggctgtgagagaaggcacggaaaacctcattctgctattctcatttcttgtatacgtgtatgtaggctgacatgcatacaactacctagcgtacgtcagtcttgggcggtgccatgggggtatgaagcgctgagatgggacttgcaccctgaccttgggttgccgaaggccg

SEQ ID NO: 77435 - DNA, 2232 bp, Zea Mays
ctcaattccttctcatggcattttcatcggctcgcaaaaatcgccaagtctactcaaatcaaccaatgaaaccaaggtgtagtgaatttgcatattcaatcccaagatgtcaactgaattcccgcagccgattaatccgtcatcccacacgatatgaagtgatggagtaccttaaggtcgaggagcgagccacaggacctgcggcgcacgagcttgaaggcacggatcggagggtgctgtgctccattcccagaaggcaccagccaccaaaaccacctgctgctcgacctttttcgagatcctggtgggcccggagcaccctccgccttccacggccccctccacttcctctgtccttcgccctcctgtcctttcaaaccccacggcggtgcagagcgcatcgccgagcccccgcccacccgacagcctcacctcgaattcttctccagcagttcgttgccctcctccttccccttccctcctcgacaggtgtccggcggcttggatctatgcggacccggcatctgtattttacctcattggggatggaggtgcaggtgctggatttgtcttccgattccgagggcgaggtgtcggcgcactcgcccgatcacaagcgcccctctcagcagccgggtgtagaccccaatcgccgggttggcgacaatggttccagcgccgtggacagcctcttcgaggaagcgggcgcggcgaggccaccgcgtcaccccagcgacgcgctgaacaaagggaaggagaaggtcgtcgatgtggagagcgtggagtctccaaagcacggtggggaatcgctcggtgctgctggccgcgtcctgggagctgggagtgatccgtggagcgcactggtgagcaagtgcaaggctggggacagtgggaataatggaactgagtgttgggatagttggggtgactggggtgatcagcttactaactcggcccccgtggcgcgtctagggtcagagaggacggggtttcatgagacatatgaactgcgagggacgcctcagcttcacagtgactcttcagcattcagtgaccagtggaagggtattctgggtgcaagccctgctgatcctgtcaactcactgtggtgctccagggatactagcatgaaagatagtgaggatgaaaccttgtctcaaagttgagaaccaggcagattgagaatgatgagatgtttgcccgtagacttcaggagcagctcaatcagcaacagccaggatctcagcattctgaagcggttgataaaacaatagcctggacattacatgagcaagatgctgagcatgccagatttgctgcaagagaagtccagtctagttctagccagagggacagatcaatggcacacctatattcttatggacgtcactcacctgttcaaagttttgcttcttgggcatcaaatcatactccaatttcaatgtcaagcagaggcggcttgcaaagaaactccaactgccctcaagcggagcaacgcaatatgcttatctctcagttaaccagaggatgcttcagagaagacatggatctacaaacgagattgggctgtactggactcactttctgaagcatttaggaactgcgaggacacgcactctccagattcggatgatgatgattacgaggaccaaatagcgctcggcgtcgacagccagcaaagaggcgcctctgatgatcagataaacagcctgccactatcagtaatcgaggtcgttccgatgaaccctgcaatatatgcttggactgccctgctgctggtgattcactccggcgtttgccatgcatgcacaagtttcacaaagagtgcattgacaggtggctcgggatgaagatatggtgtccggtttgcaagtcaaatgtgttctcccagtaggccgtgagcatctcttatactttttggagcagcatcgaagctagattatagttggctgatacgaggcattgttacggctgcagtgtgtacattgcgttcttgacttgtgctctcttctgctccgtggggagcatttgaatgctctttttccgcggagagtttttttggctgtgagagaaggcacggaaaacctcattctgctattctcatttcttgtatacgtgtatgtaggctgacatgcatacaactacctagcgtacgtcagtcttgggcggtgccatgggggtatgaagcgctgagatgggacttgcaccctgaccttgggttgccgaaggccg

SEQ ID NO: 77436 - DNA, 2728 bp, Zea Mays
aaaaaatgtgcaaacacttacaatcatgtgtctatgtcttatgaagtttacaacatctccgttttgtattccactatagttttaatggactgcctgacaaatacagaataatcagtcaatatattcaactatttctaggaggccagtaaaacgattgtaagctctaaatattttagatttttttcagtttattatcaccggtagttcaatctaataagaatccaaaagctgtgacatcggcagtagcagcatgtaaacatgaatctggccttctctcaattccttctcatggcattttcatcggctcgcaaaaatcgccaagtctactcaaatcaaccaatgaaaccaaggtgtagtgaatttgcatattcaatcccaagatgtcaactgaattcccgcagccgattaatccgtcatcccacacgatatgaagtgatggagtaccttaaggtcgaggagcgagccacaggacctgcggcgcacgagcttgaaggcacggatcggagggtgctgtgctccattcccagaaggcaccagccaccaaaaccacctgctgctcgacctttttcgagatcctggtgggcccggagcaccctccgccttccacggccccctccacttcctctgtccttcgccctcctgtcctttcaaaccccacggcggtgcagagcgcatcgccgagcccccgcccacccgacagcctcacctcgaattcttctccagcagttcgttgccctcctccttccccttccctcctcgacaggtgtccggcggcttggatctatgcggacccggcatctgtattttacctcattggggatggaggtgcaggtgctggatttgtcttccgattccgagggcgaggtgtcggcgcactcgcccgatcacaagcgcccctctcagcagccgggtgtagaccccaatcgccgggttggcgacaatggttccagcgccgtggacagcctcttcgaggaagcgggcgcggcgaggccaccgcgtcaccccagcgacgcgctgaacaaagggaaggagaaggtcgtcgatgtggagagcgtggagtctccaaagcacggtggggaatcgctcggtgctgctggccgcgtcctgggagctgggagtgatccgtggagcgcactggtgagcaagtgcaaggctggggacagtgggaataatggaactgagtgttgggatagttggggtgactggggtgatcagcttactaactcggcccccgtggcgcgtctagggtcagagaggacggggtttcatgagacatatgaactgcgagggacgcctcagcttcacagtgactcttcagcattcagtgaccagtggaagggtattctgggtgcaagccctgctgatcctgtcaactcactgtggtgctccagggatactagcatgaaagatagtgaggatgaaaccttgtctcaaaggtctgtgtctgttcgtgaaatttctagctgtgattattttcttaccgaagatagtagctcgtcatggctgtcgaaggtcaaggggctgaacttcccacttcctgatgagcatcagttgagaaccaggcagattgagaatgatgagatgtttgcccgtagacttcaggagcagctcaatcagcaacagccaggatctcagcattctgaagcggttgataaaacaatagcctggacattacatgagcaagatgctgagcatgccagatttgctgcaagagaagtccagtctagttctgttttttttttgaaagttatggaacgcattatcaagctggccaagagctatgtgttgaaacggaagaggatggcataacatcatatattcatatctgcctagccagagggacagatcaatggcacacctatattcttatggacgtcactcacctgttcaaagttttgcttcttgggcatcaaatcatactccaatttcaatgtcaagcagaggcggcttgcaaagaaactccaactgccctcaagcggagcaacgcaatatgcttatctctcagttaaccagaggatgcttcagagaagacatggatctacaaacgagattgggctgtactggactcactttctgaagcatttaggaactgcgaggacacgcactctccagattcggatgatgatgattacgaggaccaaatagcgctcggcgtcgacagccagcaaagaggcgcctctgatgatcagataaacagcctgccactatcagtaatcgagggtgaaggtcgttccgatgaaccctgcaatatatgcttggactgccctgctgctggtgattcactccggcgtttgccatgcatgcacaagtttcacaaagagtgcattgacaggtggctcgggatgaagatatggtgtccggtttgcaagtcaaatgtgttctcccagtaggccgtgagcatctcttatactttttggagcagcatcgaagctagattatagttggctgatacgaggcattgttacggctgcagtgtgtacattgcgttcttgacttgtgctctcttctgctccgtggggagcatttgaatgctctttttccgcggagagtttttttggctgtgagagaaggcacggaaaacctcattctgctattctcatttcttgtatacgtgtatgtaggctgacatgcatacaactacctagcgtacgtcagtcttgggcggtgccatgggggtatgaagcgctgagatgggacttgcaccctgaccttgggttgccgaaggccg

SEQ ID NO: 77437 - DNA, 3829 bp, Zea Mays
gtaatcttcccacctgcctcggcgcctcctccctctctcccaacctcgcccgttctcgcctcgctgttctcctctgtcacctctccctgagaagcgtggctcctgcaaccggcctccccacctgctcctcctctacgcgccgagcaccacacgacgcgacacaaccgagcacggccgctccgccactccactgcttccgcggtggcgccgcttcactcccgtgctgcagcgagcgttacggagatccgtggggacatgaaccagggtttctcctatctgttggtgaacataaagctggatccagaccacagaatgcatgatattatgcaccattgcacacgtccccagagagttcagagttcccagtcatagatgccttttactgcgtgtcttgacaaaatgaacagtacccagtgcccttgaaatgtgctaggaatataaaggtgacagtgaaactggacagagttgtagaagatgctatctggtcgcaaatctactattcatgcagcagactttacactggaattttgttgtgagcaaaggaaagaggcccatggaaagtttcatgtggttacatttcaagttggctgcctttttaggatctaattgacatcagtatgcacatcagctgataaagaaaggatgtgatccacctctaatacttgctagctggtcaatgtaaataagcctaagtcagtgataaaaagttcccctctctcctgggattgcttatgtagtcacatgttttcacgcttttcagttacatgttactatcaagctacttgtgggtttttagagaaaaagatatgaactaaatttatcagtggtcctattgaatatggagctactgttatatgtcattgtctcatgcaaatgatggtggctgtaagttgtgattgaggaactccattgtctgagaaatggatgaaacaccaactagttctgggcaatctgaagctagttcatgtgaacctaattggtggcctccagacttcttggagaagatacagtctgcttccataccaaggaaacatgatgttttgggtaatcaaagttcctcatcctggaaggcttctcaattactgtggtcaacaggatcttattcagggttaatccctaatggtttctattcaatcatcccggataaaaagttgaaggagactttcccaactattccatcactagatgacttgcaaactcttgaagcagatgggcttaaggctgacataattattgtagacactgagagggataagaaggttttcatgttgaagcagcttagtgctgcacttgtgaaagggttaagctctagcccagcattagtgataaagaaaattgcaggattggtctttgactgcttcaagcgccaaattcccgatgccagtccaactagaggctcgattgaagatacccatttctttggaaataaaggaccacaacttctggggcagataagacatggatcgtgccgaccccgagctattctatttaaagttcttgcagatgccgttggccttgagagtaaacttgtagttggtctaccagatgacggtgctgttggatttgtggactcttacaaacatatgtctgtggtagtttcactaaactctatggtgcttcttgtggatcttatgcgatttccaggccagctgattccgttttcagctaaggctatatttatatcgcacatatctgctgcgggtgaaagcgactcagctgaaaatgactcttgtgattctcctcttgagcccaacagcccactttatggattgtctgataaagttgaagttgaaggaattgaatcttcatcatatctatctggacgatcactgcgtaatatgatgttgagatcaaggacattctctgaggggaaattaagcacgtcatgtagtgaaccaaatatagcaaatgccttttggaggcgcagccaaaggagagttgccgaggaaccccgtggtgctagttccagcctttattgctgagatgaggacaaaaggatatttcaaattatggttgaacatacaattctaggtgctgttcctaacgatagccctgagcatccattaatgagagcaaggggaagatctatacttggtagtgagaagcaatcatttcaagaatacacagaatctggagctgcttcaagatcagatggtcttgggggcccttcaacctctaatgctcgaagaataaggcgaagaagcattagcattacacctgagattggagatgacatcgtgagggcagttcgggctatgaacgaaacactaaagcaaaatcgcctccaaagggatcatgtcgaaggttcatgctcatatgttatggaagatcaaagcaacaccaatgactgcccaaataaagatgatgcatcttggagaattggtgctactgacagtgactcaagaaaccgaactggttctactcagaaggccatgtcactaccttcttcgcctcatgaatatagaggtcaagttacccaaaaaagtgatgattttataagtaaagagaagatggcattggcatggaacaaagttttccagagctccccatttcttaataaggctttgctgccttttaaggaatggaacatagatttctccgagataacaattggcacgcgggttggaataggattctttggagaagttttccgtggtatatggaatggaactgatgttgccatcaaagtgtttctagaacaggatttgacaactgaaaacatggaagatttttgcaacgagatatacatcctcagccggttacgacacccgaatgttatattgcttcttggtgcatgcattacacctccacacctgtcaatggttactgaatatatggaaatggggtcactgtactatctcattcatatgagtggtcagaaaaagaaacttagttggcgtaggaagttgaaaattattcgtgatatatgcaggggattgatgtgcatacaccgcatcaagatagttcacagggatctcaaaagtgcaaactgcctggtcaataagcattggactgtcaagatatgtgactttggtctatctcgactgatgattgatagtcctatgaccgataattcctctgctggcaccccggaatggatggcccctgaacttatacgtaatgaacctttcacagagaaatgtgatatattcagccttggtgttatcatgtgggagctgtgcacattgagtcgcccatgggaaggcatctccccagttcaagtggtgtattcagttgctaatgaagggtcacggcttgagattccggaaggacccctcggcaggttaatcgcagattgctggtctgagcctgagaatcgaccgagctgccaggagatcctaacccgtctgctagactgcgaatatactgttagctaaaatggaagctgcatgctcgttcacccaattcctgcacaggtgagaatatttcttgtataaaacctataaaaaaagcctgccgattctgcggacttgaggtcacatattgaagccctgttcttttttttttacaacggcgaccttttctctcaaaaatgtaaaaaaatgcttccccggttatagaagaacatattctggcccagaaatgtgccttatcgcagggcaagctaattctagataattagcatgccctcgaattaaccaagtgtttgttccgaagaatgttgccagtttgccattaccctgtggaatatggtaagcaagtacatggtgtgaattatgtgtgttgctcctaaacaggcggcaaataggaactagggtgctgtttggttggttccagggacctataacgtaaatggaaatagaaaacaccgctaccagttacattgcat

SEQ ID NO: 77438 - DNA, 3575 bp, Zea Mays
gtaatcttcccacctgcctcggcgcctcctccctctctcccaacctcgcccgttctcgcctcgctgttctcctctgtcacctctccctgagaagcgtggctcctgcaaccggcctccccacctgctcctcctctacgcgccgagcaccacacgacgcgacacaaccgagcacggccgctccgccactccactgcttccgcggtggcgccgcttcactcccgtgctgcagcgagcgttacggagatccgtggggacatgaaccagggtttctcctatctgttgatatgaactaaatttatcagtggtcctattgaatatggagctactgttatatgtcattgtctcatgcaaatgatggtggctgtaagttgtgattgaggaactccattgtctgagaaatggatgaaacaccaactagttctgggcaatctgaagctagttcatgtgaacctaattggtggcctccagacttcttggagaagatacagtctgcttccataccaaggaaacatgatgttttgggtaatcaaagttcctcatcctggaaggcttctcaattactgtggtcaacaggatcttattcagggttaatccctaatggtttctattcaatcatcccggataaaaagttgaaggagactttcccaactattccatcactagatgacttgcaaactcttgaagcagatgggcttaaggctgacataattattgtagacactgagagggataagaaggttttcatgttgaagcagcttagtgctgcacttgtgaaagggttaagctctagcccagcattagtgataaagaaaattgcaggattggtctttgactgcttcaagcgccaaattcccgatgccagtccaactagaggctcgattgaagatacccatttctttggaaataaaggaccacaacttctggggcagataagacatggatcgtgccgaccccgagctattctatttaaagttcttgcagatgccgttggccttgagagtaaacttgtagttggtctaccagatgacggtgctgttggatttgtggactcttacaaacatatgtctgtggtagtttcactaaactctatggtgcttcttgtggatcttatgcgatttccaggccagctgattccgttttcagctaaggctatatttatatcgcacatatctgctgcgggtgaaagcgactcagctgaaaatgactcttgtgattctcctcttgagcccaacagcccactttatggattgtctgataaagttgaagttgaaggaattgaatcttcatcatatctatctggacgatcactgcgtaatatgatgttgagatcaaggacattctctgaggggaaattaagcacgtcatgtagtgaaccaaatatagcaaatgccttttggaggcgcagccaaaggagagttgccgaggaaccccgtggtgctagttccagccctgagcatccattaatgagagcaaggggaagatctatacttggtagtgagaagcaatcatttcaagaatacacagaatctggagctgcttcaagatcagatggtcttgggggcccttcaacctctaatgctcgaagaataaggcgaagaagcattagcattacacctgagattggagatgacatcgtgagggcagttcgggctatgaacgaaacactaaagcaaaatcgcctccaaagggatcatgtcgaaggttcatgctcatatgttatggaagatcaaagcaacaccaatgactgcccaaataaagtatacctctacaagttgcattgttttcatcttctccatattggtcctctgtatcttgtgcgcacacggaaaatctgtagcggaaaccacatcataggtggaaacatggaaaccaattcagaaaacgtattccgatcactcgaagatgtactatttcacttttgccaaaataattacatctatggatgtattgtacatgtgccaaatttgtaaatttcatttagtgatcgaaatactatctttccatttctcacctaagatgtttccagtacatattttcctgtgcatgtaaatgtaattgttagttgaatctcagcagcttgggctcacaatttataatcatacttaggatgatgcatcttggagaattggtgctactgacagtgactcaagaaaccgaactggttctactcagaaggccatgtcactaccttcttcgcctcatgaatatagaggtcaagttacccaaaaaagtgatgattttataagtaaagagaagatggcattggcatggaacaaagttttccagagctccccatttcttaataaggctttgctgccttttaaggaatggaacatagatttctccgagataacaattggcacgcgggttggaataggattctttggagaagttttccgtggtatatggaatggaactgatgttgccatcaaagtgtttctagaacaggatttgacaactgaaaacatggaagatttttgcaacgagatatacatcctcagccggttacgacacccgaatgttatattgcttcttggtgcatgcattacacctccacacctgtcaatggttactgaatatatggaaatggggtcactgtactatctcattcatatgagtggtcagaaaaagaaacttagttggcgtaggaagttgaaaattattcgtgatatatgcaggggattgatgtgcatacaccgcatcaagatagttcacagggatctcaaaagtgcaaactgcctggtcaataagcattggactgtcaagatatgtgactttggtctatctcgactgatgattgatagtcctatgaccgataattcctctgctggcaccccggaatggatggcccctgaacttatacgtaatgaacctttcacagagaaatgtgatatattcagccttggtgttatcatgtgggagctgtgcacattgagtcgcccatgggaaggcatctccccagttcaagtggtgtattcagttgctaatgaagggtcacggcttgagattccggaaggacccctcggcaggttaatcgcagattgctggtctgagcctgagaatcgaccgagctgccaggagatcctaacccgtctgctagactgcgaatatactgttagctaaaatggaagctgcatgctcgttcacccaattcctgcacaggtgagaatatttcttgtataaaacctataaaaaaagcctgccgattctgcggacttgaggtcacatattgaagccctgttcttttttttttacaacggcgaccttttctctcaaaaatgtaaaaaaatgcttccccggttatagaagaacatattctggcccagaaatgtgccttatcgcagggcaagctaattctagataattagcatgccctcgaattaaccaagtgtttgttccgaagaatgttgccagtttgccattaccctgtggaatatggtaagcaagtacatggtgtgaattatgtgtgttgctcctaaacaggcggcaaataggaactagggtgctgtttggttggttccagggacctataacgtaaatggaaatagaaaacaccgctaccagttacattgcat

SEQ ID NO: 77439 - DNA, 3018 bp, Zea Mays
gtaatcttcccacctgcctcggcgcctcctccctctctcccaacctcgcccgttctcgcctcgctgttctcctctgtcacctctccctgagaagcgtggctcctgcaaccggcctccccacctgctcctcctctacgcgccgagcaccacacgacgcgacacaaccgagcacggccgctccgccactccactgcttccgcggtggcgccgcttcactcccgtgctgcagcgagcgttacggagatccgtggggacatgaaccagggtttctcctatctgttgatatgaactaaatttatcagtggtcctattgaatatggagctactgttatatgtcattgtctcatgcaaatgatggtggctgtaagttgtgattgaggaactccattgtctgagaaatggatgaaacaccaactagttctgggcaatctgaagctagttcatgtgaacctaattggtggcctccagacttcttggagaagatacagtctgcttccataccaaggaaacatgatgttttgggtaatcaaagttcctcatcctggaaggcttctcaattactgtggtcaacaggatcttattcagggttaatccctaatggtttctattcaatcatcccggataaaaagttgaaggagactttcccaactattccatcactagatgacttgcaaactcttgaagcagatgggcttaaggctgacataattattgtagacactgagagggataagaaggttttcatgttgaagcagcttagtgctgcacttgtgaaagggttaagctctagcccagcattagtgataaagaaaattgcaggattggtctttgactgcttcaagcgccaaattcccgatgccagtccaactagaggctcgattgaagatacccatttctttggaaataaaggaccacaacttctggggcagataagacatggatcgtgccgaccccgagctattctatttaaagttcttgcagatgccgttggccttgagagtaaacttgtagttggtctaccagatgacggtgctgttggatttgtggactcttacaaacatatgtctgtggtagtttcactaaactctatggtgcttcttgtggatcttatgcgatttccaggccagctgattccgttttcagctaaggctatatttatatcgcacatatctgctgcgggtgaaagcgactcagctgaaaatgactcttgtgattctcctcttgagcccaacagcccactttatggattgtctgataaagttgaagttgaaggaattgaatcttcatcatatctatctggacgatcactgcgtaatatgatgttgagatcaaggacattctctgaggggaaattaagcacgtcatgtagtgaaccaaatatagcaaatgccttttggaggcgcagccaaaggagagttgccgaggaaccccgtggtgctagttccagccctgagcatccattaatgagagcaaggggaagatctatacttggtagtgagaagcaatcatttcaagaatacacagaatctggagctgcttcaagatggtcttgggggcccttcaacctctaatgctcgaagaataaggcgaagaagcattagcattacacctgagattggagatgacatcgtgagggcagttcgggctatgaacgaaacactaaagcaaaatcgcctccaaagggatcatgtcgaaggttcatgctcatatgttatggaagatcaaagcaacaccaatgactgcccaaataaagatgatgcatcttggagaattggtgctactgacagtgactcaagaaaccgaactggttctactcagaaggccatgtcactaccttcttcgcctcatgaatatagaggtcaagttacccaaaaaagtgatgattttataagtaaagagaagatggcattggcatggaacaaagttttccagagctccccatttcttaataaggctttgctgccttttaaggaatggaacatagatttctccgagataacaattggcacgcgggttggaataggattctttggagaagttttccgtggtatatggaatggaactgatgttgccatcaaagtgtttctagaacaggatttgacaactgaaaacatggaagatttttgcaacgagatatacatcctcagccggttacgacacccgaatgttatattgcttcttggtgcatgcattacacctccacacctgtcaatggttactgaatatatggaaatggggtcactgtactatctcattcatatgagtggtcagaaaaagaaacttagttggcgtaggaagttgaaaattattcgtgatatatgcagagaaatgtgatatattcagccttggtgttatcatgtgggagctgtgcacattgagtcgcccatgggaaggcatctccccagttcaagtggtgtattcagttgctaatgaagggtcacggcttgagattccggaaggacccctcggcaggttaatcgcagattgctggtctgagcctgagaatcgaccgagctgccaggagatcctaacccgtctgctagactgcgaatatactgttagctaaaatggaagctgcatgctcgttcacccaattcctgcacaggtgagaatatttcttgtataaaacctataaaaaaagcctgccgattctgcggacttgaggtcacatattgaagccctgttcttttttttttacaacggcgaccttttctctcaaaaatgtaaaaaaatgcttccccggttatagaagaacatattctggcccagaaatgtgccttatcgcagggcaagctaattctagataattagcatgccctcgaattaaccaagtgtttgttccgaagaatgttgccagtttgccattaccctgtggaatatggtaagcaagtacatggtgtgaattatgtgtgttgctcctaaacaggcggcaaataggaactagggtgctgtttggttggttccagggacctataacgtaaatggaaatagaaaacaccgctaccagttacattgcat

SEQ ID NO: 77440 - DNA, 3243 bp, Zea Mays
cagcgaagtaccgacgcctcccacagctgggagtaatcttcccacctgcctcggcgcctcctccctctctcccaacctcgcccgttctcgcctcgctgttctcctctgtcacctctccctgagaagcgtggctcctgcaaccggcctccccacctgctcctcctctacgcgccgagcaccacacgacgcgacacaaccgagcacggccgctccgccactccactgcttccgcggtggcgccgcttcactcccgtgctgcagcgagcgttacggagatccgtggggacatgaaccagggtttctcctatctgttgatatgaactaaatttatcagtggtcctattgaatatggagctactgttatatgtcattgtctcatgcaaatgatggtggctgtaagttgtgattgaggaactccattgtctgagaaatggatgaaacaccaactagttctgggcaatctgaagctagttcatgtgaacctaattggtggcctccagacttcttggagaagatacagtctgcttccataccaaggaaacatgatgttttgggtaatcaaagttcctcatcctggaaggcttctcaattactgtggtcaacaggatcttattcagggttaatccctaatggtttctattcaatcatcccggataaaaagttgaaggagactttcccaactattccatcactagatgacttgcaaactcttgaagcagatgggcttaaggctgacataattattgtagacactgagagggataagaaggttttcatgttgaagcagcttagtgctgcacttgtgaaagggttaagctctagcccagcattagtgataaagaaaattgcaggattggtctttgactgcttcaagcgccaaattcccgatgccagtccaactagaggctcgattgaagatacccatttctttggaaataaaggaccacaacttctggggcagataagacatggatcgtgccgaccccgagctattctatttaaagttcttgcagatgccgttggccttgagagtaaacttgtagttatgacggtgctgttggatttgtggactcttacaaacatatgtctgtggtagtttcactaaactctatggtgcttcttgtggatcttatgcgatttccaggccagctgattccgttttcagctaaggctatatttatatcgcacatatctgctgcgggtgaaagcgactcagctgaaaatgactcttgtgattctcctcttgagcccaacagcccactttatggattgtctgataaagttgaagttgaaggaattgaatcttcatcatatctatctggacgatcactgcgtaatatgatgttgagatcaaggacattctctgaggggaaattaagcacgtcatgtagtgaaccaaatatagcaaatgccttttggaggcgcagccaaaggagagttgccgaggaaccccgtggtgctagttccagccctgagcatccattaatgagagcaaggggaagatctatacttggtagtgagaagcaatcatttcaagaatacacagaatctggagctgcttcaagatcagatggtcttgggggcccttcaacctctaatgctcgaagaataaggcgaagaagcattagcattacacctgagattggagatgacatcgtgagttcgggctatgaacgaaacactaaagcaaaatcgcctccaaagggatcatgtcgaaggttcatgctcatatgttatggaagatcaaagcaacaccaatgactgcccaaataaagatgatgcatcttggagaattggtgctactgacagtgactcaagaaaccgaactggttctactcagaaggccatgtcactaccttcttcgcctcatgaatatagaggtcaagttacccaaaaaagtgatgattttataagtaaagagaagatggcattggcatggaacaaagttttccagagctccccatttcttaataaggctttgctgccttttaaggaatggaacatagatttctccgagataacaattggcacgcgggttggaataggattctttggagaagttttccgtggtatatggaatggaactgatgttgccatcaaagtgtttctagaacaggatttgacaactgaaaacatggaagatttttgcaacgagatatacatcctcagccggttacgacacccgaatgttatattgcttcttggtgcatgcattacacctccacacctgtcaatggttactgaatatatggaaatggggtcactgtactatctcattcatatgagtggtcagaaaaagaaacttagttggcgtaggaagttgaaaattattcgtgatatatgcaggggattgatgtgcatacaccgcatcaagatagttcacagggatctcaaaagtgcaaactgcctggtcaataagcattggactgtcaagatatgtgactttggtctatctcgactgatgattgatagtcctatgaccgataattcctctgctggcaccccggaatggatggcccctgaacttatacgtaatgaacctttcacagagaaatgtgatatattcagccttggtgttatcatgtgggagctgtgcacattgagtcgcccatgggaaggcatctccccagttcaagtggtgtattcagttgctaatgaagggtcacggcttgagattccggaaggacccctcggcaggttaatcgcagattgctggtctgagcctgagaatcgaccgagctgccaggagatcctaacccgtctgctagactgcgaatatactgttagctaaaatggaagctgcatgctcgttcacccaattcctgcacaggtgagaatatttcttgtataaaacctataaaaaaagcctgccgattctgcggacttgaggtcacatattgaagccctgttcttttttttttacaacggcgaccttttctctcaaaaatgtaaaaaaatgcttccccggttatagaagaacatattctggcccagaaatgtgccttatcgcagggcaagctaattctagataattagcatgccctcgaattaaccaagtgtttgttccgaagaatgttgccagtttgccattaccctgtggaatatggtaagcaagtacatggtgtgaattatgtgtgttgctcctaaacaggcggcaaataggaactagggtgctgtttggttggttccagggacctataacgtaaatggaaatagaaaacaccgctaccagttacattgcat

SEQ ID NO: 77441 - DNA, 3222 bp, Zea Mays
ccactgcagcgaagtaccgacgcctcccacagctgggagtaatcttcccacctgcctcggcgcctcctccctctctcccaacctcgcccgttctcgcctcgctgttctcctctgtcacctctccctgagaagcgtggctcctgcaaccggcctccccacctgctcctcctctacgcgccgagcaccacacgacgcgacacaaccgagcacggccgctccgccactccactgcttccgcggtggcgccgcttcactcccgtgctgcagcgagcgttacggagatccgtggggacatgaaccagggtttctcctatctgttggtgaacataaagctggatccagaccacagaatgcatgatattatgcaccattgcacacgtccccagagagttcagagttcccagtcatagatgccttttactgcgtgtcttgacaaaatgaacagtacccagtgcccttgaaatgtgctaggaatataaagatatgaactaaatttatcagtggtcctattgaatatggagctactgttatatgtcattgtctcatgcaaatgatggtggctgtaagttgtgattgaggaactccattgtctgagaaatggatgaaacaccaactagttctgggcaatctgaagctagttcatgtgaacctaattggtggcctccagacttcttggagaagatacagtctgcttccataccaaggaaacatgatgttttgggtaatcaaagttcctcatcctggaaggcttctcaattactgtggtcaacaggatcttattcagggttaatccctaatggtttctattcaatcatcccggataaaaagttgaaggagactttcccaactattccatcactagatgacttgcaaactcttgaagcagatgggcttaaggctgacataattattgtagacactgagagggataagaaggttttcatgttgaagcagcttagtgctgcacttgtgaaagggttaagctctagcccagcattagtgataaagaaaattgcaggattggtctttgactgcttcaagcgccaaattcccgatgccagtccaactagaggctcgattgaagatacccatttctttggaaataaaggaccacaacttctggggcagataagacatggatcgtgccgaccccgagctattctatttaaagttcttgcagatgccgttggccttgagagtaaacttgtagttggtctaccagatgacggtgctgttggatttgtggactcttacaaacatatgtctgtggtagtttcactaaactctatggtgcttcttgtggatcttatgcgatttccaggccagctgattccgttttcagctaaggctatatttatatcgcacatatctgctgcgggtgaaagcgactcagctgaaaatgactcttgtgattctcctcttgagcccaacagcccactttatggattgtctgataaagttgaagttgaaggaattgaatcttcatcatatctatctggacgatcactgcgtaatatgatgttgagatcaaggacattctctgaggggaaattaagcacgtcatgtagtgaaccaaatatagcaaatgccttttggaggcgcagccaaaggagagttgccgaggaaccccgtggtgctagttccagccctgagcatccattaatgagagcaaggggaagatctatacttggtagtgagaagcaatcatttcaagaatacacagaatctggagctgcttcaagatcagatggtcttgggggcccttcaacctctaatgctcgaagaataaggcgaagaagcattagcattacacctgagattggagatgacatcgtgagggcagttcgggctatgaacgaaacactaaagcaaaatcgcctccaaagggatcatgtcgaaggttcatgctcatatgttatggaagatcaaagcaacaccaatgactgcccaaataaagatgatgcatcttggagaattggtgctactgacagtgactcaagaaaccgaactggttctactcagaaggccatgtcactaccttcttcgcctcatgaatatagaggtcaagttacccaaaaaagtgatgattttataagtaaagagaagatggcattggcatggaacaaagttttccagagctccccatttcttaataaggctttgctgccttttaaggaatggaacatagatttctccgagataacaattggcacgcgggttggaataggattctttggagaagttttccgtggtatatggaatggaactgatgttgccatcaaagtgtttctagaacaggatttgacaactgaaaacatggaagatttttgcaacgagatatacatcctcagccggttacgacacccgaatgttatattgcttcttggtgcatgcattacacctccacacctgtcaatggttactgaatatatggaaatggggtcactgtactatctcattcatatgagtggtcagaaaaagaaacttagttggcgtaggaagttgaaaattattcgtgatatatgcagagaaatgtgatatattcagccttggtgttatcatgtgggagctgtgcacattgagtcgcccatgggaaggcatctccccagttcaagtggtgtattcagttgctaatgaagggtcacggcttgagattccggaaggacccctcggcaggttaatcgcagattgctggtctgagcctgagaatcgaccgagctgccaggagatcctaacccgtctgctagactgcgaatatactgttagctaaaatggaagctgcatgctcgttcacccaattcctgcacaggtgagaatatttcttgtataaaacctataaaaaaagcctgccgattctgcggacttgaggtcacatattgaagccctgttcttttttttttacaacggcgaccttttctctcaaaaatgtaaaaaaatgcttccccggttatagaagaacatattctggcccagaaatgtgccttatcgcagggcaagctaattctagataattagcatgccctcgaattaaccaagtgtttgttccgaagaatgttgccagtttgccattaccctgtggaatatggtaagcaagtacatggtgtgaattatgtgtgttgctcctaaacaggcggcaaataggaactagggtgctgtttggttggttccagggacctataacgtaaatggaaatagaaaacaccgctaccagttacattgcat

SEQ ID NO: 77442 - DNA, 3782 bp, Zea Mays
cccactgcagcgaagtaccgacgcctcccacagctgggagtaatcttcccacctgcctcggcgcctcctccctctctcccaacctcgcccgttctcgcctcgctgttctcctctgtcacctctccctgagaagcgtggctcctgcaaccggcctccccacctgctcctcctctacgcgccgagcaccacacgacgcgacacaaccgagcacggccgctccgccactccactgcttccgcggtggcgccgcttcactcccgtgctgcagcgagcgttacggagatccgtggggacatgaaccagggtttctcctatctgttggtgaacataaagctggatccagaccacagaatgcatgatattatgcaccattgcacacgtccccagagagttcagagttcccagtcatagatgccttttactgcgtgtcttgacaaaatgaacagtacccagtgcccttgaaatgtgctaggaatataaaggtgacagtgaaactggacagagttgtagaagatgctatctggtcgcaaatctactattcatgcagcagactttacactggaattttgttgtgagcaaaggaaagaggcccatggaaagtttcatgtggttacatttcaagttggctgcctttttaggatctaattgacatcagtatgcacatcagctgataaagaaaggatgtgatccacctctaatacttgctagctggtcaatgtaaataagcctaagtcagtgataaaaagttcccctctctcctgggattgcttatgtagtcacatgttttcacgcttttcagttacatgttactatcaagctacttgtgggtttttagagaaaaagatatgaactaaatttatcagtggtcctattgaatatggagctactgttatatgtcattgtctcatgcaaatgatggtggctgtaagttgtgattgaggaactccattgtctgagaaatggatgaaacaccaactagttctgggcaatctgaagctagttcatgtgaacctaattggtggcctccagacttcttggagaagatacagtctgcttccataccaaggaaacatgatgttttgggtaatcaaagttcctcatcctggaaggcttctcaattactgtggtcaacaggatcttattcagggttaatccctaatggtttctattcaatcatcccggataaaaagttgaaggagactttcccaactattccatcactagatgacttgcaaactcttgaagcagatgggcttaaggctgacataattattgtagacactgagagggataagaaggttttcatgttgaagcagcttagtgctgcacttgtgaaagggttaagctctagcccagcattagtgataaagaaaattgcaggattggtctttgactgcttcaagcgccaaattcccgatgccagtccaactagaggctcgattgaagatacccatttctttggaaataaaggaccacaacttctggggcagataagacatggatcgtgccgaccccgagctattctatttaaagttcttgcagatgccgttggccttgagagtaaacttgtagttggtctaccagatgacggtgctgttggatttgtggactcttacaaacatatgtctgtggtagtttcactaaactctatggtgcttcttgtggatcttatgcgatttccaggccagctgattccgttttcagctaaggctatatttatatcgcacatatctgctgcgggtgaaagcgactcagctgaaaatgactcttgtgattctcctcttgagcccaacagcccactttatggattgtctgataaagttgaagttgaaggaattgaatcttcatcatatctatctggacgatcactgcgtaatatgatgttgagatcaaggacattctctgaggggaaattaagcacgtcatgtagtgaaccaaatatagcaaatgccttttggaggcgcagccaaaggagagttgccgaggaaccccgtggtgctagttccagccctgagcatccattaatgagagcaaggggaagatctatacttggtagtgagaagcaatcatttcaagaatacacagaatctggagctgcttcaagatggtcttgggggcccttcaacctctaatgctcgaagaataaggcgaagaagcattagcattacacctgagattggagatgacatcgtgagggcagttcgggctatgaacgaaacactaaagcaaaatcgcctccaaagggatcatgtcgaaggttcatgctcatatgttatggaagatcaaagcaacaccaatgactgcccaaataaagatgatgcatcttggagaattggtgctactgacagtgactcaagaaaccgaactggttctactcagaaggccatgtcactaccttcttcgcctcatgaatatagaggtcaagttacccaaaaaagtgatgattttataagtaaagagaagatggcattggcatggaacaaagttttccagagctccccatttcttaataaggctttgctgccttttaaggaatggaacatagatttctccgagataacaattggcacgcgggttggaataggattctttggagaagttttccgtggtatatggaatggaactgatgttgccatcaaagtgtttctagaacaggatttgacaactgaaaacatggaagatttttgcaacgagatatacatcctcagccggttacgacacccgaatgttatattgcttcttggtgcatgcattacacctccacacctgtcaatggttactgaatatatggaaatggggtcactgtactatctcattcatatgagtggtcagaaaaagaaacttagttggcgtaggaagttgaaaattattcgtgatatatgcaggggattgatgtgcatacaccgcatcaagatagttcacagggatctcaaaagtgcaaactgcctggtcaataagcattggactgtcaagatatgtgactttggtctatctcgactgatgattgatagtcctatgaccgataattcctctgctggcaccccggaatggatggcccctgaacttatacgtaatgaacctttcacagagaaatgtgatatattcagccttggtgttatcatgtgggagctgtgcacattgagtcgcccatgggaaggcatctccccagttcaagtggtgtattcagttgctaatgaagggtcacggcttgagattccggaaggacccctcggcaggttaatcgcagattgctggtctgagcctgagaatcgaccgagctgccaggagatcctaacccgtctgctagactgcgaatatactgttagctaaaatggaagctgcatgctcgttcacccaattcctgcacaggtgagaatatttcttgtataaaacctataaaaaaagcctgccgattctgcggacttgaggtcacatattgaagccctgttcttttttttttacaacggcgaccttttctctcaaaaatgtaaaaaaatgcttccccggttatagaagaacatattctggcccagaaatgtgccttatcgcagggcaagctaattctagataattagcatgccctcgaattaaccaagtgtttgttccgaagaatgttgccagtttgccattaccctgtggaatatggtaagcaagtacatggtgtgaattatgtgtgttgctcctaaacaggcggcaaataggaactagggtgctgtttggttggttccagggacctataacgtaaatggaaatagaaaacaccgctaccagttacattgcat

SEQ ID NO: 77443 - DNA, 3345 bp, Zea Mays
cactccttcccactgcagcgaagtaccgacgcctcccacagctgggagtaatcttcccacctgcctcggcgcctcctccctctctcccaacctcgcccgttctcgcctcgctgttctcctctgtcacctctccctgagaagcgtggctcctgcaaccggcctccccacctgctcctcctctacgcgccgagcaccacacgacgcgacacaaccgagcacggccgctccgccactccactgcttccgcggtggcgccgcttcactcccgtgctgcagcgagcgttacggagatccgtggggacatgaaccagggtttctcctatctgttggtgaacataaagctggatccagaccacagaatgcatgatattatgcaccattgcacacgtccccagagagttcagagttcccagtcatagatgccttttactgcgtgtcttgacaaaatgaacagtacccagtgcccttgaaatgtgctaggaatataaagatatgaactaaatttatcagtggtcctattgaatatggagctactgttatatgtcattgtctcatgcaaatgatggtggctgtaagttgtgattgaggaactccattgtctgagaaatggatgaaacaccaactagttctgggcaatctgaagctagttcatgtgaacctaattggtggcctccagacttcttggagaagatacagtctgcttccataccaaggaaacatgatgttttgggtaatcaaagttcctcatcctggaaggcttctcaattactgtggtcaacaggatcttattcagggttaatccctaatggtttctattcaatcatcccggataaaaagttgaaggagactttcccaactattccatcactagatgacttgcaaactcttgaagcagatgggcttaaggctgacataattattgtagacactgagagggataagaaggttttcatgttgaagcagcttagtgctgcacttgtgaaagggttaagctctagcccagcattagtgataaagaaaattgcaggattggtctttgactgcttcaagcgccaaattcccgatgccagtccaactagaggctcgattgaagatacccatttctttggaaataaaggaccacaacttctggggcagataagacatggatcgtgccgaccccgagctattctatttaaagttcttgcagatgccgttggccttgagagtaaacttgtagttggtctaccagatgacggtgctgttggatttgtggactcttacaaacatatgtctgtggtagtttcactaaactctatggtgcttcttgtggatcttatgcgatttccaggccagctgattccgttttcagctaaggctatatttatatcgcacatatctgctgcgggtgaaagcgactcagctgaaaatgactcttgtgattctcctcttgagcccaacagcccactttatggattgtctgataaagttgaagttgaaggcacgtcatgtagtgaaccaaatatagcaaatgccttttggaggcgcagccaaaggagagttgccgaggaaccccgtggtgctagttccagccctgagcatccattaatgagagcaaggggaagatctatacttggtagtgagaagcaatcatttcaagaatacacagaatctggagctgcttcaagatcagatggtcttgggggcccttcaacctctaatgctcgaagaataaggcgaagaagcattagcattacacctgagattggagatgacatcgtgagttcgggctatgaacgaaacactaaagcaaaatcgcctccaaagggatcatgtcgaaggttcatgctcatatgttatggaagatcaaagcaacaccaatgactgcccaaataaagatgatgcatcttggagaattggtgctactgacagtgactcaagaaaccgaactggttctactcagaaggccatgtcactaccttcttcgcctcatgaatatagaggtcaagttacccaaaaaagtgatgattttataagtaaagagaagatggcattggcatggaacaaagttttccagagctccccatttcttaataaggctttgctgccttttaaggaatggaacatagatttctccgagataacaattggcacgcgggttggaataggattctttggagaagttttccgtggtatatggaatggaactgatgttgccatcaaagtgtttctagaacaggatttgacaactgaaaacatggaagatttttgcaacgagatatacatcctcagccggttacgacacccgaatgttatattgcttcttggtgcatgcattacacctccacacctgtcaatggttactgaatatatggaaatggggtcactgtactatctcattcatatgagtggtcagaaaaagaaacttagttggcgtaggaagttgaaaattattcgtgatatatgcaggggattgatgtgcatacaccgcatcaagatagttcacagggatctcaaaagtgcaaactgcctggtcaataagcattggactgtcaagatatgtgactttggtctatctcgactgatgattgatagtcctatgaccgataattcctctgctggcaccccggaatggatggcccctgaacttatacgtaatgaacctttcacagagaaatgtgatatattcagccttggtgttatcatgtgggagctgtgcacattgagtcgcccatgggaaggcatctccccagttcaagtggtgtattcagttgctaatgaagggtcacggcttgagattccggaaggacccctcggcaggttaatcgcagattgctggtctgagcctgagaatcgaccgagctgccaggagatcctaacccgtctgctagactgcgaatatactgttagctaaaatggaagctgcatgctcgttcacccaattcctgcacaggtgagaatatttcttgtataaaacctataaaaaaagcctgccgattctgcggacttgaggtcacatattgaagccctgttcttttttttttacaacggcgaccttttctctcaaaaatgtaaaaaaatgcttccccggttatagaagaacatattctggcccagaaatgtgccttatcgcagggcaagctaattctagataattagcatgccctcgaattaaccaagtgtttgttccgaagaatgttgccagtttgccattaccctgtggaatatggtaagcaagtacatggtgtgaattatgtgtgttgctcctaaacaggcggcaaataggaactagggtgctgtttggttggttccagggacctataacgtaaatggaaatagaaaacaccgctaccagttacattgcat

SEQ ID NO: 77444 - DNA, 3447 bp, Zea Mays
ctcactccttcccactgcagcgaagtaccgacgcctcccacagctgggagtaatcttcccacctgcctcggcgcctcctccctctctcccaacctcgcccgttctcgcctcgctgttctcctctgtcacctctccctgagaagcgtggctcctgcaaccggcctccccacctgctcctcctctacgcgccgagcaccacacgacgcgacacaaccgagcacggccgctccgccactccactgcttccgcggtggcgccgcttcactcccgtgctgcagcgagcgttacggagatccgtggggacatgaaccagggtttctcctatctgttgatatgaactaaatttatcagtggtcctattgaatatggagctactgttatatgtcattgtctcatgcaaatgatggtggctgtaagttgtgattgaggaactccattgtctgagaaatggatgaaacaccaactagttctgggcaatctgaagctagttcatgtgaacctaattggtggcctccagacttcttggagaagatacagtctgcttccataccaaggaaacatgatgttttgggtaatcaaagttcctcatcctggaaggcttctcaattactgtggtcaacaggatcttattcagggttaatccctaatggtttctattcaatcatcccggataaaaagttgaaggagactttcccaactattccatcactagatgacttgcaaactcttgaagcagatgggcttaaggctgacataattattgtagacactgagagggataagaaggttttcatgttgaagcagcttagtgctgcacttgtgaaagggttaagctctagcccagcattagtgataaagaaaattgcaggattggtctttgactgcttcaagcgccaaattcccgatgccagtccaactagaggctcgattgaagatacccatttctttggaaataaaggaccacaacttctggggcagataagacatggatcgtgccgaccccgagctattctatttaaagttcttgcagatgccgttggccttgagagtaaacttgtagttggtctaccagatgacggtgctgttggatttgtggactcttacaaacatatgtctgtggtagtttcactaaactctatggtgcttcttgtggatcttatgcgatttccaggccagctgattccgttttcagctaaggctatatttatatcgcacatatctgctgcgggtgaaagcgactcagctgaaaatgactcttgtgattctcctcttgagcccaacagcccactttatggattgtctgataaagttgaagttgaaggaattgaatcttcatcatatctatctggacgatcactgcgtaatatgatgttgagatcaaggacattctctgaggggaaattaagcacgtcatgtagtgaaccaaatatagcaaatgccttttggaggcgcagccaaaggagagttgccgaggaaccccgtggtgctagttccaggtttttatttccatccaactgcagctcttgatcactttattctatttctttattatcttttgtatcgttgcttaaatttcttgtcgtgaagcctttattgctgagatgaggacaaaaggatatttcaaattatggttgaacatacaattctaggtgctgttcctaacgatagccctgagcatccattaatgagagcaaggggaagatctatacttggtagtgagaagcaatcatttcaagaatacacagaatctggagctgcttcaagatcagatggtcttgggggcccttcaacctctaatgctcgaagaataaggcgaagaagcattagcattacacctgagattggagatgacatcgtgagggcagttcgggctatgaacgaaacactaaagcaaaatcgcctccaaagggatcatgtcgaaggttcatgctcatatgttatggaagatcaaagcaacaccaatgactgcccaaataaagatgatgcatcttggagaattggtgctactgacagtgactcaagaaaccgaactggttctactcagaaggccatgtcactaccttcttcgcctcatgaatatagaggtcaagttacccaaaaaagtgatgattttataagtaaagagaagatggcattggcatggaacaaagttttccagagctccccatttcttaataaggctttgctgccttttaaggaatggaacatagatttctccgagataacaattggcacgcgggttggaataggattctttggagaagttttccgtggtatatggaatggaactgatgttgccatcaaagtgtttctagaacaggatttgacaactgaaaacatggaagatttttgcaacgagatatacatcctcagccggttacgacacccgaatgttatattgcttcttggtgcatgcattacacctccacacctgtcaatggttactgaatatatggaaatggggtcactgtactatctcattcatatgagtggtcagaaaaagaaacttagttggcgtaggaagttgaaaattattcgtgatatatgcaggggattgatgtgcatacaccgcatcaagatagttcacagggatctcaaaagtgcaaactgcctggtcaataagcattggactgtcaagatatgtgactttggtctatctcgactgatgattgatagtcctatgaccgataattcctctgctggcaccccggaatggatggcccctgaacttatacgtaatgaacctttcacagagaaatgtgatatattcagccttggtgttatcatgtgggagctgtgcacattgagtcgcccatgggaaggcatctccccagttcaagtggtgtattcagttgctaatgaagggtcacggcttgagattccggaaggacccctcggcaggttaatcgcagattgctggtctgagcctgagaatcgaccgagctgccaggagatcctaacccgtctgctagactgcgaatatactgttagctaaaatggaagctgcatgctcgttcacccaattcctgcacaggtgagaatatttcttgtataaaacctataaaaaaagcctgccgattctgcggacttgaggtcacatattgaagccctgttcttttttttttacaacggcgaccttttctctcaaaaatgtaaaaaaatgcttccccggttatagaagaacatattctggcccagaaatgtgccttatcgcagggcaagctaattctagataattagcatgccctcgaattaaccaagtgtttgttccgaagaatgttgccagtttgccattaccctgtggaatatggtaagcaagtacatggtgtgaattatgtgtgttgctcctaaacaggcggcaaataggaactagggtgctgtttggttggttccagggacctataacgtaaatggaaatagaaaacaccgctaccagttacattgcat

SEQ ID NO: 77445 - DNA, 3441 bp, Zea Mays
ctcactccttcccactgcagcgaagtaccgacgcctcccacagctgggagtaatcttcccacctgcctcggcgcctcctccctctctcccaacctcgcccgttctcgcctcgctgttctcctctgtcacctctccctgagaagcgtggctcctgcaaccggcctccccacctgctcctcctctacgcgccgagcaccacacgacgcgacacaaccgagcacggccgctccgccactccactgcttccgcggtggcgccgcttcactcccgtgctgcagcgagcgttacggagatccgtggggacatgaaccagggtttctcctatctgttggtgaacataaagctggatccagaccacagaatgcatgatattatgcaccattgcacacgtccccagagagttcagagttcccagtcatagatgccttttactgcgtgtcttgacaaaatgaacagtacccagtgcccttgaaatgtgctaggaatataaagatatgaactaaatttatcagtggtcctattgaatatggagctactgttatatgtcattgtctcatgcaaatgatggtggctgtaagttgtgattgaggaactccattgtctgagaaatggatgaaacaccaactagttctgggcaatctgaagctagttcatgtgaacctaattggtggcctccagacttcttggagaagatacagtctgcttccataccaaggaaacatgatgttttgggtaatcaaagttcctcatcctggaaggcttctcaattactgtggtcaacaggatcttattcagggttaatccctaatggtttctattcaatcatcccggataaaaagttgaaggagactttcccaactattccatcactagatgacttgcaaactcttgaagcagatgggcttaaggctgacataattattgtagacactgagagggataagaaggttttcatgttgaagcagcttagtgctgcacttgtgaaagggttaagctctagcccagcattagtgataaagaaaattgcaggattggtctttgactgcttcaagcgccaaattcccgatgccagtccaactagaggctcgattgaagatacccatttctttggaaataaaggaccacaacttctggggcagataagacatggatcgtgccgaccccgagctattctatttaaagttcttgcagatgccgttggccttgagagtaaacttgtagttggtctaccagatgacggtgctgttggatttgtggactcttacaaacatatgtctgtggtagtttcactaaactctatggtgcttcttgtggatcttatgcgatttccaggccagctgattccgttttcagctaaggctatatttatatcgcacatatctgctgcgggtgaaagcgactcagctgaaaatgactcttgtgattctcctcttgagcccaacagcccactttatggattgtctgataaagttgaagttgaaggtacagaattgaatcttcatcatatctatctggacgatcactgcgtaatatgatgttgagatcaaggacattctctgaggggaaattaagcacgtcatgtagtgaaccaaatatagcaaatgccttttggaggcgcagccaaaggagagttgccgaggaaccccgtggtgctagttccagccctgagcatccattaatgagagcaaggggaagatctatacttggtagtgagaagcaatcatttcaagaatacacagaatctggagctgcttcaagatcagatggtcttgggggcccttcaacctctaatgctcgaagaataaggcgaagaagcattagcattacacctgagattggagatgacatcgtgagggcagttcgggctatgaacgaaacactaaagcaaaatcgcctccaaagggatcatgtcgaaggttcatgctcatatgttatggaagatcaaagcaacaccaatgactgcccaaataaagatgatgcatcttggagaattggtgctactgacagtgactcaagaaaccgaactggttctactcagaaggccatgtcactaccttcttcgcctcatgaatatagaggtcaagttacccaaaaaagtgatgattttataagtaaagagaagatggcattggcatggaacaaagttttccagagctccccatttcttaataaggctttgctgccttttaaggaatggaacatagatttctccgagataacaattggcacgcgggttggaataggattctttggagaagttttccgtggtatatggaatggaactgatgttgccatcaaagtgtttctagaacaggatttgacaactgaaaacatggaagatttttgcaacgagatatacatcctcagccggttacgacacccgaatgttatattgcttcttggtgcatgcattacacctccacacctgtcaatggttactgaatatatggaaatggggtcactgtactatctcattcatatgagtggtcagaaaaagaaacttagttggcgtaggaagttgaaaattattcgtgatatatgcaggggattgatgtgcatacaccgcatcaagatagttcacagggatctcaaaagtgcaaactgcctggtcaataagcattggactgtcaagatatgtgactttggtctatctcgactgatgattgatagtcctatgaccgataattcctctgctggcaccccggaatggatggcccctgaacttatacgtaatgaacctttcacagagaaatgtgatatattcagccttggtgttatcatgtgggagctgtgcacattgagtcgcccatgggaaggcatctccccagttcaagtggtgtattcagttgctaatgaagggtcacggcttgagattccggaaggacccctcggcaggttaatcgcagattgctggtctgagcctgagaatcgaccgagctgccaggagatcctaacccgtctgctagactgcgaatatactgttagctaaaatggaagctgcatgctcgttcacccaattcctgcacaggtgagaatatttcttgtataaaacctataaaaaaagcctgccgattctgcggacttgaggtcacatattgaagccctgttcttttttttttacaacggcgaccttttctctcaaaaatgtaaaaaaatgcttccccggttatagaagaacatattctggcccagaaatgtgccttatcgcagggcaagctaattctagataattagcatgccctcgaattaaccaagtgtttgttccgaagaatgttgccagtttgccattaccctgtggaatatggtaagcaagtacatggtgtgaattatgtgtgttgctcctaaacaggcggcaaataggaactagggtgctgtttggttggttccagggacctataacgtaaatggaaatagaaaacaccgctaccagttacattgcat

SEQ ID NO: 77446 - DNA, 3134 bp, Zea Mays
cctctcactccttcccactgcagcgaagtaccgacgcctcccacagctgggagtaatcttcccacctgcctcggcgcctcctccctctctcccaacctcgcccgttctcgcctcgctgttctcctctgtcacctctccctgagaagcgtggctcctgcaaccggcctccccacctgctcctcctctacgcgccgagcaccacacgacgcgacacaaccgagcacggccgctccgccactccactgcttccgcggtggcgccgcttcactcccgtgctgcagcgagcgttacggagatccgtggggacatgaaccagggtttctcctatctgttgatatgaactaaatttatcagtggtcctattgaatatggagctactgttatatgtcattgtctcatgcaaatgatggtggctgtaagttgtgattgaggaactccattgtctgagaaatggatgaaacaccaactagttctgggcaatctgaagctagttcatgtgaacctaattggtggcctccagacttcttggagaagatacagtctgcttccataccaaggaaacatgatgttttgggtaatcaaagttcctcatcctggaaggcttctcaattactgtggtcaacaggatcttattcagggttaatccctaatggtttctattcaatcatcccggataaaaagttgaaggagactttcccaactattccatcactagatgacttgcaaactcttgaagcagatgggcttaaggctgacataattattgtagacactgagagggataagaaggttttcatgttgaagcagcttagtgctgcacttgtgaaagggttaagctctagcccagcattagtgataaagaaaattgcaggattggtctttgactgcttcaagcgccaaattcccgatgccagtccaactagaggctcgattgaagatacccatttctttggaaataaaggaccacaacttctggggcagataagacatggatcgtgccgaccccgagctattctatttaaagttcttgcagatgccgttggccttgagagtaaacttgtagttggtctaccagatgacggtgctgttggatttgtggactcttacaaacatatgtctgtggtagtttcactaaactctatggtgcttcttgtggatcttatgcgatttccaggccagctgattccgttttcagctaaggctatatttatatcgcacatatctgctgcgggtgaaagcgactcagctgaaaatgactcttgtgattctcctcttgagcccaacagcccactttatggattgtctgataaagttgaagttgaaggaattgaatcttcatcatatctatctggacgatcactgcgtaatatgatgttgagatcaaggacattctctgaggggaaattaagcacgtcatgtagtgaaccaaatatagcaaatgccttttggaggcgcagccaaaggagagttgccgaggaaccccgtggtgctagttccagccctgagcatccattaatgagagcaaggggaagatctatacttggtagtgagaagcaatcatttcaagaatacacagaatctggagctgcttcaagatcagatggtcttgggggcccttcaacctctaatgctcgaagaataaggcgaagaagcattagcattacacctgagattggagatgacatcgtgagggcagttcgggctatgaacgaaacactaaagcaaaatcgcctccaaagggatcatgtcgaaggttcatgctcatatgttatggaagatcaaagcaacaccaatgactgcccaaataaagatgatgcatcttggagaattggtgctactgacagtgactcaagaaaccgaactggttctactcagaaggccatgtcactaccttcttcgcctcatgaatatagaggtcaagttacccaaaaaagtgatgattttataagtaaagagaagatggcattggcatggaacaaagttttccagagctccccatttcttaataaggctttgctgccttttaaggaatggaacatagatttctccgagataacaattggcacgcgggttggaataggattctttggagaagttttccgtggtatatggaatggaactgatgttgccatcaaagtgtttctagaacaggatttgacaactgaaaacatggaagatttttgcaacgagatatacatcctcagccggttacgacacccgaatgttatattgcttcttggtgcatgcattacacctccacacctgtcaatggttactgaatatatggaaatggggtcactgtactatctcattcatatgagtggtcagaaaaagaaacttagttggcgtaggaagttgaaaattattcgtgatatatgcaggggattgatgtgcatacaccgcatcaagatagttcacagggatctcaaaagtgcaaactgcctggtcaataagcattggactgtcaagatatgtgactttggtctatctcgactgatgattgatagtcctatgaccgataattcctctgctggcaccccggaatggatggcccctgaacttatacgtaatgaacctttcacagagaaatgtgatatattcagccttggtgttatcatgtgggagctgtgcacattgagtcgcccatgggaaggcatctccccagttcaagtggtgtattcagttgctaatgaagggtcacggcttgagattccggaaggacccctcggcaggttaatcgcagattgctggtctgagcctgagaatcgaccgagctgccaggagatcctaacccgtctgctagactgcgaatatactgttagctaaaatggaagctgcatgctcgttcacccaattcctgcacagaagaacatattctggcccagaaatgtgccttatcgcagggcaagctaattctagataattagcatgccctcgaattaaccaagtgtttgttccgaagaatgttgccagtttgccattaccctgtggaatatggtaagcaagtacatggtgtgaattatgtgtgttgctcctaaacaggcggcaaataggaactagggtgctgtttggttggttccagggacctataacgtaaatggaaatagaaaacaccgctaccagttacattgcat

SEQ ID NO: 77447 - DNA, 3278 bp, Zea Mays
cctctcactccttcccactgcagcgaagtaccgacgcctcccacagctgggagtaatcttcccacctgcctcggcgcctcctccctctctcccaacctcgcccgttctcgcctcgctgttctcctctgtcacctctccctgagaagcgtggctcctgcaaccggcctccccacctgctcctcctctacgcgccgagcaccacacgacgcgacacaaccgagcacggccgctccgccactccactgcttccgcggtggcgccgcttcactcccgtgctgcagcgagcgttacggagatccgtggggacatgaaccagggtttctcctatctgttgatatgaactaaatttatcagtggtcctattgaatatggagctactgttatatgtcattgtctcatgcaaatgatggtggctgtaagttgtgattgaggaactccattgtctgagaaatggatgaaacaccaactagttctgggcaatctgaagctagttcatgtgaacctaattggtggcctccagacttcttggagaagatacagtctgcttccataccaaggaaacatgatgttttgggtaatcaaagttcctcatcctggaaggcttctcaattactgtggtcaacaggatcttattcagggttaatccctaatggtttctattcaatcatcccggataaaaagttgaaggagactttcccaactattccatcactagatgacttgcaaactcttgaagcagatgggcttaaggctgacataattattgtagacactgagagggataagaaggttttcatgttgaagcagcttagtgctgcacttgtgaaagggttaagctctagcccagcattagtgataaagaaaattgcaggattggtctttgactgcttcaagcgccaaattcccgatgccagtccaactagaggctcgattgaagatacccatttctttggaaataaaggaccacaacttctggggcagataagacatggatcgtgccgaccccgagctattctatttaaagttcttgcagatgccgttggccttgagagtaaacttgtagttggtctaccagatgacggtgctgttggatttgtggactcttacaaacatatgtctgtggtagtttcactaaactctatggtgcttcttgtggatcttatgcgatttccaggccagctgattccgttttcagctaaggctatatttatatcgcacatatctgctgcgggtgaaagcgactcagctgaaaatgactcttgtgattctcctcttgagcccaacagcccactttatggattgtctgataaagttgaagttgaaggtacagaattgaatcttcatcatatctatctggacgatcactgcgtaatatgatgttgagatcaaggacattctctgaggggaaattaagcacgtcatgtagtgaaccaaatatagcaaatgccttttggaggcgcagccaaaggagagttgccgaggaaccccgtggtgctagttccagccctgagcatccattaatgagagcaaggggaagatctatacttggtagtgagaagcaatcatttcaagaatacacagaatctggagctgcttcaagatcagatggtcttgggggcccttcaacctctaatgctcgaagaataaggcgaagaagcattagcattacacctgagattggagatgacatcgtgagttcgggctatgaacgaaacactaaagcaaaatcgcctccaaagggatcatgtcgaaggttcatgctcatatgttatggaagatcaaagcaacaccaatgactgcccaaataaagatgatgcatcttggagaattggtgctactgacagtgactcaagaaaccgaactggttctactcagaaggccatgtcactaccttcttcgcctcatgaatatagaggtcaagttacccaaaaaagtgatgattttataagtaaagagaagatggcattggcatggaacaaagttttccagagctccccatttcttaataaggctttgctgccttttaaggaatggaacatagatttctccgagataacaattggcacgcgggttggaataggattctttggagaagttttccgtggtatatggaatggaactgatgttgccatcaaagtgtttctagaacaggatttgacaactgaaaacatggaagatttttgcaacgagatatacatcctcagccggttacgacacccgaatgttatattgcttcttggtgcatgcattacacctccacacctgtcaatggttactgaatatatggaaatggggtcactgtactatctcattcatatgagtggtcagaaaaagaaacttagttggcgtaggaagttgaaaattattcgtgatatatgcaggggattgatgtgcatacaccgcatcaagatagttcacagggatctcaaaagtgcaaactgcctggtcaataagcattggactgtcaagatatgtgactttggtctatctcgactgatgattgatagtcctatgaccgataattcctctgctggcaccccggaatggatggcccctgaacttatacgtaatgaacctttcacagagaaatgtgatatattcagccttggtgttatcatgtgggagctgtgcacattgagtcgcccatgggaaggcatctccccagttcaagtggtgtattcagttgctaatgaagggtcacggcttgagattccggaaggacccctcggcaggttaatcgcagattgctggtctgagcctgagaatcgaccgagctgccaggagatcctaacccgtctgctagactgcgaatatactgttagctaaaatggaagctgcatgctcgttcacccaattcctgcacaggtgagaatatttcttgtataaaacctataaaaaaagcctgccgattctgcggacttgaggtcacatattgaagccctgttcttttttttttacaacggcgaccttttctctcaaaaatgtaaaaaaatgcttccccggttatagaagaacatattctggcccagaaatgtgccttatcgcagggcaagctaattctagataattagcatgccctcgaattaaccaagtgtttgttccgaagaatgttgccagtttgccattaccctgtggaatatggtaagcaagtacatggtgtgaattatgtgtgttgctcctaaacaggcggcaaataggaactagggtgctgtttggttggttccagggacctataacgtaaatggaaatagaaaacaccgctaccagttacattgcat

SEQ ID NO: 77448 - DNA, 3353 bp, Zea Mays
ctcctctcactccttcccactgcagcgaagtaccgacgcctcccacagctgggagtaatcttcccacctgcctcggcgcctcctccctctctcccaacctcgcccgttctcgcctcgctgttctcctctgtcacctctccctgagaagcgtggctcctgcaaccggcctccccacctgctcctcctctacgcgccgagcaccacacgacgcgacacaaccgagcacggccgctccgccactccactgcttccgcggtggcgccgcttcactcccgtgctgcagcgagcgttacggagatccgtggggacatgaaccagggtttctcctatctgttggtgaacataaagctggatccagaccacagaatgcatgatattatgcaccattgcacacgtccccagagagttcagagttcccagtcatagatgccttttactgcgtgtcttgacaaaatgaacagtacccagtgcccttgaaatgtgctaggaatataaaggtgacagtgaaactggacagagttgtagaagatgctatctggtcgcaaatctactattcatgcagcagactttacactggaattttgttgtgagcaaaggaaagaggcccatggaaagtttcatgtggttacatttcaagttggctgcctttttaggatctaattgacatcagtatgcacatcagctgataaagaaaggatgtgatccacctctaatacttgctagctggtcaatgtaaataagcctaagtcagtgataaaaagttcccctctctcctgggattgcttatgtagtcacatgttttcacgcttttcagttacatgttactatcaagctacttgtgggtttttagagaaaaagatatgaactaaatttatcagtggtcctattgaatatggagctactgttatatgtcattgtctcatgcaaatgatggtggctgtaagttgtgattgaggaactccattgtctgagaaatggatgaaacaccaactagttctgggcaatctgaagctagttcatgtgaacctaattggtggcctccagacttcttggagaagatacagtctgcttccataccaaggaaacatgatgttttgggtaatcaaagttcctcatcctggaaggcttctcaattactgtggtcaacaggatcttattcagggttaatccctaatggtttctattcaatcatcccggataaaaagttgaaggagactttcccaactattccatcactagatgacttgcaaactcttgaagcagatgggcttaaggctgacataattattgtagacactgagagggataagaaggttttcatgttgaagcagcttagtgctgcacttgtgaaagggttaagctctagcccagcattagtgataaagaaaattgcaggattgaattgaatcttcatcatatctatctggacgatcactgcgtaatatgatgttgagatcaaggacattctctgaggggaaattaagcacgtcatgtagtgaaccaaatatagcaaatgccttttggaggcgcagccaaaggagagttgccgaggaaccccgtggtgctagttccagccctgagcatccattaatgagagcaaggggaagatctatacttggtagtgagaagcaatcatttcaagaatacacagaatctggagctgcttcaagatcagatggtcttgggggcccttcaacctctaatgctcgaagaataaggcgaagaagcattagcattacacctgagattggagatgacatcgtgagggcagttcgggctatgaacgaaacactaaagcaaaatcgcctccaaagggatcatgtcgaaggttcatgctcatatgttatggaagatcaaagcaacaccaatgactgcccaaataaagatgatgcatcttggagaattggtgctactgacagtgactcaagaaaccgaactggttctactcagaaggccatgtcactaccttcttcgcctcatgaatatagaggtcaagttacccaaaaaagtgatgattttataagtaaagagaagatggcattggcatggaacaaagttttccagagctccccatttcttaataaggctttgctgccttttaaggaatggaacatagatttctccgagataacaattggcacgcgggttggaataggattctttggagaagttttccgtggtatatggaatggaactgatgttgccatcaaagtgtttctagaacaggatttgacaactgaaaacatggaagatttttgcaacgagatatacatcctcagccggttacgacacccgaatgttatattgcttcttggtgcatgcattacacctccacacctgtcaatggttactgaatatatggaaatggggtcactgtactatctcattcatatgagtggtcagaaaaagaaacttagttggcgtaggaagttgaaaattattcgtgatatatgcaggggattgatgtgcatacaccgcatcaagatagttcacagggatctcaaaagtgcaaactgcctggtcaataagcattggactgtcaagatatgtgactttggtctatctcgactgatgattgatagtcctatgaccgataattcctctgctggcaccccggaatggatggcccctgaacttatacgtaatgaacctttcacagagaaatgtgatatattcagccttggtgttatcatgtgggagctgtgcacattgagtcgcccatgggaaggcatctccccagttcaagtggtgtattcagttgctaatgaagggtcacggcttgagattccggaaggacccctcggcaggttaatcgcagattgctggtctgagcctgagaatcgaccgagctgccaggagatcctaacccgtctgctagactgcgaatatactgttagctaaaatggaagctgcatgctcgttcacccaattcctgcacaggtgagaatatttcttgtataaaacctataaaaaaagcctgccgattctgcggacttgaggtcacatattgaagccctgttcttttttttttacaacggcgaccttttctctcaaaaatgtaaaaaaatgcttccccggttatagaagaacatattctggcccagaaatgtgccttatcgcagggcaagctaattctagataattagcatgccctcgaattaaccaagtgtttgttccgaagaatgttgccagtttgccattaccctgtggaatatggtaagcaagtacatggtgtgaattatgtgtgttgctcctaaacaggcggcaaataggaactagggtgctgtttggttggttccagggacctataacgtaaatggaaatagaaaacaccgctaccagttacattgcat

SEQ ID NO: 77449 - DNA, 3802 bp, Zea Mays
ctcctctcactccttcccactgcagcgaagtaccgacgcctcccacagctgggagtaatcttcccacctgcctcggcgcctcctccctctctcccaacctcgcccgttctcgcctcgctgttctcctctgtcacctctccctgagaagcgtggctcctgcaaccggcctccccacctgctcctcctctacgcgccgagcaccacacgacgcgacacaaccgagcacggccgctccgccactccactgcttccgcggtggcgccgcttcactcccgtgctgcagcgagcgttacggagatccgtggggacatgaaccagggtttctcctatctgttggtgaacataaagctggatccagaccacagaatgcatgatattatgcaccattgcacacgtccccagagagttcagagttcccagtcatagatgccttttactgcgtgtcttgacaaaatgaacagtacccagtgcccttgaaatgtgctaggaatataaaggtgacagtgaaactggacagagttgtagaagatgctatctggtcgcaaatctactattcatgcagcagactttacactggaattttgttgtgagcaaaggaaagaggcccatggaaagtttcatgtggttacatttcaagttggctgcctttttaggatctaattgacatcagtatgcacatcagctgataaagaaaggatgtgatccacctctaatacttgctagctggtcaatgtaaataagcctaagtcagtgataaaaagttcccctctctcctgggattgcttatgtagtcacatgttttcacgcttttcagttacatgttactatcaagctacttgtgggtttttagagaaaaagatatgaactaaatttatcagtggtcctattgaatatggagctactgttatatgtcattgtctcatgcaaatgatggtggctgtaagttgtgattgaggaactccattgtctgagaaatggatgaaacaccaactagttctgggcaatctgaagctagttcatgtgaacctaattggtggcctccagacttcttggagaagatacagtctgcttccataccaaggaaacatgatgttttgggtaatcaaagttcctcatcctggaaggcttctcaattactgtggtcaacaggatcttattcagggttaatccctaatggtttctattcaatcatcccggataaaaagttgaaggagactttcccaactattccatcactagatgacttgcaaactcttgaagcagatgggcttaaggctgacataattattgtagacactgagagggataagaaggttttcatgttgaagcagcttagtgctgcacttgtgaaagggttaagctctagcccagcattagtgataaagaaaattgcaggattggtctttgactgcttcaagcgccaaattcccgatgccagtccaactagaggctcgattgaagatacccatttctttggaaataaaggaccacaacttctggggcagataagacatggatcgtgccgaccccgagctattctatttaaagttcttgcagatgccgttggccttgagagtaaacttgtagttggtctaccagatgacggtgctgttggatttgtggactcttacaaacatatgtctgtggtagtttcactaaactctatggtgcttcttgtggatcttatgcgatttccaggccagctgattccgttttcagctaaggctatatttatatcgcacatatctgctgcgggtgaaagcgactcagctgaaaatgactcttgtgattctcctcttgagcccaacagcccactttatggattgtctgataaagttgaagttgaaggaattgaatcttcatcatatctatctggacgatcactgcgtaatatgatgttgagatcaaggacattctctgaggggaaattaagcacgtcatgtagtgaaccaaatatagcaaatgccttttggaggcgcagccaaaggagagttgccgaggaaccccgtggtgctagttccagccctgagcatccattaatgagagcaaggggaagatctatacttggtagtgagaagcaatcatttcaagaatacacagaatctggagctgcttcaagatcagatggtcttgggggcccttcaacctctaatgctcgaagaataaggcgaagaagcattagcattacacctgagattggagatgacatcgtgagggcagttcgggctatgaacgaaacactaaagcaaaatcgcctccaaagggatcatgtcgaaggttcatgctcatatgttatggaagatcaaagcaacaccaatgactgcccaaataaagatgatgcatcttggagaattggtgctactgacagtgactcaagaaaccgaactggttctactcagaaggccatgtcactaccttcttcgcctcatgaatatagaggtcaagttacccaaaaaagtgatgattttataagtaaagagaagatggcattggcatggaacaaagttttccagagctccccatttcttaataaggctttgctgccttttaaggaatggaacatagatttctccgagataacaattggcacgcgggttggaataggattctttggagaagttttccgtggtatatggaatggaactgatgttgccatcaaagtgtttctagaacaggatttgacaactgaaaacatggaagatttttgcaacgagatatacatcctcagccggttacgacacccgaatgttatattgcttcttggtgcatgcattacacctccacacctgtcaatggttactgaatatatggaaatggggtcactgtactatctcattcatatgagtggtcagaaaaagaaacttagttggcgtaggaagttgaaaattattcgtgatatatgcaggggattgatgtgcatacaccgcatcaagatagttcacagggatctcaaaagtgcaaactgcctggtcaataagcattggactgtcaagatatgtgactttggtctatctcgactgatgattgatagtcctatgaccgataattcctctgctggcaccccggaatggatggcccctgaacttatacgtaatgaacctttcacagagaaatgtgatatattcagccttggtgttatcatgtgggagctgtgcacattgagtcgcccatgggaaggcatctccccagttcaagtggtgtattcagttgctaatgaagggtcacggcttgagattccggaaggacccctcggcaggttaatcgcagattgctggtctgagcctgagaatcgaccgagctgccaggagatcctaacccgtctgctagactgcgaatatactgttagctaaaatggaagctgcatgctcgttcacccaattcctgcacaggtgagaatatttcttgtataaaacctataaaaaaagcctgccgattctgcggacttgaggtcacatattgaagccctgttcttttttttttacaacggcgaccttttctctcaaaaatgtaaaaaaatgcttccccggttatagaagaacatattctggcccagaaatgtgccttatcgcagggcaagctaattctagataattagcatgccctcgaattaaccaagtgtttgttccgaagaatgttgccagtttgccattaccctgtggaatatggtaagcaagtacatggtgtgaattatgtgtgttgctcctaaacaggcggcaaataggaactagggtgctgtttggttggttccagggacctataacgtaaatggaaatagaaaacaccgctaccagttacattgcat

SEQ ID NO: 77450 - DNA, 3617 bp, Zea Mays
ccctctcctctcactccttcccactgcagcgaagtaccgacgcctcccacagctgggagtaatcttcccacctgcctcggcgcctcctccctctctcccaacctcgcccgttctcgcctcgctgttctcctctgtcacctctccctgagaagcgtggctcctgcaaccggcctccccacctgctcctcctctacgcgccgagcaccacacgacgcgacacaaccgagcacggccgctccgccactccactgcttccgcggtggcgccgcttcactcccgtgctgcagcgagcgttacggagatccgtggggacatgaaccagggtttctcctatctgttggtgaacataaagctggatccagaccacagaatgcatgatattatgcaccattgcacacgtccccagagagttcagagttcccagtcatagatgccttttactgcgtgtcttgacaaaatgaacagtacccagtgcccttgaaatgtgctaggaatataaagatatgaactaaatttatcagtggtcctattgaatatggagctactgttatatgtcattgtctcatgcaaatgatggtggctgtaagttgtgattgaggaactccattgtctgagaaatggatgaaacaccaactagttctgggcaatctgaagctagttcatgtgaacctaattggtggcctccagacttcttggagaagatacagtctgcttccataccaaggaaacatgatgttttgggtaatcaaagttcctcatcctggaaggcttctcaattactgtggtcaacaggatcttattcagggttaatccctaatggtttctattcaatcatcccggataaaaagttgaaggagactttcccaactattccatcactagatgacttgcaaactcttgaagcagatgggcttaaggctgacataattattgtagacactgagagggataagaaggttttcatgttgaagcagcttagtgctgcacttgtgaaagggttaagctctagcccagcattagtgataaagaaaattgcaggattggtctttgactgcttcaagcgccaaattcccgatgccagtccaactagaggctcgattgaagatacccatttctttggaaataaaggaccacaacttctggggcagataagacatggatcgtgccgaccccgagctattctatttaaagttcttgcagatgccgttggccttgagagtaaacttgtagttggtctaccagatgacggtgctgttggatttgtggactcttacaaacatatgtctgtggtagtttcactaaactctatggtgcttcttgtggatcttatgcgatttccaggccagctgattccgttttcagctaaggctatatttatatcgcacatatctgctgcgggtgaaagcgactcagctgaaaatgactcttgtgattctcctcttgagcccaacagcccactttatggattgtctgataaagttgaagttgaaggaattgaatcttcatcatatctatctggacgatcactgcgtaatatgatgttgagatcaaggacattctctgaggggaaattaagcacgtcatgtagtgaaccaaatatagcaaatgccttttggaggcgcagccaaaggagagttgccgaggaaccccgtggtgctagttccaggtttttatttccatccaactgcagctcttgatcactttattctatttctttattatcttttgtatcgttgcttaaatttcttgtcgtgaagcctttattgctgagatgaggacaaaaggatatttcaaattatggttgaacatacaattctaggtgctgttcctaacgatagccctgagcatccattaatgagagcaaggggaagatctatacttggtagtgagaagcaatcatttcaagaatacacagaatctggagctgcttcaagatcagatggtcttgggggcccttcaacctctaatgctcgaagaataaggcgaagaagcattagcattacacctgagattggagatgacatcgtgagggcagttcgggctatgaacgaaacactaaagcaaaatcgcctccaaagggatcatgtcgaaggttcatgctcatatgttatggaagatcaaagcaacaccaatgactgcccaaataaagatgatgcatcttggagaattggtgctactgacagtgactcaagaaaccgaactggttctactcagaaggccatgtcactaccttcttcgcctcatgaatatagaggtcaagttacccaaaaaagtgatgattttataagtaaagagaagatggcattggcatggaacaaagttttccagagctccccatttcttaataaggctttgctgccttttaaggaatggaacatagatttctccgagataacaattggcacgcgggttggaataggattctttggagaagttttccgtggtatatggaatggaactgatgttgccatcaaagtgtttctagaacaggatttgacaactgaaaacatggaagatttttgcaacgagatatacatcctcagccggttacgacacccgaatgttatattgcttcttggtgcatgcattacacctccacacctgtcaatggttactgaatatatggaaatggggtcactgtactatctcattcatatgagtggtcagaaaaagaaacttagttggcgtaggaagttgaaaattattcgtgatatatgcaggggattgatgtgcatacaccgcatcaagatagttcacagggatctcaaaagtgcaaactgcctggtcaataagcattggactgtcaagatatgtgactttggtctatctcgactgatgattgatagtcctatgaccgataattcctctgctggcaccccggaatggatggcccctgaacttatacgtaatgaacctttcacagagaaatgtgatatattcagccttggtgttatcatgtgggagctgtgcacattgagtcgcccatgggaaggcatctccccagttcaagtggtgtattcagttgctaatgaagggtcacggcttgagattccggaaggacccctcggcaggttaatcgcagattgctggtctgagcctgagaatcgaccgagctgccaggagatcctaacccgtctgctagactgcgaatatactgttagctaaaatggaagctgcatgctcgttcacccaattcctgcacaggtgagaatatttcttgtataaaacctataaaaaaagcctgccgattctgcggacttgaggtcacatattgaagccctgttcttttttttttacaacggcgaccttttctctcaaaaatgtaaaaaaatgcttccccggttatagaagaacatattctggcccagaaatgtgccttatcgcagggcaagctaattctagataattagcatgccctcgaattaaccaagtgtttgttccgaagaatgttgccagtttgccattaccctgtggaatatggtaagcaagtacatggtgtgaattatgtgtgttgctcctaaacaggcggcaaataggaactagggtgctgtttggttggttccagggacctataacgtaaatggaaatagaaaacaccgctaccagttacattgcat

SEQ ID NO: 77451 - DNA, 3287 bp, Zea Mays
ccccgcctccctctcctctcactccttcccactgcagcgaagtaccgacgcctcccacagctgggagtaatcttcccacctgcctcggcgcctcctccctctctcccaacctcgcccgttctcgcctcgctgttctcctctgtcacctctccctgagaagcgtggctcctgcaaccggcctccccacctgctcctcctctacgcgccgagcaccacacgacgcgacacaaccgagcacggccgctccgccactccactgcttccgcggtggcgccgcttcactcccgtgctgcagcgagcgttacggagatccgtggggacatgaaccagggtttctcctatctgttgatatgaactaaatttatcagtggtcctattgaatatggagctactgttatatgtcattgtctcatgcaaatgatggtggctgtaagttgtgattgaggaactccattgtctgagaaatggatgaaacaccaactagttctgggcaatctgaagctagttcatgtgaacctaattggtggcctccagacttcttggagaagatacagtctgcttccataccaaggaaacatgatgttttgggtaatcaaagttcctcatcctggaaggcttctcaattactgtggtcaacaggatcttattcagggttaatccctaatggtttctattcaatcatcccggataaaaagttgaaggagactttcccaactattccatcactagatgacttgcaaactcttgaagcagatgggcttaaggctgacataattattgtagacactgagagggataagaaggttttcatgttgaagcagcttagtgctgcacttgtgaaagggttaagctctagcccagcattagtgataaagaaaattgcaggattggtctttgactgcttcaagcgccaaattcccgatgccagtccaactagaggctcgattgaagatacccatttctttggaaataaaggaccacaacttctggggcagataagacatggatcgtgccgaccccgagctattctatttaaagttcttgcagatgccgttggccttgagagtaaacttgtagttggtctaccagatgacggtgctgttggatttgtggactcttacaaacatatgtctgtggtagtttcactaaactctatggtgcttcttgtggatcttatgcgatttccaggccagctgattccgttttcagctaaggctatatttatatcgcacatatctgctgcgggtgaaagcgactcagctgaaaatgactcttgtgattctcctcttgagcccaacagcccactttatggattgtctgataaagttgaagttgaaggaattgaatcttcatcatatctatctggacgatcactgcgtaatatgatgttgagatcaaggacattctctgaggggaaattaagcacgtcatgtagtgaaccaaatatagcaaatgccttttggaggcgcagccaaaggagagttgccgaggaaccccgtggtgctagttccagccctgagcatccattaatgagagcaaggggaagatctatacttggtagtgagaagcaatcatttcaagaatacacagaatctggagctgcttcaagatggtcttgggggcccttcaacctctaatgctcgaagaataaggcgaagaagcattagcattacacctgagattggagatgacatcgtgagggcagttcgggctatgaacgaaacactaaagcaaaatcgcctccaaagggatcatgtcgaaggttcatgctcatatgttatggaagatcaaagcaacaccaatgactgcccaaataaagatgatgcatcttggagaattggtgctactgacagtgactcaagaaaccgaactggttctactcagaaggccatgtcactaccttcttcgcctcatgaatatagaggtcaagttacccaaaaaagtgatgattttataagtaaagagaagatggcattggcatggaacaaagttttccagagctccccatttcttaataaggctttgctgccttttaaggaatggaacatagatttctccgagataacaattggcacgcgggttggaataggattctttggagaagttttccgtggtatatggaatggaactgatgttgccatcaaagtgtttctagaacaggatttgacaactgaaaacatggaagatttttgcaacgagatatacatcctcagccggttacgacacccgaatgttatattgcttcttggtgcatgcattacacctccacacctgtcaatggttactgaatatatggaaatggggtcactgtactatctcattcatatgagtggtcagaaaaagaaacttagttggcgtaggaagttgaaaattattcgtgatatatgcaggggattgatgtgcatacaccgcatcaagatagttcacagggatctcaaaagtgcaaactgcctggtcaataagcattggactgtcaagatatgtgactttggtctatctcgactgatgattgatagtcctatgaccgataattcctctgctggcaccccggaatggatggcccctgaacttatacgtaatgaacctttcacagagaaatgtgatatattcagccttggtgttatcatgtgggagctgtgcacattgagtcgcccatgggaaggcatctccccagttcaagtggtgtattcagttgctaatgaagggtcacggcttgagattccggaaggacccctcggcaggttaatcgcagattgctggtctgagcctgagaatcgaccgagctgccaggagatcctaacccgtctgctagactgcgaatatactgttagctaaaatggaagctgcatgctcgttcacccaattcctgcacaggtgagaatatttcttgtataaaacctataaaaaaagcctgccgattctgcggacttgaggtcacatattgaagccctgttcttttttttttacaacggcgaccttttctctcaaaaatgtaaaaaaatgcttccccggttatagaagaacatattctggcccagaaatgtgccttatcgcagggcaagctaattctagataattagcatgccctcgaattaaccaagtgtttgttccgaagaatgttgccagtttgccattaccctgtggaatatggtaagcaagtacatggtgtgaattatgtgtgttgctcctaaacaggcggcaaataggaactagggtgctgtttggttggttccagggacctataacgtaaatggaaatagaaaacaccgctaccagttacattgcat

SEQ ID NO: 77452 - DNA, 3329 bp, Zea Mays
aagactgttccaaacaggcgcttcctgatttgccccgcctccctctcctctcactccttcccactgcagcgaagtaccgacgcctcccacagctgggagtaatcttcccacctgcctcggcgcctcctccctctctcccaacctcgcccgttctcgcctcgctgttctcctctgtcacctctccctgagaagcgtggctcctgcaaccggcctccccacctgctcctcctctacgcgccgagcaccacacgacgcgacacaaccgagcacggccgctccgccactccactgcttccgcggtggcgccgcttcactcccgtgctgcagcgagcgttacggagatccgtggggacatgaaccagggtttctcctatctgttgatatgaactaaatttatcagtggtcctattgaatatggagctactgttatatgtcattgtctcatgcaaatgatggtggctgtaagttgtgattgaggaactccattgtctgagaaatggatgaaacaccaactagttctgggcaatctgaagctagttcatgtgaacctaattggtggcctccagacttcttggagaagatacagtctgcttccataccaaggaaacatgatgttttgggtaatcaaagttcctcatcctggaaggcttctcaattactgtggtcaacaggatcttattcagggttaatccctaatggtttctattcaatcatcccggataaaaagttgaaggagactttcccaactattccatcactagatgacttgcaaactcttgaagcagatgggcttaaggctgacataattattgtagacactgagagggataagaaggttttcatgttgaagcagcttagtgctgcacttgtgaaagggttaagctctagcccagcattagtgataaagaaaattgcaggattggtctttgactgcttcaagcgccaaattcccgatgccagtccaactagaggctcgattgaagatacccatttctttggaaataaaggaccacaacttctggggcagataagacatggatcgtgccgaccccgagctattctatttaaagttcttgcagatgccgttggccttgagagtaaacttgtagttggtctaccagatgacggtgctgttggatttgtggactcttacaaacatatgtctgtggtagtttcactaaactctatggtgcttcttgtggatcttatgcgatttccaggccagctgattccgttttcagctaaggctatatttatatcgcacatatctgctgcgggtgaaagcgactcagctgaaaatgactcttgtgattctcctcttgagcccaacagcccactttatggattgtctgataaagttgaagttgaaggtacagaattgaatcttcatcatatctatctggacgatcactgcgtaatatgatgttgagatcaaggacattctctgaggggaaattaagcacgtcatgtagtgaaccaaatatagcaaatgccttttggaggcgcagccaaaggagagttgccgaggaaccccgtggtgctagttccagccctgagcatccattaatgagagcaaggggaagatctatacttggtagtgagaagcaatcatttcaagaatacacagaatctggagctgcttcaagatcagatggtcttgggggcccttcaacctctaatgctcgaagaataaggcgaagaagcattagcattacacctgagattggagatgacatcgtgagggcagttcgggctatgaacgaaacactaaagcaaaatcgcctccaaagggatcatgtcgaaggttcatgctcatatgttatggaagatcaaagcaacaccaatgactgcccaaataaagatgatgcatcttggagaattggtgctactgacagtgactcaagaaaccgaactggttctactcagaaggccatgtcactaccttcttcgcctcatgaatatagaggtcaagttacccaaaaaagtgatgattttataagtaaagagaagatggcattggcatggaacaaagttttccagagctccccatttcttaataaggctttgctgccttttaaggaatggaacatagatttctccgagataacaattggcacgcgggttggaataggattctttggagaagttttccgtggtatatggaatggaactgatgttgccatcaaagtgtttctagaacaggatttgacaactgaaaacatggaagatttttgcaacgagatatacatcctcagccggttacgacacccgaatgttatattgcttcttggtgcatgcattacacctccacacctgtcaatggttactgaatatatggaaatggggtcactgtactatctcattcatatgagtggtcagaaaaagaaacttagttggcgtaggaagttgaaaattattcgtgatatatgcaggggattgatgtgcatacaccgcatcaagatagttcacagggatctcaaaagtgcaaactgcctggtcaataagcattggactgtcaagatatgtgactttggtctatctcgactgatgattgatagtcctatgaccgataattcctctgctggcaccccggaatggatggcccctgaacttatacgtaatgaacctttcacagagaaatgtgatatattcagccttggtgttatcatgtgggagctgtgcacattgagtcgcccatgggaaggcatctccccagttcaagtggtgtattcagttgctaatgaagggtcacggcttgagattccggaaggacccctcggcaggttaatcgcagattgctggtctgagcctgagaatcgaccgagctgccaggagatcctaacccgtctgctagactgcgaatatactgttagctaaaatggaagctgcatgctcgttcacccaattcctgcacaggtgagaatatttcttgtataaaacctataaaaaaagcctgccgattctgcggacttgaggtcacatattgaagccctgttcttttttttttacaacggcgaccttttctctcaaaaatgtaaaaaaatgcttccccggttatagaagaacatattctggcccagaaatgtgccttatcgcagggcaagctaattctagataattagcatgccctcgaattaaccaagtgtttgttccgaagaatgttgccagtttgccattaccctgtggaatatggtaagcaagtacatggtgtgaattatgtgtgttgctcctaaacaggcggcaaataggaactagggtgctgtttggttggttccagggacctataacgtaaatggaaatagaaaacaccgctaccagttacattgcat

SEQ ID NO: 77453 - DNA, 3529 bp, Zea Mays
gtctaaacaatggtaaaccacagtatttagaaacatggttttgaaagactgttccaaacaggcgcttcctgatttgccccgcctccctctcctctcactccttcccactgcagcgaagtaccgacgcctcccacagctgggagtaatcttcccacctgcctcggcgcctcctccctctctcccaacctcgcccgttctcgcctcgctgttctcctctgtcacctctccctgagaagcgtggctcctgcaaccggcctccccacctgctcctcctctacgcgccgagcaccacacgacgcgacacaaccgagcacggccgctccgccactccactgcttccgcggtggcgccgcttcactcccgtgctgcagcgagcgttacggagatccgtggggacatgaaccagggtttctcctatctgttggtgaacataaagctggatccagaccacagaatgcatgatattatgcaccattgcacacgtccccagagagttcagagttcccagtcatagatgccttttactgcgtgtcttgacaaaatgaacagtacccagtgcccttgaaatgtgctaggaatataaagatatgaactaaatttatcagtggtcctattgaatatggagctactgttatatgtcattgtctcatgcaaatgatggtggctgtaagttgtgattgaggaactccattgtctgagaaatggatgaaacaccaactagttctgggcaatctgaagctagttcatgtgaacctaattggtggcctccagacttcttggagaagatacagtctgcttccataccaaggaaacatgatgttttgggtaatcaaagttcctcatcctggaaggcttctcaattactgtggtcaacaggatcttattcagggttaatccctaatggtttctattcaatcatcccggataaaaagttgaaggagactttcccaactattccatcactagatgacttgcaaactcttgaagcagatgggcttaaggctgacataattattgtagacactgagagggataagaaggttttcatgttgaagcagcttagtgctgcacttgtgaaagggttaagctctagcccagcattagtgataaagaaaattgcaggattggtctttgactgcttcaagcgccaaattcccgatgccagtccaactagaggctcgattgaagatacccatttctttggaaataaaggaccacaacttctggggcagataagacatggatcgtgccgaccccgagctattctatttaaagttcttgcagatgccgttggccttgagagtaaacttgtagttggtctaccagatgacggtgctgttggatttgtggactcttacaaacatatgtctgtggtagtttcactaaactctatggtgcttcttgtggatcttatgcgatttccaggccagctgattccgttttcagctaaggctatatttatatcgcacatatctgctgcgggtgaaagcgactcagctgaaaatgactcttgtgattctcctcttgagcccaacagcccactttatggattgtctgataaagttgaagttgaaggaattgaatcttcatcatatctatctggacgatcactgcgtaatatgatgttgagatcaaggacattctctgaggggaaattaagcacgtcatgtagtgaaccaaatatagcaaatgccttttggaggcgcagccaaaggagagttgccgaggaaccccgtggtgctagttccagccctgagcatccattaatgagagcaaggggaagatctatacttggtagtgagaagcaatcatttcaagaatacacagaatctggagctgcttcaagatcagatggtcttgggggcccttcaacctctaatgctcgaagaataaggcgaagaagcattagcattacacctgagattggagatgacatcgtgagggcagttcgggctatgaacgaaacactaaagcaaaatcgcctccaaagggatcatgtcgaaggttcatgctcatatgttatggaagatcaaagcaacaccaatgactgcccaaataaagatgatgcatcttggagaattggtgctactgacagtgactcaagaaaccgaactggttctactcagaaggccatgtcactaccttcttcgcctcatgaatatagaggtcaagttacccaaaaaagtgatgattttataagtaaagagaagatggcattggcatggaacaaagttttccagagctccccatttcttaataaggctttgctgccttttaaggaatggaacatagatttctccgagataacaattggcacgcgggttggaataggattctttggagaagttttccgtggtatatggaatggaactgatgttgccatcaaagtgtttctagaacaggatttgacaactgaaaacatggaagatttttgcaacgagatatacatcctcagccggttacgacacccgaatgttatattgcttcttggtgcatgcattacacctccacacctgtcaatggttactgaatatatggaaatggggtcactgtactatctcattcatatgagtggtcagaaaaagaaacttagttggcgtaggaagttgaaaattattcgtgatatatgcaggggattgatgtgcatacaccgcatcaagatagttcacagggatctcaaaagtgcaaactgcctggtcaataagcattggactgtcaagatatgtgactttggtctatctcgactgatgattgatagtcctatgaccgataattcctctgctggcaccccggaatggatggcccctgaacttatacgtaatgaacctttcacagagaaatgtgatatattcagccttggtgttatcatgtgggagctgtgcacattgagtcgcccatgggaaggcatctccccagttcaagtggtgtattcagttgctaatgaagggtcacggcttgagattccggaaggacccctcggcaggttaatcgcagattgctggtctgagcctgagaatcgaccgagctgccaggagatcctaacccgtctgctagactgcgaatatactgttagctaaaatggaagctgcatgctcgttcacccaattcctgcacaggtgagaatatttcttgtataaaacctataaaaaaagcctgccgattctgcggacttgaggtcacatattgaagccctgttcttttttttttacaacggcgaccttttctctcaaaaatgtaaaaaaatgcttccccggttatagaagaacatattctggcccagaaatgtgccttatcgcagggcaagctaattctagataattagcatgccctcgaattaaccaagtgtttgttccgaagaatgttgccagtttgccattaccctgtggaatatggtaagcaagtacatggtgtgaattatgtgtgttgctcctaaacaggcggcaaataggaactagggtgctgtttggttggttccagggacctataacgtaaatggaaatagaaaacaccgctaccagttacattgcat

SEQ ID NO: 77454 - DNA, 2774 bp, Zea Mays
ccttcccactgcagcgaagtaccgacgcctcccacagctgggagtaatcttcccacctgcctcggcgcctcctccctctctcccaacctcgcccgttctcgcctcgctgttctcctctgtcacctctccctgagaagcgtggctcctgcaaccggcctccccacctgctcctcctctacgcgccgagcaccacacgacgcgacacaaccgagcacggccgctccgccactccactgcttccgcggtggcgccgcttcactcccgtgctgcagcgagcgttacggagatccgtggggacatgaaccagggtttctcctatctgttggtgaacataaagctggatccagaccacagaatgcatgatattatgcaccattgcacacgtccccagagagttcagagttcccagtcatagatgccttttactgcgtgtcttgacaaaatgaacagtacccagtgcccttgaaatgtgctaggaatataaagatatgaactaaatttatcagtggtcctattgaatatggagctactgttatatgtcattgtctcatgcaaatgatggtggctgtaagttgtgattgaggaactccattgtctgagaaatggatgaaacaccaactagttctgggcaatctgaagctagttcatgtgaacctaattggtggcctccagacttcttggagaagatacagtctgcttccataccaaggaaacatgatgttttgggtaatcaaagttcctcatcctggaaggcttctcaattactgtggtcaacaggatcttattcagggttaatccctaatggtttctattcaatcatcccggataaaaagttgaaggagactttcccaactattccatcactagatgacttgcaaactcttgaagcagatgggcttaaggctgacataattattgtagacactgagagggataagaaggttttcatgttgaagcagcttagtgctgcacttgtgaaagggttaagctctagcccagcattagtgataaagaaaattgcaggattggtctttgactgcttcaagcgccaaattcccgatgccagtccaactagaggctcgattgaagatacccatttctttggaaataaaggaccacaacttctggggcagataagacatggatcgtgccgaccccgagctattctatttaaagttcttgcagatgccgttggccttgagagtaaacttgtagttggtctaccagatgacggtgctgttggatttgtggactcttacaaacatatgtctgtggtagtttcactaaactctatggtgcttcttgtggatcttatgcgatttccaggccagctgattccgttttcagctaaggctatatttatatcgcacatatctgctgcgggtgaaagcgactcagctgaaaatgactcttgtgattctcctcttgagcccaacagcccactttatggattgtctgataaagttgaagttgaaggaattgaatcttcatcatatctatctggacgatcactgcgtaatatgatgttgagatcaaggacattctctgaggggaaattaagcacgtcatgtagtgaaccaaatatagcaaatgccttttggaggcgcagccaaaggagagttgccgaggaaccccgtggtgctagttccagccctgagcatccattaatgagagcaaggggaagatctatacttggtagtgagaagcaatcatttcaagaatacacagaatctggagctgcttcaagatcagatggtcttgggggcccttcaacctctaatgctcgaagaataaggcgaagaagcattagcattacacctgagattggagatgacatcgtgagggcagttcgggctatgaacgaaacactaaagcaaaatcgcctccaaagggatcatgtcgaaggttcatgctcatatgttatggaagatcaaagcaacaccaatgactgcccaaataaagatgatgcatcttggagaattggtgctactgacagtgactcaagaaaccgaactggttctactcagaaggccatgtcactaccttcttcgcctcatgaatatagaggtcaagttacccaaaaaagtgatgattttataagtaaagagaagatggcattggcatggaacaaagttttccagagctccccatttcttaataaggctttgctgccttttaaggaatggaacatagatttctccgagataacaattggcacgcgggttggaataggattctttggagaagttttccgtggtatatggaatggaactgatgttgccatcaaagtgtttctagaacaggatttgacaactgaaaacatggaagatttttgcaacgagatatacatcctcagccggttacgacacccgaatgttatattgcttcttggtgcatgcattacacctccacacctgtcaatggttactgaatatatggaaatggggtcactgtactatctcattcatatgagtggtcagaaaaagaaacttagttggcgtaggaagttgaaaattattcgtgatatatgcagcaatattgtgcttaagccaacttgcttgggactcagtcttgagtattttacctatgaggcattaaaaaaagttggccttccataactgccactgaaattttggtttcgacctcattgccactgattcacttttagtcaagtgaaaagtagctccttggtttatgcatgtcgttgtagttctgtttatcatatggatttattcatatattttcttttttagccaccgtgaggaggctttttt

SEQ ID NO: 77455 - DNA, 1054 bp, Zea Mays
tgcggtttgagctggtcgctcgcacagagccagggccaagggagagaccaatgcagtgctttatcaagaggaataagaacaactctacattctacctctaccttggcttcacaagttcacctgtggataaagggaagtttctcatggctgctagaagatttaggcgtggtccccataccgagtacattatatctcttgatgcagaagacttatcacaagggagcaatgcatacatggggaaactgagatctgatttctgggggacaaacttcaaaatatatgatagcaagccaccatatgatggtgctaaagcatcaagtagtcgatctagtcgtcgtttcggaagcagaaggattagtccccaggtatcggctggcaattatgaagttggacaggtttcatacaaatacaacttgctcaaatccagaggccccaggagaatgtattgcactctcgaatgcccttcagcccaagagacttgggaaaactcactcaagacaaagttcaggcgccccctgggccccacaactttacgaaataaagcaccccgctggcatgagcacctgcaatgctggtgcttaaacttccatgggcgggtaacagttgcatcagtcaagaatttccagcttgtggctgctgccgaccccagtgagcctactaccaacgtggatgatgaaacggttctgctgcagtttggtaaggtcgatagcgatatgttcacaatggattaccggcaaccactctccgcgtttcaagcatttgccatcagcctcagcagctttgggaccaagctagcctgtgaatagcgatgcagtttgatgctcttcgtgtggctatatggtttgtgttggtggttgcttgcttgtttcttgttgttacgatgtgatccgttcttcgttttagttgagtatttatgtactatttgtaccacaagagatgtaataaactattgtattgtcaaacggatttgttcaaggaaattatgtgtaatgaacttttgctctagttccatgcaaaagacaaaaaaaaatgctaagcaacagtaagaaaaata

SEQ ID NO: 77456 - DNA, 1810 bp, Zea Mays
gacggaagctgcggtttgagctggtcgctcgcacagaggtcgattgcatggcttcccttatatggcgtcatcagcggttttgatacgtaccggccattcagatatttaggatatagtttgagaagtttcctggccaattcagtgtcgtagtgttttttatttgacatctgtgtacctaaatcttacaccatttctcaaaacacagccagggccaagggagagaccaatgcagtgctttatcaagaggaataagaacaactctacattctacctctaccttggcttcacaagttcacctgtggataaagggaagtttctcatggctgctagaagatttaggcgtggtccccataccgagtacattatatctcttgatgcagaagacttatcacaagggagcaatgcatacatggggaaactgagatctgatttctgggggacaaacttcaaaatatatgatagcaagccaccatatgatggtgctaaagcatcaagtagtcgatctagtcgtcgtttcggaagcagaaggattagtccccaggtatcggctggcaattatgaagttggacaggtttcatacaaatacaacttgctcaaatccagaggccccaggagaatgtattgcactctcgaatgcccttcagcccaagagacttgggaaaactcactcaagacaaagttcaggcgccccctgggccccacaactttacgaaataaagcaccccgctggcatgagcacctgcaatgctggtgcttaaacttccatgggcgggtaacagttgcatcagtcaagaatttccagcttgtggctgctgccgaccccagtgagcctactaccaacgtggatgatgaaacggttctgctgcagtttggtaaggtcgatagcgatatgttcacaatggattaccggcaaccactctccgcgtttcaagcatttgccatcagcctcagcagctttgggaccaagctagcctgtgaatagcgatgcagtttgatgctcttcgtgtggctatatggtttgtgttggtggttgcttgcttgtttcttgttgttacgatgtgatccgttcttcgttttagttgagtatttatgtactatttgtaccacaagagatgtaataaactattgtattgtcaaacggatttgttcaaggaaattatgtgtaatgaacttttgctctagttccatgcaaaagacatttcaatgtacatctgttcatggtgaagtgatacttctcccttttctataaatatcgttttgttttgtttggatactactgttactagtactgcctaggagtgtggattctttggaagcataggaacgttagtggcgctcgacctcaaaggaccggagagccgcttgcagatagggtctggctccataaaaaacaaaagggttttttaaggtagtgcctttgattttgctgatgtacttatttttatctttagtcatgttttttatcagttttgttcttctagtactattccagtgctatagaatagaaagacaaaactgagaaaaaacacgattgagagtaaaaatgagcacaccagcaattttgttggagcggctggtctacgtgctcttgatttgtggaattcataggtagttttagtttagttgttgtggtcagggtttctcttgcttgttggtttggttagcctttcttttggtttcctatttggcctctttctttgcctggggttggaggccgtttttatcgggttttcttcttattattgttgtaatgatacacaactctcttgcgtattcagaaaaaaaatgctaagcaacagtaagaaaaata

SEQ ID NO: 77457 - DNA, 1111 bp, Zea Mays
aggacggaagctgcggtttgagctggtcgctcgcacagaggtcgattgcatggcttcccttatatggcgtcatcagcggttttgagccagggccaagggagagaccaatgcagtgctttatcaagaggaataagaacaactctacattctacctctaccttggcttcacaagttcacctgtggataaagggaagtttctcatggctgctagaagatttaggcgtggtccccataccgagtacattatatctcttgatgcagaagacttatcacaagggagcaatgcatacatggggaaactgagatctgatttctgggggacaaacttcaaaatatatgatagcaagccaccatatgatggtgctaaagcatcaagtagtcgatctagtcgtcgtttcggaagcagaaggattagtccccaggtatcggctggcaattatgaagttggacaggtttcatacaaatacaacttgctcaaatccagaggccccaggagaatgtattgcactctcgaatgcccttcagcccaagagacttgggaaaactcactcaagacaaagttcaggcgccccctgggccccacaactttacgaaataaagcaccccgctggcatgagcacctgcaatgctggtgcttaaacttccatgggcgggtaacagttgcatcagtcaagaatttccagcttgtggctgctgccgaccccagtgagcctactaccaacgtggatgatgaaacggttctgctgcagtttggtaaggtcgatagcgatatgttcacaatggattaccggcaaccactctccgcgtttcaagcatttgccatcagcctcagcagctttgggaccaagctagcctgtgaatagcgatgcagtttgatgctcttcgtgtggctatatggtttgtgttggtggttgcttgcttgtttcttgttgttacgatgtgatccgttcttcgttttagttgagtatttatgtactatttgtaccacaagagatgtaataaactattgtattgtcaaacggatttgttcaaggaaattatgtgtaatgaacttttgctctagttccatgcaaaagacaaaaaaaaatgctaagcaacagtaagaaaaata

SEQ ID NO: 77458 - DNA, 1643 bp, Zea Mays
aaaaaacatacgacggactctacggtgaccacggtacttgtcagctacagcctacagttccgcggttttgagtaaacaagcgagcgaaaaaataagaagagagagaaaaagaaaaaggagaggcccgcgactgtagtgggattgtgggaagatgcctcgggatggcgcgcaggcggcgccgccaccggagcgcggcgagatggacgaggtggtagaggcggacccggatacggaggcggaggatcaggaggagaggtgggcgaggctgctgccggagctgctctccgacgtggtgcggcgcgtcgaggcgtccggcggcgagcggtggccggcgcggaaggacgtcgtctcctgcgcctgcgtgtgccgccggtggcgggaggccgccgtctccgtcgtgcgtccgccggcggagtccggcaagatcaccttcccctcctcgctcaagcaggtcgattgcatggcttcccttatatggcgtcatcagcggttttgatacgtaccggccattcagatatttaggatatagtttgagaagtttcctggccaattcagtgtcgtagtgttttttatttgacatctgtgtacctaaatcttacaccatttctcaaaacacagccagggccaagggagagaccaatgcagtgctttatcaagaggaataagaacaactctacattctacctctaccttggcttcacaagttcacctgtggataaagggaagtttctcatggctgctagaagatttaggcgtggtccccataccgagtacattatatctcttgatgcagaagacttatcacaagggagcaatgcatacatggggaaactgagatctgatttctgggggacaaacttcaaaatatatgatagcaagccaccatatgatggtgctaaagcatcaagtagtcgatctagtcgtcgtttcggaagcagaaggattagtccccaggtatcggctggcaattatgaagttggacaggtttcatacaaatacaacttgctcaaatccagaggccccaggagaatgtattgcactctcgaatgcccttcagcccaagagacttgggaaaactcactcaagacaaagttcaggcgccccctgggccccacaactttacgaaataaagcaccccgctggcatgagcacctgcaatgctggtgcttaaacttccatgggcgggtaacagttgcatcagtcaagaatttccagcttgtggctgctgccgaccccagtgagcctactaccaacgtggatgatgaaacggttctgctgcagtttggtaaggtcgatagcgatatgttcacaatggattaccggcaaccactctccgcgtttcaagcatttgccatcagcctcagcagctttgggaccaagctagcctgtgaatagcgatgcagtttgatgctcttcgtgtggctatatggtttgtgttggtggttgcttgcttgtttcttgttgttacgatgtgatccgttcttcgttttagttgagtatttatgtactatttgtaccacaagagatgtaataaactattgtattgtcaaacggatttgttcaaggaaattatgtgtaatgaacttttgctctagttccatgcaaaagacaaaaaaaaatgctaagcaacagtaagaaaaata

SEQ ID NO: 77459 - DNA, 3367 bp, Zea Mays
agggaatcgacctggatactcccgggatcccgggcaaccaaaggagccctcaaggtggagcgatgacggaagtggaggcgccgctcatcaccgaggtggagggggtggagggccgtggcttctgcggttccgcgtccaccggagggggcagctctggtctcggcagcggcgtgcggggcacgaggcagtaccaccgccgctcggacgcgctcgcctacggcgaccgctaccagaaggcggcagcactcgtcgacctcgcagaagatggtgtcggtatacccgaggatgtcttgaatgacacaaggtttgagagggccatgcgattttatttcgtgtatctccgattggattggctctggtcacttaacctatttgctttgattctattgaatttcctagagaagcctctctggtgtcaaaagtacgccccacatacttgtgatcaaagggatctttactttcttgggcagttgccatacttaagcaaaacagaatcactcatatatgaggcgctaacccttgtcattcttgtcttggatatcttctacccactttcctacgaaggtttaaatctattctggaagaactccatgaataaattgaaggttcttcttctcttcatcttagcatgcgacatacttgtgtttatgcttagttctggacctttcagagtagctccgtacattcgtgttgtgtttctaattatgacaatcagctggctagcctatgtaacatttgaggacacaccacaaggaaagaccattttcacatcatacggtacaacattatatcagatgtttgtcctgttcaccacatccaataatcctgacgtatgggtccctgcttacaagagctctcgttggaacgccctgtttattgttatttatgtgctgttaggagtttatttcctaacaaatttaattcttgctgtcatttatgatagctttaaagagcagcttgcaaaacaacttgctcaaatggactctataaggaaaagtattctacagaaggcatttgatctcatcgatactaacggtcagggttaccttaacaaagaacagtgcatatcgttactggatgagctaaacaagtacaggtcgttgcccaaaacctggagggaagattttgaactaatcttttccgagcttgatcggagtggtgatttcaaggttacctccgaggaatttgctgacctatgcaatactattgcaataaaattccagaaagaaccaccaccttcatatctggagaagtacccatctttctaccattcaccacagtgtgaaaggttgaagtcctttgtacggagtcgcctgtttgagtatattgttgtctttgttcttctggtgaacctaattgctgtcgttattgaaacaacgctagatatagagaacagctcttcacagaaagtgtggcaagaagtggaatttgtctttggatggatctatgttgtggagatggcacttaaaatattttcattaggatttggcgcctattggatggagggtcagaataaatttgattttgtgattacttggactatttttattggagagactctgacatttgccttcccatcaacgcttccttttctttctaatggagagtggattcgatatcttctccttggaaggatgttgcgtttaacaagaattttgttgcaaattcggcgtttcagagcatttgttgcaacattctttaccctcatgtctagcttgttgccatacttggggactgtgttttgcatactttgtgtatattgctccataggtttacagttttttggtggcatcgtgtatgcaggaaacttgaagttggaagaaacagatctctttgggaacgattatcttcttttcaacttcaatgactacccaagtggtatggttactctgttcaatttgttagtcatgggcaattggcaagtctggatggagagctatgcacacctgactggaagttcttggagcctggtttattttatcagtttttaccttatttcagtattactgctgcttaatctgattgtggcatttgtgttggaggcgttttttgctgagatggaactggagaaagctggagaagctgatacgcaggattctaccccacaaggaagaaacaagcggcgatccatgcgtgtgaggacgaagggtactatggttgacattcttctgcaccatatgttgagcaatgaacttgatggatctcaaaactcggattgattactcatcttaatggtaccagatcactagtactaccctgctgttcttttaactttgaccacggcttccgttatgaacacctgtctcatctatactctacagcatccgagacttcgattggtaatttatataccatacgtatagcttaaagtgacacaacggatactgacagatgcttatttatctgcaatttcagtcaatatatatacccctacattttttttttgtttttatatgtatcttctacagccttctgatttctgacagtgtggaatatgccgtattgagtagacagtattggttgtattaagcaactcgtatgaagcgaaataacagttcaaaggtgcccagtcttctcccctcccaaattattgatgaactctagatgcaattggtgattcttgcttctttggagagatgcaatgcaagtaaggctgatatacacatccatcagtctactagtaagcaactggctgaagatctatactaactggagagtagagagcatctgttagccatccaagagcatctttattagcttcccaatagcttagctctttctttttaggcgatcaccaatacctctttcacttttcctcaaataatcagggagttgtatatttctccaacaaaaaggacctacttcgttaggggaggcagccccaagtctttacatagtaggtaatagtactgacaagattagggagcgcccaagcgcaactgaatcaaggtgcctccaccttgtgtcgcacctcgaccttcatagtgaactatacggtgagcccgtgttgcatatctcgttcgaggagcgccacaacctccatgtgatggagatcgaggagcgctgcacatttgtggttaatgtcggtcgtccgtttgtgtccatggccaaccaccaccttcgcacccacggtggtcggcgacgaccgtgttagattatgtatatagttttggttacgttggacttgagttatattaggaatgaggatagagttggagtcgaacattgtattctatgagaacttatgttgtaactatgagacgatttggtggctagtttgggtggcggcgaggtcacgaggtccgtccgaatgctgttgtaactactattggaagattgcacacttttaagtttaatttaatttaat

SEQ ID NO: 77460 - DNA, 1154 bp, Zea Mays
cttgtttattgcaccaaaaaaagaggaggtcgatacaatactaaagctgctcgggctatttggattcgatatcttctccttggaaggatgttgcgtttaacaagaattttgttgcaaattcggcgtttcagagcatttgttgcaacattctttaccctcatgtctagcttgttgccatacttggggactgtgttttgcatactttgtgtatattgctccataggtttacagttttttggtggcatcgtgtatgcaggaaacttgaagttggaagaaacagatctctttgggaacgattatcttcttttcaacttcaatgactacccaagtggtatggttactctgttcaatttgttagtcatgggcaattggcaagtctggatggagagctatgcacacctgactggaagttcttggagcctggtttattttatcagtttttaccttatttcagtattactgctgcttaatctgattgtggcatttgtgttggaggcgttttttgctgagatggaactggagaaagctggagaagctgatacgcaggattctaccccacaaggaagaaacaagcggcgatccatgcgtgtgaggacgaagggtactatggttgacattcttctgcaccatatgttgagcaatgaacttgatggatctcaaaactcggattgattactcatcttaatggtaccagatcactagtactaccctgctgttcttttaactttgaccacggcttccgttatgaacacctgtctcatctatactctacagcatccgagacttcgattggtaatttatataccatacgtatagcttaaagtgacacaacggatactgacagatgcttatttatctgcaatttcagtcaatatatatacccctacattttttttttgtttttatatgtatcttctacagccttctgatttctgacagtgtggaatatgccgtattgagtagacagtattggttgtattaagcaactcgtatgaagcgaaataacagttcaaaggtgcccagtcttctcccctcccaaattattgatgaactctagatgcaattggtgattcttgcttctttggagagatgcaatgcaaggagttgtatatttctccaacaaaaaggacctacttcgttaggggaggcagccc

SEQ ID NO: 77461 - DNA, 1037 bp, Zea Mays
gacaaacttccataagtccacagttgagctatatgtgttgatgattcagagtgtactcccagagttgtcctgtcttgattcgatatcttctccttggaaggatgttgcgtttaacaagaattttgttgcaaattcggcgtttcagagcatttgttgcaacattctttaccctcatgtctagcttgttgccatacttggggactgtgttttgcatactttgtgtatattgctccataggtttacagttttttggtggcatcgtgtatgcaggaaacttgaagttggaagaaacagatctctttgggaacgattatcttcttttcaacttcaatgactacccaagtggtatggttactctgttcaatttgttagtcatgggcaattggcaagtctggatggagagctatgcacacctgactggaagttcttggagcctggtttattttatcagtttttaccttatttcagtattactgctgcttaatctgattgtggcatttgtgttggaggcgttttttgctgagatggaactggagaaagctggagaagctgatacgcaggattctaccccacaaggaagaaacaagcggcgatccatgcgtgtgaggacgaagggtactatggttgacattcttctgcaccatatgttgagcaatgaacttgatggatctcaaaactcggattgattactcatcttaatggtaccagatcactagtactaccctgctgttcttttaactttgaccacggcttccgttatgaacacctgtctcatctatactctacagcatccgagacttcgattggtaatttatataccatacgtatagcttaaagtgacacaacggatactgacagatgcttatttatctgcaatttcagtcaatatatatacccctacattttttttttgtttttatatgtatcttctacagccttctgatttctgacagtgtggaatatgccgtattgagtagacagtattggttgtattaagcaactcgtatgaagcgaaataacagttcaaaggtgcccag

SEQ ID NO: 77462 - DNA, 1392 bp, Zea Mays
gaggattcatcaccatatatatccttttactggcatggtgaaaaaaacatattatgtttgctttgtttcattgaaagccttgattgttcgatgtcttgtttctgcggaaacaaaatatataatagatgtttcttaatgcaatgatatgcagcgtatttgagaaaaagtatataatacatacaatagtgtacctttgttttaaaatataaactggaattgaaattaatgtattagcacatgatagtttgagtaaaataaaatgcaatctcttggctgtgatctttgcagctagatatagagaacagctcttcacagaaagtgtggcaagaagtggaatttgtctttggatggatctatgttgtggagatggcacttaaaatattttcattaggatttggcgcctattggatggagggtcagaataaatttgattttgtgattacttggactatttttattggagagactctgacatttgccttcccatcaacgcttccttttctttctaatggagagtggattcgatatcttctccttggaaggatgttgcgtttaacaagaattttgttgcaaattcggcgtttcagagcatttgttgcaacattctttaccctcatgtctagcttgttgccatacttggggactgtgttttgcatactttgtgtatattgctccataggtttacagttttttggtggcatcgtgtatgcaggaaacttgaagttggaagaaacagatctctttgggaacgattatcttcttttcaacttcaatgactacccaagtggtatggttactctgttcaatttgttagtcatgggcaattggcaagtctggatggagagctatgcacacctgactggaagttcttggagcctggtttattttatcagtttttaccttatttcagtattactgctgcttaatctgattgtggcatttgtgttggaggcgttttttgctgagatggaactggagaaagctggagaagctgatacgcaggattctaccccacaaggaagaaacaagcggcgatccatgcgtgtgaggacgaagggtactatggttgacattcttctgcaccatatgttgagcaatgaacttgatggatctcaaaactcggattgattactcatcttaatgcatccgagacttcgattggtaatttatataccatacgtatagcttaaagtgacacaacggatactgacagatgcttatttatctgcaatttcagtcaatatatatacccctacattttttttttgtttttatatgtatcttctacagccttctgatttctgacagtgtggaatatgccgtattgagtagacagtattggttgtattaagcaactcgtatgaagcgaaataacagttcaaaggtgcccag

SEQ ID NO: 77463 - DNA, 1453 bp, Zea Mays
ccaggcccccaatctaggtcatggacaaaagctgggagaaaggacaaccccttagaatcagcaagacaccacagcctacactcatcactggctaaagtcaaggaacacactcattacgccttcatatctggagaagtacccatctttctaccattcaccacagtgtgaaaggttgaagtcctttgtacggagtcgcctgtttgagtatattgttgtctttgttcttctggtgaacctaattgctgtcgttattgaaacaacgctagatatagagaacagctcttcacagaaagtgtggcaagaagtggaatttgtctttggatggatctatgttgtggagatggcacttaaaatattttcattaggatttggcgcctattggatggagggtcagaataaatttgattttgtgattacttggactatttttattggagagactctgacatttgccttcccatcaacgcttccttttctttctaatggagagtggattcgatatcttctccttggaaggatgttgcgtttaacaagaattttgttgcaaattcggcgtttcagagcatttgttgcaacattctttaccctcatgtctagcttgttgccatacttggggactgtgttttgcatactttgtgtatattgctccataggtttacagttttttggtggcatcgtgtatgcaggaaacttgaagttggaagaaacagatctctttgggaacgattatcttcttttcaacttcaatgactacccaagtggtatggttactctgttcaatttgttagtcatgggcaattggcaagtctggatggagagctatgcacacctgactggaagttcttggagcctggtttattttatcagtttttaccttatttcagtattactgctgcttaatctgattgtggcatttgtgttggaggcgttttttgctgagatggaactggagaaagctggagaagctgatacgcaggattctaccccacaaggaagaaacaagcggcgatccatgcgtgtgaggacgaagggtactatggttgacattcttctgcaccatatgttgagcaatgaacttgatggatctcaaaactcggattgattactcatcttaatggtaccagatcactagtactaccctgctgttcttttaactttgaccacggcttccgttatgaacacctgtctcatctatactctacagcatccgagacttcgattggtaatttatataccatacgtatagcttaaagtgacacaacggatactgacagatgcttatttatctgcaatttcagtcaatatatatacccctacattttttttttgtttttatatgtatcttctacagccttctgatttctgacagtgtggaatatgccgtattgagtagacagtattggttgtattaagcaactcgtatgaagcgaaataacagttcaaaggtgcccag

SEQ ID NO: 77464 - DNA, 2347 bp, Zea Mays
atgacggaagtggaggcgccgctcatcaccgaggtggagggggtggagggccgtggcttctgcggttccgcgtccaccggagggggcagctctggtctcggcagcggcgtgcggggcacgaggcagtaccaccgccgctcggacgcgctcgcctacggcgaccgctaccagaaggcggcagcactcgtcgacctcgcagaagatggtgtcggtatacccgaggatgtcttgaatgacacaagaagcctctctggtgtcaaaagtacgccccacatacttgtgatcaaagggatctttactttcttgggcagttgccatacttaagcaaaacagaatcactcatatatgaggcgctaacccttgtcattcttgtcttggatatcttctacccactttcctacgaaggtttaaatctattctggaagaactccatgaataaattgaaggttcttcttctcttcatcttagcatgcgacatacttgtgtttatgcttagttctggacctttcagagtagctccgtacattcgtgttgtgtttctaattatgacaatcagctggctagcctatgtaacatttgaggacacaccacaaggaaagaccattttcacatcatacggtacaacattatatcagatgtttgtcctgttcaccacatccaataatcctgacgtatgggtccctgcttacaagagctctcgttggaacgccctgtttattgttatttatgtgctgttaggagtttatttcctaacaaatttaattcttgctgtcatttatgatagctttaaagagcagcttgcaaaacaacttgctcaaatggactctataaggaaaagtattctacagaaggcatttgatctcatcgatactaacggtcagggttaccttaacaaagaacagtgcatatcgttactggatgagctaaacaagtacaggtcgttgcccaaaacctggagggaagattttgaactaatcttttccgagcttgatcggagtggtgatttcaaggttacctccgaggaatttgctgacctatgcaatactattgcaataaaattccagaaagaaccaccaccttcatatctggagaagtacccatctttctaccattcaccacagtgtgaaaggttgaagtcctttgtacggagtcgcctgtttgagtatattgttgtctttgttcttctggtgaacctaattgctgtcgttattgaaacaacgctagatatagagaacagctcttcacagaaagtgtggcaagaagtggaatttgtctttggatggatctatgttgtggagatggcacttaaaatattttcattaggatttggcgcctattggatggagggtcagaataaatttgattttgtgattacttggactatttgattcgatatcttctccttggaaggatgttgcgtttaacaagaattttgttgcaaattcggcgtttcagagcatttgttgcaacattctttaccctcatgtctagcttgttgccatacttggggactgtgttttgcatactttgtgtatattgctccataggtttacagttttttggtggcatcgtgtatgcaggaaacttgaagttggaagaaacagatctctttgggaacgattatcttcttttcaacttcaatgactacccaagtggtatggttactctgttcaatttgttagtcatgggcaattggcaagtctggatggagagctatgcacacctgactggaagttcttggagcctggtttattttatcagtttttaccttatttcagtattactgctgcttaatctgattgtggcatttgtgttggaggcgttttttgctgagatggaactggagaaagctggagaagctgatacgcaggattctaccccacaaggaagaaacaagcggcgatccatgcgtgtgaggacgaagggtactatggttgacattcttctgcaccatatgttgagcaatgaacttgatggatctcaaaactcggattgattactcatcttaatggtaccagatcactagtactaccctgctgttcttttaactttgaccacggcttccgttatgaacacctgtctcatctatactctacagcatccgagacttcgattggtaatttatataccatacgtatagcttaaagtgacacaacggatactgacagatgcttatttatctgcaatttcagtcaatatatatacccctacattttttttttgtttttatatgtatcttctacagccttctgatttctgacagtgtggaatatgccgtattgagtagacagtattggttgtattaagcaactcgtatgaagcgaaataacagttcaaaggtgcccag

SEQ ID NO: 77465 - DNA, 1650 bp, Zea Mays
atgacggaagtggaggcgccgctcatcaccgaggtggagggggtggagggccgtggcttctgcggttccgcgtccaccggagggggcagctctggtctcggcagcggcgtgcggggcacgaggcagtaccaccgccgctcggacgcgctcgcctacggcgaccgctaccagaaggcggcagcactcgtcgacctcgcagaagatggtgtcggtatacccgaggatgtcttgaatgacacaaggtttgagagggccatgcgattttatttcgtgtatctccgattggattggctctggtcacttaacctatttgctttgattctattgaatttcctagagaagcctctctggtgtcaaaagtacgccccacatacttgtgatcaaagggatctttactttcttgggcagttgccatacttaagcaaaacagaatcactcatatatgaggcgctaacccttgtcattcttgtcttggatatcttctacccactttcctacgaaggtttaaatctattctggaagaactccatgaataaattgaaggttcttcttctcttcatcttagcatgcgacatacttgtgtttatgcttagttctggacctttcagagtagctccgtacattcgtgttgtgtttctaattatgacaatcagctggctagcctatgtaacatttgaggacacaccacaaggaaagaccattttcacatcatacggtacaacattatatcagatgtttgtcctgttcaccacatccaataatcctgacgtatgggtccctgcttacaagagctctcgttggaacgccctgtttattgttatttatgtgctgttaggagtttatttcctaacaaatttaattcttgctgtcatttatgatagctttaaagagcagttggaagaaacagatctctttgggaacgattatcttcttttcaacttcaatgactacccaagtggtatggttactctgttcaatttgttagtcatgggcaattggcaagtctggatggagagctatgcacacctgactggaagttcttggagcctggtttattttatcagtttttaccttatttcagtattactgctgcttaatctgattgtggcatttgtgttggaggcgttttttgctgagatggaactggagaaagctggagaagctgatacgcaggattctaccccacaaggaagaaacaagcggcgatccatgcgtgtgaggacgaagggtactatggttgacattcttctgcaccatatgttgagcaatgaacttgatggatctcaaaactcggattgattactcatcttaatggtaccagatcactagtactaccctgctgttcttttaactttgaccacggcttccgttatgaacacctgtctcatctatactctacagcatccgagacttcgattggtaatttatataccatacgtatagcttaaagtgacacaacggatactgacagatgcttatttatctgcaatttcagtcaatatatatacccctacattttttttttgtttttatatgtatcttctacagccttctgatttctgacagtgtggaatatgccgtattgagtagacagtattggttgtattaagcaactcgtatgaagcgaaataacagttcaaaggtgcccag

SEQ ID NO: 77466 - DNA, 2475 bp, Zea Mays
cgggatcccgggcaaccaaaggagccctcaaggtggagcgatgacggaagtggaggcgccgctcatcaccgaggtggagggggtggagggccgtggcttctgcggttccgcgtccaccggagggggcagctctggtctcggcagcggcgtgcggggcacgaggcagtaccaccgccgctcggacgcgctcgcctacggcgaccgctaccagaaggcggcagcactcgtcgacctcgcagaagatggtgtcggtatacccgaggatgtcttgaatgacacaaggtttgagagggccatgcgattttatttcgtgtatctccgattggattggctctggtcacttaacctatttgctttgattctattgaatttcctagagaagcctctctggtgtcaaaagtacgccccacatacttgtgatcaaagggatctttactttcttgggcagttgccatacttaagcaaaacagaatcactcatatatgaggcgctaacccttgtcattcttgtcttggatatcttctacccactttcctacgaaggtttaaatctattctggaagaactccatgaataaattgaaggttcttcttctcttcatcttagcatgcgacatacttgtgtttatgcttagttctggacctttcagagtagctccgtacattcgtgttgtgtttctaattatgacaatcagctggctagcctatgtaacatttgaggacacaccacaaggaaagaccattttcacatcatacggtacaacattatatcagatgtttgtcctgttcaccacatccaataatcctgacgtatgggtccctgcttacaagagctctcgttggaacgccctgtttattgttatttatgtgctgttaggagtttatttcctaacaaatttaattcttgctgtcatttatgatagctttaaagagcagcttgcaaaacaacttgctcaaatggactctataaggaaaagtattctacagaaggcatttgatctcatcgatactaacggtcagggttaccttaacaaagaacagtgcatatcgttactggatgagctaaacaagtacaggttacctccgaggaatttgctgacctatgcaatactattgcaataaaattccagaaagaaccaccaccttcatatctggagaagtacccatctttctaccattcaccacagtgtgaaaggttgaagtcctttgtacggagtcgcctgtttgagtatattgttgtctttgttcttctggtgaacctaattgctgtcgttattgaaacaacgctagatatagagaacagctcttcacagaaagtgtggcaagaagtggaatttgtctttggatggatctatgttgtggagatggcacttaaaatattttcattaggatttggcgcctattggatggagggtcagaataaatttgattttgtgattacttggactatttttattggagagactctgacatttgccttcccatcaacgcttccttttctttctaatggagagtggattcgatatcttctccttggaaggatgttgcgtttaacaagaattttgttgcaaattcggcgtttcagagcatttgttgcaacattctttaccctcatgtctagcttgttgccatacttggggactgtgttttgcatactttgtgtatattgctccataggtttacagttttttggtggcatcgtgtatgcaggaaacttgaagttggaagaaacagatctctttgggaacgattatcttcttttcaacttcaatgactacccaagtggtatggttactctgttcaatttgttagtcatgggcaattggcaagtctggatggagagctatgcacacctgactggaagttcttggagcctggtttattttatcagtttttaccttatttcagtattactgctgcttaatctgattgtggcatttgtgttggaggcgttttttgctgagatggaactggagaaagctggagaagctgatacgcaggattctaccccacaaggaagaaacaagcggcgatccatgcgtgtgaggacgaagggtactatggttgacattcttctgcaccatatgttgagcaatgaacttgatggatctcaaaactcggattgattactcatcttaatggtaccagatcactagtactaccctgctgttcttttaactttgaccacggcttccgttatgaacacctgtctcatctatactctacagcatccgagacttcgattggtaatttatataccatacgtatagcttaaagtgacacaacggatactgacagatgcttatttatctgcaatttcagtcaatatatatacccctacattttttttttgtttttatatgtatcttctacagccttctgatttctgacagtgtggaatatgccgtattgagtagacagtattggttgtattaagcaactcgtatgaagcgaaataacagttcaaaggtgcccag

SEQ ID NO: 77467 - DNA, 2544 bp, Zea Mays
cctaaattcaaagcctttttgagtcactgagatattgataatgtacactgatgctcagctcaactagaaacactgagataataataaaataataataaatttgagatagctctagacatcctatgaaatatgcttcgaatgtaggtgcagatcgacgtccacaccaagagcctagaatctcaattttgcagtggaactggaagagaaacctgctcccaattccatgctgaggcagaagatggtgtcggtatacccgaggatgtcttgaatgacacaaggtttgagagggccatgcgattttatttcgtgtatctccgattggattggctctggtcacttaacctatttgctttgattctattgaatttcctagagaagcctctctggtgtcaaaagtacgccccacatacttgtgatcaaagggatctttactttcttgggcagttgccatacttaagcaaaacagaatcactcatatatgaggcgctaacccttgtcattcttgtcttggatatcttctacccactttcctacgaaggtttaaatctattctggaagaactccatgaataaattgaaggttcttcttctcttcatcttagcatgcgacatacttgtgtttatgcttagttctggacctttcagagtagctccgtacattcgtgttgtgtttctaattatgacaatcagctggctagcctatgtaacatttgaggacacaccacaaggaaagaccattttcacatcatacggtacaacattatatcagatgtttgtcctgttcaccacatccaataatcctgacgtatgggtccctgcttacaagagctctcgttggaacgccctgtttattgttatttatgtgctgttaggagtttatttcctaacaaatttaattcttgctgtcatttatgatagctttaaagagcagcttgcaaaacaacttgctcaaatggactctataaggaaaagtattctacagaaggcatttgatctcatcgatactaacggtcagggttaccttaacaaagaacagtgcatatcgttactggatgagctaaacaagtacaggtcgttgcccaaaacctggagggaagattttgaactaatcttttccgagcttgatcggagtggtgatttcaaggttacctccgaggaatttgctgacctatgcaatactattgcaataaaattccagaaagaaccaccaccttcatatctggagaagtacccatctttctaccattcaccacagtgtgaaaggttgaagtcctttgtacggagtcgcctgtttgagtatattgttgtctttgttcttctggtgaacctaattgctgtcgttattgaaacaacgctagatatagagaacagctcttcacagaaagtgtggcaagaagtggaatttgtctttggatggatctatgttgtggagatggcacttaaaatattttcattaggatttggcgcctattggatggagggtcagaataaatttgattttgtgattacttggactatttttattggagagactctgacatttgccttcccatcaacgcttccttttctttctaatggagagtggattcgatatcttctccttggaaggatgttgcgtttaacaagaattttgttgcaaattcggcgtttcagagcatttgttgcaacattctttaccctcatgtctagcttgttgccatacttggggactgtgttttgcatactttgtgtatattgctccataggtttacagttttttggtggcatcgtgtatgcaggaaacttgaagttggaagaaacagatctctttgggaacgattatcttcttttcaacttcaatgactacccaagtggtatggttactctgttcaatttgttagtcatgggcaattggcaagtctggatggagagctatgcacacctgactggaagttcttggagcctggtttattttatcagtttttaccttatttcagtattactgctgcttaatctgattgtggcatttgtgttggaggcgttttttgctgagatggaactggagaaagctggagaagctgatacgcaggattctaccccacaaggaagaaacaagcggcgatccatgcgtgtgaggacgaagggtactatggttgacattcttctgcaccatatgttgagcaatgaacttgatggatctcaaaactcggattgattactcatcttaatggtaccagatcactagtactaccctgctgttcttttaactttgaccacggcttccgttatgaacacctgtctcatctatactctacagcatccgagacttcgattggtaatttatataccatacgtatagcttaaagtgacacaacggatactgacagatgcttatttatctgcaatttcagtcaatatatatacccctacattttttttttgtttttatatgtatcttctacagccttctgatttctgacagtgtggaatatgccgtattgagtagacagtattggttgtattaagcaactcgtatgaagcgaaataacagttcaaaggtgcccag

SEQ ID NO: 77468 - DNA, 2371 bp, Zea Mays
gccgatcctgccatggagctcggtgtccgtggctgaccaccagctactagcccgaacagcagaagatggtgtcggtatacccgaggatgtcttgaatgacacaaggtttgagagggccatgcgattttatttcgtgtatctccgattggattggctctggtcacttaacctatttgctttgattctattgaatttcctagagaagcctctctggtgtcaaaagtacgccccacatacttgtgatcaaagggatctttactttcttgggcagttgccatacttaagcaaaacagaatcactcatatatgaggcgctaacccttgtcattcttgtcttggatatcttctacccactttcctacgaaggtttaaatctattctggaagaactccatgaataaattgaaggttcttcttctcttcatcttagcatgcgacatacttgtgtttatgcttagttctggacctttcagagtagctccgtacattcgtgttgtgtttctaattatgacaatcagctggctagcctatgtaacatttgaggacacaccacaaggaaagaccattttcacatcatacggtacaacattatatcagatgtttgtcctgttcaccacatccaataatcctgacgtatgggtccctgcttacaagagctctcgttggaacgccctgtttattgttatttatgtgctgttaggagtttatttcctaacaaatttaattcttgctgtcatttatgatagctttaaagagcagcttgcaaaacaacttgctcaaatggactctataaggaaaagtattctacagaaggcatttgatctcatcgatactaacggtcagggttaccttaacaaagaacagtgcatatcgttactggatgagctaaacaagtacaggtcgttgcccaaaacctggagggaagattttgaactaatcttttccgagcttgatcggagtggtgatttcaaggttacctccgaggaatttgctgacctatgcaatactattgcaataaaattccagaaagaaccaccaccttcatatctggagaagtacccatctttctaccattcaccacagtgtgaaaggttgaagtcctttgtacggagtcgcctgtttgagtatattgttgtctttgttcttctggtgaacctaattgctgtcgttattgaaacaacgctagatatagagaacagctcttcacagaaagtgtggcaagaagtggaatttgtctttggatggatctatgttgtggagatggcacttaaaatattttcattaggatttggcgcctattggatggagggtcagaataaatttgattttgtgattacttggactatttttattggagagactctgacatttgccttcccatcaacgcttccttttctttctaatggagagtggattcgatatcttctccttggaaggatgttgcgtttaacaagaattttgttgcaaattcggcgtttcagagcatttgttgcaacattctttaccctcatgtctagcttgttgccatacttggggactgtgttttgcatactttgtgtatattgctccataggtttacagttttttggtggcatcgtgtatgcaggaaacttgaagttggaagaaacagatctctttgggaacgattatcttcttttcaacttcaatgactacccaagtggtatggttactctgttcaatttgttagtcatgggcaattggcaagtctggatggagagctatgcacacctgactggaagttcttggagcctggtttattttatcagtttttaccttatttcagtattactgctgcttaatctgattgtggcatttgtgttggaggcgttttttgctgagatggaactggagaaagctggagaagctgatacgcaggattctaccccacaaggaagaaacaagcggcgatccatgcgtgtgaggacgaagggtactatggttgacattcttctgcaccatatgttgagcaatgaacttgatggatctcaaaactcggattgattactcatcttaatggtaccagatcactagtactaccctgctgttcttttaactttgaccacggcttccgttatgaacacctgtctcatctatactctacagcatccgagacttcgattggtaatttatataccatacgtatagcttaaagtgacacaacggatactgacagatgcttatttatctgcaatttcagtcaatatatatacccctacattttttttttgtttttatatgtatcttctacagccttctgatttctgacagtgtggaatatgccgtattgagtagacagtattggttgtattaagcaactcgtatgaagcgaaataacagttcaaaggtgcccag

SEQ ID NO: 77469 - DNA, 3023 bp, Zea Mays
gctgtttggagctacgggggtgtcatgcgcctgcccgcttcaactgccatggaagtagccgatcctgccatggagctcggtgtccgtggctgaccaccagctactagcccgaacagcagaagatggtgtcggtatacccgaggatgtcttgaatgacacaaggtttgagagggccatgcgattttatttcgtgtatctccgattggattggctctggtcacttaacctatttgctttgattctattgaatttcctagagaagcctctctggtgtcaaaagtacgccccacatacttgtgatcaaagggatctttactttcttgggcagttgccatacttaagcaaaacagaatcactcatatatgaggtttaaatctattctggaagaactccatgaataaattgaaggttcttcttctcttcatcttagcatgcgacatacttgtgtttatgcttagttctggacctttcagagtagctccgtacattcgtgttgtgtttctaattatgacaatcagctggctagcctatgtaacatttgaggacacaccacaaggaaagaccattttcacatcatacggtacaacattatatcagatgtttgtcctgttcaccacatccaataatcctgacgtatgggtccctgcttacaagagctctcgttggaacgccctgtttattgttatttatgtgctgttaggagtttatttcctaacaaatttaattcttgctgtcatttatgatagctttaaagagcagcttgcaaaacaacttgctcaaatggactctataaggaaaagtattctacagaaggcatttgatctcatcgatactaacggtcagggttaccttaacaaagaacagtgcatatcgttactggatgagctaaacaagtacaggtcgttgcccaaaacctggagggaagattttgaactaatcttttccgagcttgatcggagtggtgatttcaaggttacctccgaggaatttgctgacctatgcaatactattgcaataaaattccagaaagaaccaccaccttcatatctggagaagtacccatctttctaccattcaccacagtgtgaaaggttgaagtcctttgtacggagtcgcctgtttgagtatattgttgtctttgttcttctggtgaacctaattgctgtcgttattgaaacaacgctagatatagagaacagctcttcacagaaagtgtggcaagaagtggaatttgtctttggatggatctatgttgtggagatggcacttaaaatattttcattaggatttggcgcctattggatggagggtcagaataaatttgattttgtgattacttggactatttaacaaattttcttttggaaagcgcaggagagctgcgtttcattgatcaaagagagaaagaaggctccatacaaccccaactcatacgggccatgtatgagagaagggaacacacacctctaggataagcaacagaaagaaaacacacacttgacctgaccctaaccaggaactaattagttccacaaatgctgaaggcttggagatttttggctcctgccaggcaccacaggctgtgctcatccccaaacttagacaaaatcagactaacagagggagattcagccttaaaaatacaatcattctgatgcttccatatactccaggctcctaagaagatcagggagttcaatccttttcttttctccttattgatttttctcgaaacctttctccaccattcagtaaaattattatcttgttgtctgggggcccaggttgagaggttcagagtagagaacagagaaaaccagacttgtctggcaaccacacaagaagctaacagatgttggatggtctcatcctcttgatcacagaggggacatctgtttggatgagattctcttccatggttcaaaggtagtagaaccctcaaagaacgccctgtaagctgattttgaggagtatgccccatctgattctagcttccatttattggagagactctgacatttgccttcccatcaacgcttccttttctttctaatggagagtggattcgatatcttctccttggaaggatgttgcgtttaacaagaattttgttgcaaattcggcgtttcagagcatttgttgcaacattctttaccctcatgtctagcttgttgccatacttggggactgtgttttgcatactttgtgtatattgctccataggtttacagttttttggtggcatcgtgtatgcaggaaacttgaagttggaagaaacagatctctttgggaacgattatcttcttttcaacttcaatgactacccaagtggtatggttactctgttcaatttgttagtcatgggcaattggcaagtctggatggagagctatgcacacctgactggaagttcttggagcctggtttattttatcagtttttaccttatttcagtattactgctgcttaatctgattgtggcatttgtgttggaggcgttttttgctgagatggaactggagaaagctggagaagctgatacgcaggattctaccccacaaggaagaaacaagcggcgatccatgcgtgtgaggacgaagggtactatggttgacattcttctgcaccatatgttgagcaatgaacttgatggatctcaaaactcggattgattactcatcttaatggtaccagatcactagtactaccctgctgttcttttaactttgaccacggcttccgttatgaacacctgtctcatctatactctacagcatccgagacttcgattggtaatttatataccatacgtatagcttaaagtgacacaacggatactgacagatgcttatttatctgcaatttcagtcaatatatatacccctacattttttttttgtttttatatgtatcttctacagccttctgatttctgacagtgtggaatatgccgtattgagtagacagtattggttgtattaagcaactcgtatgaagcgaaataacagttcaaaggtgcccag

SEQ ID NO: 77470 - DNA, 2930 bp, Zea Mays
gctgtttggagctacgggggtgtcatgcgcctgcccgcttcaactgccatggaagtagccgatcctgccatggagctcggtgtccgtggctgaccaccagctactagcccgaacagcagaagatggtgtcggtatacccgaggatgtcttgaatgacacaaggtttgagagggccatgcgattttatttcgtgtatctccgattggattggctctggtcacttaacctatttgctttgattctattgaatttcctagagaagcctctctggtgtcaaaagtacgccccacatacttgtgatcaaagggatctttactttcttgggcagttgccatacttaagcaaaacagaatcactcatatatgaggtttaaatctattctggaagaactccatgaataaattgaaggttcttcttctcttcatcttagcatgcgacatacttgtgtttatgcttagttctggacctttcagagtagctccgtacattcgtgttgtgtttctaattatgacaatcagctggctagcctatgtaacatttgaggacacaccacaaggaaagaccattttcacatcatacggtacaacattatatcagatgtttgtcctgttcaccacatccaataatcctgacgtatgggtccctgcttacaagagctctcgttggaacgccctgtttattgttatttatgtgctgttaggagtttatttcctaacaaatttaattcttgctgtcatttatgatagctttaaagagcagcttgcaaaacaacttgctcaaatggactctataaggaaaagtattctacagaaggcatttgatctcatcgatactaacggtcagggttaccttaacaaagaacagtgcatatcgttactggatgagctaaacaagtacaggtcgttgcccaaaacctggagggaagattttgaactaatcttttccgagcttgatcggagtggtgatttcaaggttacctccgaggaatttgctgacctatgcaatactattgcaataaaattccagaaagaaccaccaccttcatatctggagaagtacccatctttctaccattcaccacagtgtgaaaggttgaagtcctttgtacggagtcgcctgtttgagtatattgttgtctttgttcttctggtgaacctaattgctgtcgttattgaaacaacgctagatatagagaacagctcttcacagaaagtgtggcaagaagtggaatttgtctttggatggatctatgttgtggagatggcacttaaaatattttcattaggatttggcgcctattggatggagggtcagaataaatttgattttgtgattacttggactatttaacaaattttcttttggaaagcgcaggagagctgcgtttcattgatcaaagagagaaagaaggctccatacaaccccaactcatacgggccatgtatgagagaagggaacacacacctctaggataagcaacagaaagaaaacacacacttgacctgaccctaaccaggaactaattagttccacaaatgctgaaggcttggagatttttggctcctgccaggcaccacaggctgtgctcatccccaaacttagacaaaatcagactaacagagggagattcagccttaaaaatacaatcattctgatgcttccatatactccaggctcctaagaagatcagggagttcaatccttttcttttctccttattgatttttctcgaaacctttctccaccattcagtaaaattattatcttgttgtctgggggcccaggttgagaggttcagagtagagaacagagaaaaccagacttgtctggcaaccacacaagaagctaacagatgttggatggtctcatcctcttgatcacagaggggacatctgtttggatgagttattggagagactctgacatttgccttcccatcaacgcttccttttctttctaatggagagtggattcgatatcttctccttggaaggatgttgcgtttaacaagaattttgttgcaaattcggcgtttcagagcatttgttgcaacattctttaccctcatgtctagcttgttgccatacttggggactgtgttttgcatactttgtgtatattgctccataggtttacagttttttggtggcatcgtgtatgcaggaaacttgaagttggaagaaacagatctctttgggaacgattatcttcttttcaacttcaatgactacccaagtggtatggttactctgttcaatttgttagtcatgggcaattggcaagtctggatggagagctatgcacacctgactggaagttcttggagcctggtttattttatcagtttttaccttatttcagtattactgctgcttaatctgattgtggcatttgtgttggaggcgttttttgctgagatggaactggagaaagctggagaagctgatacgcaggattctaccccacaaggaagaaacaagcggcgatccatgcgtgtgaggacgaagggtactatggttgacattcttctgcaccatatgttgagcaatgaacttgatggatctcaaaactcggattgattactcatcttaatggtaccagatcactagtactaccctgctgttcttttaactttgaccacggcttccgttatgaacacctgtctcatctatactctacagcatccgagacttcgattggtaatttatataccatacgtatagcttaaagtgacacaacggatactgacagatgcttatttatctgcaatttcagtcaatatatatacccctacattttttttttgtttttatatgtatcttctacagccttctgatttctgacagtgtggaatatgccgtattgagtagacagtattggttgtattaagcaactcgtatgaagcgaaataacagttcaaaggtgcccag

SEQ ID NO: 77471 - DNA, 1287 bp, Zea Mays
agggaatcgacctggatactcccgggatcccgggcaaccaaaggagccctcaaggtggagcgatgacggaagtggaggcgccgctcatcaccgaggtggagggggtggagggccgtggcttctgcggttccgcgtccaccggagggggcagctctggtctcggcagcggcgtgcggggcacgaggcagtaccaccgccgctcggacgcgctcgcctacggcgaccgctaccagaaggcggcagcactcgtcgacctcgcagaagatggtgtcggtatacccgaggatgtcttgaatgacacaaggtttgagagggccatgcgattttatttcgtgtatctccgattggattggctctggtcacttaacctatttgctttgattctattgaatttcctagagaagcctctctggtgtcaaaagtacgccccacatacttgtgatcaaagggatctttactttcttgggcagttgccatacttaagcaaaacagaatcactcatatatgaggcgctaacccttgtcattcttgtcttggatatcttctacccactttcctacgaaggtttaaatctattctggaagaactccatgaataaattgaaggttcttcttctcttcatcttagcatgcgacatacttgtgtttatgcttagttctggacctttcagagtagctccgtacattcgtgttgtgtttctaattatgacaatcagctggctagcctatgtaacatttgaggacacaccacaaggaaagaccattttcacatcatacggtacaacattatatcagatgtttgtcctgttcaccacatccaataatcctgacgtatgggtccctgcttacaagagctctcgttggaacgccctgtttattgttatttatgtgctgttaggagtttatttcctaacaaatttaattcttgctgtcatttatgatagctttaaagagcagcttgcaaaacaacttgctcaaatggactctataaggaaaagtattctacagaaggcatttgatctcatcgatactaacggtcagggttaccttaacaaagaacagtgcatatcgttactggatgagctaaacaagtacaggtcgttgcccaaaacctggagggaagattttgaactaatcttttccgagcttgatcggagtggtgatttcaaggttacctccgaggaatttgctgacctatgcaatactattgcaataaaattccagaaagaaccaccagagagctgcacattattccataaaatatggaggaaaaaacagcacaagggcc

SEQ ID NO: 77472 - DNA, 1061 bp, Zea Mays
atgacggaagtggaggcgccgctcatcaccgaggtggagggggtggagggccgtggcttctgcggttccgcgtccaccggagggggcagctctggtctcggcagcggcgtgcggggcacgaggcagtaccaccgccgctcggacgcgctcgcctacggcgaccgctaccagaaggcggcagcactcgtcgacctcgcagaagatggtgtcggtatacccgaggatgtcttgaatgacacaagaagcctctctggtgtcaaaagtacgccccacatacttgtgatcaaagggatctttactttcttgggcagttgccatacttaagcaaaacagaatcactcatatatgaggcgctaacccttgtcattcttgtcttggatatcttctacccactttcctacgaaggtttaaatctattctggaagaactccatgaataaattgaaggttcttcttctcttcatcttagcatgcgacatacttgtgtttatgcttagttctggacctttcagagtagctccgtacattcgtgttgtgtttctaattatgacaatcagctggctagcctatgtaacatttgaggacacaccacaaggaaagaccattttcacatcatacggtacaacattatatcagatgtttgtcctgttcaccacatccaataatcctgacgtatgggtccctgcttacaagagctctcgttggaacgccctgtttattgttatttatgtgctgttaggagtttatttcctaacaaatttaattcttgctgtcatttatgatagctttaaagagcagcttgcaaaacaacttgctcaaatggactctataaggaaaagtattctacagaaggcatttgatctcatcgatactaacggtcagggttaccttaacaaagaacagtgcatatcgttactggatgagctaaacaagtacaggtcgttgcccaaaacctggagggaagattttgaactaatcttttccgagcttgatcggagtggtgatttcaagggaatgaattatttcttaaagttcattagcaccatgatgaagaaaaagtag

SEQ ID NO: 77473 - DNA, 1821 bp, Zea Mays
gttttatagtcgacgaacaaaatccgtagagttcggtagtcgtgagagttagggcatattggaaaaaaaaatcaaaaatcctttctttatgtgttttttcttttaaaaccgaactgatttctataaaacacattcatgcgtgattcatacgaaattcttacgttcttagaataaaattcgaaaaaaagaccaccaaactcgaccaacggccagatatggccaccgcccaccggctgaatacctccactgctccacacgtccctgtgccgccgtatcttggtgcgctcttgctcctaggtaacatacatctctgtccctccctaggagaccgagacagcaccgtaatggcgtccccctgcggcgatgctgcggcggcagccgagctcaccagcctgcgcatcagcgaaggagctgggatccctccgcttcccggacggcgaagcgtcggcggcaatgcagctgagggagaagaggagggtgataagaacaagaaggcgaggaaggggaaggctggtacgcagcggatcgccgggtgggggctccgcgagttcagcaagatagtttctaaaaaggttgagaccaaaggacggactacttacagtgaggttgcagatgaaatttgtggagagctgaagttgactcttattggtcaagagtttgatgagaagaatatcaggaggagagtgtatgatgcttttaatgtgctaattgcactacgtgttatcacaaaagatgaaaaagagataaaatggatgggcttgtctaatttccaatatgaaaagataaagttggaggaaactcgcaaagaactcatgatcaggattaagaacaagaaaaaacttctccaggaaattgaaagacagtttgatgacctccagaatatcaagtttcgcaaccagtttctacagaggccagcagagagtgtgaatggtatctgccttccattcttattggtcaaggcatccagaaaagcaagggtggagattgagatctcagaaaactcaaagtttgctggtttggacttcaactgcgtaccattcaccttgcacgacgatgtatcaatccttgaagccatcaggtgtaatagcgtaaaaaaaagctagctacttgggcacgcttcattagatgatcggggaagtggtcgatctgttgaaagtgacgaatgatacgatcatttccctttgcacagccatcagcatgtgtaggtatataactatatatatatatatagtacgaaaacttgacctcgtcttcaaggctgcctttctggcatggtgaagctttaacctgcaaattttgcccctttttgcgcctagcgggttattaggtcaggtagattattctcatatataatgctatgtattaactacattgattatagctcagattcggaagcttgtgcacgagctttgctggttgttatgatgttcgggcgttttgcccttggcaaaccatgtgtttctctagctgcagtgactacgagaatgttatcttccgttcaatatctatatgcctcttggctcctgcggtccactgtcctggctgagaagccttgcgaaacatgtatgctaatcttttctagtccttttttgaagtacaatacaaacgacccagctcaatttataggaaactcaaggagaccaggtagtatggaccttcggccagcagattgtgcatatgactatgtaagttgttaggcattggccatcagattgtgtatatgaatatgtaaaacactgttgtagacatttatcgagtggagtttgaaacgaaatgtaagaggcttctaaagatagtctgttttttatacctggttcttgg

SEQ ID NO: 77474 - DNA, 1486 bp, Zea Mays
cacgcgtcctcttcgttgtgccctgtgtctggcggaggctcgccgccaagttcctagccgccttcgctctcctcttcgcctaccacgccgctgccgtgctcgtcttcacggcctcctcatcgtcgggttcaacggctccagcctctcgggcctactccgccccagcgccccctccccgaccgcctacctcccaacccttgcccccgcccagtgcagcagccggcctgctccgtgcgcctcatctggggcctccgagacggcaagacgaagaccatcagcgcgctcctgtggtccatgctgatcgagaaccagaggacggtgacctgcgccccgaccaacaccgctgtggcggaggtcgcgtcacgggtccttggtgttatcgaagagtccagcggcggcggtgctgcaacgaagtgtttctttggcgatgtcgtgctcttcggcaacgaggacaggatggctgtggaccggaaactagaaaatatcttcttagacacgcgtgttcgccgtctgcgtcagtgcttgatgccaatcacagggtggacaaagtccctgagctccatgattgcacttcaggaggattcgatggttccgtatgaaaggtatgatgaggccatacaaggttgtgtattggatttggtttcagaagaaatcaagctaagaaatgtaacagttgtctgttctttacggacgatggatgacaaaaaagttaaggagatgcagaaaagatttactggaagtgcagaaaaaagcacgagaagtagagcgagagaaaatgtcattcgagacctacttccagagtaactacaagaagctcgctaaggatttgcgcacttgtgtggagactttcgtcgatgatcttcccagatccgcaacatcagaagaaaacttttgctgcatggcggaggtgctgctcttgctcgatgcgtttggagtgctcgtgcagtctgaaccagtcgaacagcttcaagcgctgttcaaaaggcactccgatgttaggttccggctgagggaggcgatatcctcgtgtcttcgcaagctatggctcctttcttctaactttaagcttcccgaaatcttcgagctcgtaccgcctgctctacatgcagaaggcccagcccttggaggtccctgtcgtggacgaggccgcgcagcttaaggagtgcgagtcactgatacccctgcagctgcctggcgtccgtcacgctgttctcatcgatgatgagtacctgcttcccgcattggtcaaaagcaagctgaattcttgttgacttcagctcgacgtcgattaccgagagaacgatcaatcagtcgagtattgaagaagaacagtgaaaaacagaggattttctttggacaggccaaaccgggcgacctgcctcctttttgtgtttttctatttattcactggactacacaacgcattacaattactcagctccaaacttcccacgatctccatactcacgaccctggaaactcggaa

SEQ ID NO: 77475 - DNA, 538 bp, Zea Mays
agtttttcactttaatcatcaaaaccctcttgaaaactaagaggatgatttcattcagggggagttttgtttattcaaaggaaagacatttgaaacagggggagaaaatttcaaaacttgaaaatgccttgcaaactcttattcatttacctttgactatttgcaaaagaactttgaaaacatttacaaaagatttttgcaaatacaagacatatggcgcaaaatgtggtccaatatgccaaaaacaaaacaaacaatccatgcgtatcatgaaccagaagccgaagctgctgcttcataagagagtttaatctggtccaaggtgttaatttgcaaaagattagaatcttttcatgtgacctttaaaacagatgggcaatttaatgcattattccactaattatggtatccatctgcaaaggcatacaagtgtaagaaaaaggttctctaaagaatagagataacatcactaatttcaaaacgcagttcacattttgccttaaatgaagaaaactggagccaagcaaacagatgagtg

SEQ ID NO: 77476 - DNA, 1187 bp, Zea Mays
cccagtagtgtccattcggtgtctgtctgtccactctcgtgtcctcacgccaggtccagtcaacctgccccagcgccatcccttatttaagtgtttgtccagggagccctgttgtctcaagctttagttggatccttgggcatctctgtgaaggtgtgtacaagcctgagttcatctccttagcctccgcgtcggctttgttcagttcatcaagtgccattccattgtctggtactctggtgccacagcaaccatccttccacctcgccatggtcagagtatctcgagaagtttgttacccagaacggagttgtgccaccgcagaccggagccgtgaacagcctctgcgttgaccgaacaactcacgctttctccggtcgattccttgtgagcaccaaagtttagaattcccagaagaagatgataaaattcaagaagtggtttctgaagaggagtctgcttcagtgcctgctcatcaagtgatgggagccatctaactggggtttaatagagggatttagacctccgtctctgcaacaaaggtgatgaggagttctctatgtgttcatgaggctggagggcgcttccagttctagatgaggattagttaggcttgtgtataaggtttggagggttcctaccttcctgctagtgtaataagttatgcactttgagtatatcaggacttgtaataaatgtaactcttcctatgtaataaccttcagttttagaaatgaaaagaatatttttgtaaaagtcttccgctcttatctccgaactgtgtgtatcgaatgtgattactgtaatatgcatgtatggtgggagatccttgggatgatgagttcaagttgttgaactcgtgatagccttcttaagttacctggtacacgtgcatagccatctgaggccatcaaggcaaggattggtgcatgtgggctcgataacttgggagggctgccacactcataagtatacctttgatcatgtctcttttatatatgctatgactaatgtgttttcaagtgtatttcaaaccaagtcataggtatattgaaagggaattggagtcttcggcgaagacaaggcttccactccactctccgtctttggtataatcctcactcatatgtttcatttgccaaaggggagaaaaatagtcaacaaaagggctctaatgattccctttt

SEQ ID NO: 77477 - DNA, 2353 bp, Zea Mays
cccagtagtgtccattcggtgtctgtctgtccactctcgtgtcctcacgccaggtccagtcaacctgccccagcgccatcccttatttaagtgtttgtccagggagccctgttgtctcaagctttagttggatccttgggcatctctgtgaaggtgtgtacaagcctgagttcatctccttagcctccgcgtcggctttgttcagttcatcaagtgccattccattgtctggtactctggtgccacagcaaccatccttccacctcgccatggtcagagtatctcgagaagtttgttacccaggtgaaccttgttcggtaatctccctagattagtgaaactcaccgaactgggtttcctaattctagagtcttgtgctgctcagaacggagttgtgccaccgcagaccggagccgtgaacagcctctgcgttgaccgaacaactcacgctttctccggtcgattccttgtgagcaccaaagtttagaattcccagaagaagatgataaaattcaagaagtggtttctgaagaggagtctgcttcagtgcctgctcatcaagtgatgggagccatctaactggggtttaatagagggatttagacctccgtctctgcaacaaaggcaagccccggtgcatttaccccttccttgtatttttaaaaagacttttatacatttaagtctagtgaaatgagcattaagtttataggagttgcttggaaattattggatgcattgcctaccttgatatccatacctttatagatacttctggtgaagtatcaaaatatgatttacaaaaatgcttagctctgcttagatcttgtggatagaggttgtcttttgcattaatgcctagctcaggggttatcatgaggaaggatggcttctacctgcaagaatattttcattgggagcatggtgggatcttactgcaaagttctctataatgtgctcttttcatcctaaggaacacaaacaattctaaggatggaagtacttaaatcgggacttgggctaggaacaagtgatgttctacccaggttaattaaggattggatgcgtatgtaggcctgtatgatcaaggactatcttaactggccacatgccctggatatgggacagggtaagcttgaacccggttattccatacatgaaaagacaatcgcgcactgggagtggagagatggcgagagtggcacgtaccctcttggcaaaggaccgcctaaaaggggtggtgcgctctcgggtggcgcggacctgttcatgcagtagaggatccgtgggaacggtagacatatgcaagggttaagtgctacatatgtcgtgtggttagagatcctcagctgagtaaatcgattcggatcgccgttatatccccggagagtggagacttgatcgctgccctgcaacctaagtcaggatgtgaacctcatgaataaaaatgatgttgtattgatgagatggtgagattagactagatgcaaacagagtctattaatatttaatctggcgttaaaatattgaaagtaaggactcactttagtaagctatttctgcaaaagtatctaagttgattcttgctaaagccttttccttgattcctatttaaccggcatatccttgacagtcatttttccttagtcgggtaagacttgcgaaagtacactccgtactcagggttttcgaacccatgttgttgtaggtgatgaggagttctctatgtgttcatgaggctggagggcgcttccagttctagatgaggattagttaggcttgtgtataaggtttggagggttcctaccttcctgctagtgtaataagttatgcactttgagtatatcaggacttgtaataaatgtaactcttcctatgtaataaccttcagttttagaaatgaaaagaatatttttgtaaaagtcttccgctcttatctccgaactgtgtgtatcgaatgtgattactgtaatatgcatgtatggtgggagatccttgggatgatgagttcaagttgttgaactcgtgatagccttcttaagttacctggtacacgtgcatagccatctgaggccatcaaggcaaggattggtgcatgtgggctcgataacttgggagggctgccacactcataagtatacctttgatcatgtctcttttatatatgctatgactaatgtgttttcaagtgtatttcaaaccaagtcataggtatattgaaagggaattggagtcttcggcgaagacaaggcttccactccactctccgtctttggtataatcctcactcatatgtttcatttgccaaaggggagaaaaatagtcaacaaaagggctctaatgattccctttt

SEQ ID NO: 77478 - DNA, 2260 bp, Zea Mays
cccagtagtgtccattcggtgtctgtctgtccactctcgtgtcctcacgccaggtccagtcaacctgccccagcgccatcccttatttaagtgtttgtccagggagccctgttgtctcaagctttagttggatccttgggcatctctgtgaaggtgtgtacaagcctgagttcatctccttagcctccgcgtcggctttgttcagttcatcaagtgccattccattgtctggtactctggtgccacagcaaccatccttccacctcgccatggtcagagtatctcgagaagtttgttacccagaacggagttgtgccaccgcagaccggagccgtgaacagcctctgcgttgaccgaacaactcacgctttctccggtcgattccttgtgagcaccaaagtttaggtatgtcactaatgttccccacgacatttggttgaattctaccactgtctgatattggaaactaggtgtaaaatttgctcaaagataagctgtcagggttgttggaattcagacttagtttaattcagcatctgaatttctgtgtttggattgctattgacttagtttattcagagctgaaaatctgaacatcagtgaatggtaccaagtttagagctttattgtgacccatcctagtggttttggactaagaattatttagcaaaagtgtagagcaaagtgaagtaaataagtttactaaagtaagatagacatggttctacagaaatttgggagtaaaatacctccaaaccttccctgtcagactaggagtgggctgtatcagttcactaaaaatcagtttcagggtgttgttcaaccaattttagagctctttagaatttaatttctagagttatgagtcatactccatgtgtaaaggttggataccatagtaaggtgaataagttttctaaagagaaatggactgggtgttacacagggttggcagtaattggtgtcctaattacccctgccaggcatatggaatgcagactgttcagtcgactgttattatggttcagtgagtttttaaccacctttggagctctgtggtgattacttcaagtagaattgggttagggattccacagcaagatgggagaccatatcatgcacaacaaatttgatgcaaagagttggcttgctaccgtagagaatttagagaaaagtaagtgccaaaaccctctgtcaggcttagtggtgtgctgtttcagaaaactgaaaacaaatttagtggaaggtggctgatttagtaaactagtgtctatattgggagtaactgaagaatatcacctcatccttgctggctgccatagtatgattgagttgtgatattagagtatttagctctcttaaggttttgttagtttttgtgtgcacctttagcgaggtgtaagtcttgtgatgctttttagtattttcttttcaagttgcatcagcataagcatttatgttcatatctttacatgtagaattcccagaagaagatgataaaattcaagaagtggtttctgaagaggagtctgcttcagtgcctgctcatcaagtgatgggagccatctaactggggtttaatagagggatttagacctccgtctctgcaacaaaggtgatgaggagttctctatgtgttcatgaggctggagggcgcttccagttctagatgaggattagttaggcttgtgtataaggtttggagggttcctaccttcctgctagtgtaataagttatgcactttgagtatatcaggacttgtaataaatgtaactcttcctatgtaataaccttcagttttagaaatgaaaagaatatttttgtaaaagtcttccgctcttatctccgaactgtgtgtatcgaatgtgattactgtaatatgcatgtatggtgggagatccttgggatgatgagttcaagttgttgaactcgtgatagccttcttaagttacctggtacacgtgcatagccatctgaggccatcaaggcaaggattggtgcatgtgggctcgataacttgggagggctgccacactcataagtatacctttgatcatgtctcttttatatatgctatgactaatgtgttttcaagtgtatttcaaaccaagtcataggtatattgaaagggaattggagtcttcggcgaagacaaggcttccactccactctccgtctttggtataatcctcactcatatgtttcatttgccaaaggggagaaaaatagtcaacaaaagggctctaatgattccctttt

SEQ ID NO: 77479 - DNA, 3746 bp, Zea Mays
aagggtgatgtgctgttcttttcctgaaacatgaacaacagctgcctacgttttattatgtgagggaggggaacagccctctcggatggaaccacttcctgatggctcaatgaacccaagacgaagtgcgattaagcaagttgctagtggacggtttggagtttccagctattacctgactaatgcagatgagctgcagataaaaatggcccagggtgccaagcctggtgaaggtggtgagcttccaggccacaaggttattggtgacattgctgtcacaagacattccacagctggtgtaggactgatcagtccacctccgcatcatgatatttattcgattgaggatcttgcacagcttatacatgatcttaagaattcaaatcctggagcccgtatcagtgtcaaactagtttctgaggctggtgtgggagttgttgctagtggtgttgtaaaaggacatgcagaccatgttcttatatctggccatgatggtggcacgggagcttcaagatggacaggtatcaagaacgctggacttccatgggaacttgggttggctgagacacatcaaactctagtagcaaatgggcttcgtggtcgagctgttctgcaaacagatggacagttgaagactggtagagatgttgctgttgcttgcttgcttggtgcagaggaatttggttttagcactgcaccactgatcacactcggttgtattatgatgcgaaaatgccacatgaacacttgtcctgttggtatagctactcaagacccagtgcttcgagaaaagtttgctggagaaccagagcatgtcattaacttttttttcatgcttgctgaggagctaagagaaatcatggcaaaccttgggttccgcaccattactgaaatggttggacgttctgatatgcttgaggttgatccagaagtagtgaagactaatgagaaacttgagaacattgatctctcactaatcttgaaaccagcttcagagattcgtccaggtgttgctcagtactgtgttgagaagcaagaccatggcctagacatggcattagataacaaactaatagatctgtcaagaactgctattgaaaagcaagttcgtgttttcatcgagactccaattcagaacacgaaccgagcagttggaactatgctcagtcatgaagtcacaaaacgttatcacatcaatggattgcctgctggtacaattcatgtgaagtttactggaagtgctggtcaaagctttggtgcttttctttgtcctggagtcactcttgaactggaaggagacagcaatgattatcttggtaagggattatctggtgggaaaattgttgtgtacccaccaaggaacagttcatttagtccagaggacaatattgtcattggtaatgtggctttatatggtgctaccatgggagaggcatatttcaatggtatggcagcagaaaggttttgtgtccgcaactcaggtgctcaagcagtggttgaaggaattggagatcatggatgtgagtacatgactggaggcactgtggttatccttgggaaaactgggcggaactttgctgctggcatgagtggaggcattgcctatgtttatgatgttgatgggaaattcagtgctcgctgcaacaatgagttagttgatctatatcatgtggaggaagaggatgacatcatcacattgaaaatgatgattgagcaacatcgtcgcaacactgagagtgttttggctagagacatactctccgattttgataatcttcttccaaaatttgtaaaagtatatccaagggactataagagggttttagaaaacatgaagttggaaaagagtgttgctaatcatgcaaaggagcctaagatggtaaatggaatatctgtgacgactaagaaagtacaacctgatcagtcagcaagccggccaacacgtgttgccaatgccaaaaagtaccgaggttttattacatatgagcgagagagtatttcttacagagatccaaaagagcgtgttaaagattggaaggaagttgcaatcgaatcaacacctggtccactattaaatacacaatctgctcgttgcatggactgtggtactcctttctgtcatcaggaaagctcaggtgctggctgtcctcttggaaataagatcccagaattcaatgaattagttcaccagaacagatggcgcgaagcattggatcgactacttgagacaaacaacttccctgaatttactggacgagtatgccctgctccttgtgaggggtcatgtgttcttgggattattgagaatccggtgtctatcaaaagtatagaatgtgcaatcatagacaaaggtttcgaagagggatggatgattccacgacctccacttcaaagaacaggaaggaaggtggccattgttggcagtggaccagctggtttggctgctgcggatcaactaaacaaaatggggcattttgtaactgtgttcgaacgtgcagaccgaattggaggtttaatgatgtacggcgttccaaacatgaagactgacaagattggcattgtccagcgccgtgttaacctaatggcagaagagggtgtcacatttgtggtgaatgccaatgttggtagtgatcctctgtactcaattgaacgtctacgttctgagaatgatgcagttattttggcttgcggagcaacaaaaccaagagatctcaccatccctggacgcgagctatctggagttcattttgcaatggaatttctccatgcaaataccaaaagtttactcgacagcaacctggaggatggtaaatatatatccgcccgcgggaaaaaggtggtggttattggtggaggtgatacaggaacagattgcattggcacatctattaggcatggttgcaccagccttgtaaatcttgaactcctgacaaaaccaccaagcaatagagctgctgataacccatggccccagtggccaagaattttccgtgttgactatgggcatcaagaagctgctaccaagtttggaaaggatccaagaacttatgaagtcttgacaaagcgttttattggcgatgaaaatggcaaggtgaaggctcttgagttagtgcgtgtgaagtgggagaaagtagatggaagatttcaactcaaggagatccaaggatcagaagagattattgaagctgatctcgtcctcctagctatgggattcttgggtcctgaagcgtctatcgctgagaaactgggtttggagaaggacaacagatcaaacttcaaagcgcagtttggagacttcgctaccagtgttgatggtgtgttcgcagccggggactgcaggcgtggacaatcactggtggtatgggccatcacggaggggcggcaggctgctgcagcggtagacaagtacatatcaaggcatgatcagaatgtcgcaggcgacatcactccctttggggcagggctcgttcagccggttggagcataaaaaaaacatagaccgaggcatgttttaggttctcgtcagtggttcctcacagcaaattttgttcttgtatattttgacgatagataaacagttgaaagttttggtgtctattgtttctttttcttctccggttattatgttttgcgtgtctgcatgtggttttctagtccaaaatgtacagttttccttttattaaatagatgtaaatttggtgggtgatatggcgatcattttgtgtgtatatgaaagcgaaattgag

SEQ ID NO: 77480 - DNA, 5876 bp, Zea Mays
cccaactgttttgatgaaattctgtgctactgatgctttctttttggttcactcaaggttctccacaaacacctttcccagctgggaccgtgcgcaaccaatgcgtgttttaggtcataatggagagatcaatacccttagaggaaacaagaattggatgacagcacgtgagggtctcttagaggcggagaagcttggattatcaaaggagcagcttgcaagaattctgccaattgttgatgctacctcttctgattctggcgcattcgataatgttcttgagcttcttgtccgtggtgggcgaagcctgctagaagccgtgatgatgatgatccctgaggcatggcagaacgatggaaacatggatcctgagaagaaagctctctacgagttcttgtcagcacttatggagccttgggatggacctgctctaatatcttttactgatggtcgttaccttggagctaccctggaccgtaacggtttgaggcctggtcggttttatgtgacgcacagtgggcgtgtgatcatgggtagtgaggtcggtgttgttgatgttcctcctgaagacgtgctgagaaaaggcaggttaaaccctggaatgatgctattggttgattttgagaatcacactgtagtggatgatgaagctctgaaagcacaatactctaaagctcacccgtatggggaatggctcaagagacaaaagatatatctcaaggatattgtagaatcagtaccagaaaccgatagggttgctccaagcatttctagctcacttcctgcaaagaatgagaacaaggaccatgttggtatcaatgggattttgaccccactgaaggcttttgggtacacggtggaagccctggacatgttgctactgccaatggctaaggatggagtggaagctctcggttccatgggaaatgatacaccacttgcggtgatgtcaaacagggagaagttgacttttgagtacttcaagcagatgtttgcacaagttacaaaccctccgattgaccctattagagagaaaattgttacatctatggagtgtatgattggccccgaaggcgacttgttggaaacaactgaaaaacaatgcaaccgtctttcacttaaaggtcccttggtttctattgatgaaatggaggctattaaaaagatgaattatcgaggttggcgaagcaaagtgcttgacataacatacccaaaaaagtctgggaggaagggcttggaagaaactttgaacagaatgtgtgctgaagctcgtgaagccatacgcgagggatatactattttggttctctcagatagaggattttcctcagaccgtgttgctgccagttctctcttagcagtgggagcagtgcatcagcaccttgttgcaaatcttgagaggacacgcataggattgttggttgagtcagctgaacctcgtgaagtgcatcatttctgcaccctgcttggatttggtgctgatgctatatgcccttatttggctattgaagcaatttggtgcttgcagaatgatgggaagattcctcctaatggtgatggacaacccaactcaaaggaagagctggtgaagaagtatttctatgcttctaactatggaatgatgaaagttcttgcgaagatgggaatatccacccttgcatcctacaaaggtgcacagatttttgaagctcttggtctttcttccgaagtgattggcaagtgtttcgaaggcacacctagcaggattgagggtgcaacatttgaaatgcttgcacgagatgcacttcgtcttcatgagttagctttcccatcaagaacccctccagctggcagtgcagatgcaaaggcccttcccaacccaggggattaccactggaggaaaaatggtgaagttcatctcaacgacccacttgcaatgggaaaactacaagaagcagctagagtcaacagccgggcagcatacaaggaatattcgaaacgaattcaggagctcaacaaggcgtgcaatttacgtggcatgctgaaatttaaagatatttctgacaagatatctttggatgatgttgaacctgcaagtgagatagtgaaacgcttttgtactggagcaatgagttatggttctatttcattagaagcacatactgcccttgctattgccatgaacaaacttggaggaaaatctaatacaggtgagggaggggaacagccctctcggatggaaccacttcctgatggctcaatgaacccaagacgaagtgcgattaagcaagttgctagtggacggtttggagtttccagctattacctgactaatgcagatgagctgcagataaaaatggcccagggtgccaagcctggtgaaggtggtgagcttccaggccacaaggttattggtgacattgctgtcacaagacattccacagctggtgtaggactgatcagtccacctccgcatcatgatatttattcgattgaggatcttgcacagcttatacatgatcttaagaattcaaatcctggagcccgtatcagtgtcaaactagtttctgaggctggtgtgggagttgttgctagtggtgttgtaaaaggacatgcagaccatgttcttatatctggccatgatggtggcacgggagcttcaagatggacaggtatcaagaacgctggacttccatgggaacttgggttggctgagacacatcaaactctagtagcaaatgggcttcgtggtcgagctgttctgcaaacagatggacagttgaagactggtagagatgttgctgttgcttgcttgcttggtgcagaggaatttggttttagcactgcaccactgatcacactcggttgtattatgatgcgaaaatgccacatgaacacttgtcctgttggtatagctactcaagacccagtgcttcgagaaaagtttgctggagaaccagagcatgtcattaacttttttttcatgcttgctgaggagctaagagaaatcatggcaaaccttgggttccgcaccattactgaaatggttggacgttctgatatgcttgaggttgatccagaagtagtgaagactaatgagaaacttgagaacattgatctctcactaatcttgaaaccagcttcagagattcgtccaggtgttgctcagtactgtgttgagaagcaagaccatggcctagacatggcattagataacaaactaatagatctgtcaagaactgctattgaaaagcaagttcgtgttttcatcgagactccaattcagaacacgaaccgagcagttggaactatgctcagtcatgaagtcacaaaacgttatcacatcaatggattgcctgctggtacaattcatgtgaagtttactggaagtgctggtcaaagctttggtgcttttctttgtcctggagtcactcttgaactggaaggagacagcaatgattatcttggtaagggattatctggtgggaaaattgttgtgtacccaccaaggaacagttcatttagtccagaggacaatattgtcattggtaatgtggctttatatggtgctaccatgggagaggcatatttcaatggtatggcagcagaaaggttttgtgtccgcaactcaggtgctcaagcagtggttgaaggaattggagatcatggatgtgagtacatgactggaggcactgtggttatccttgggaaaactgggcggaactttgctgctggcatgagtggaggcattgcctatgtttatgatgttgatgggaaattcagtgctcgctgcaacaatgagttagttgatctatatcatgtggaggaagaggatgacatcatcacattgaaaatgatgattgagcaacatcgtcgcaacactgagagtgttttggctagagacatactctccgattttgataatcttcttccaaaatttgtaaaagtatatccaagggactataagagggttttagaaaacatgaagttggaaaagagtgttgctaatcatgcaaaggagcctaagatggtaaatggaatatctgtgacgactaagaaagtacaacctgatcagtcagcaagccggccaacacgtgttgccaatgccaaaaagtaccgaggttttattacatatgagcgagagagtatttcttacagagatccaaaagagcgtgttaaagattggaaggaagttgcaatcgaatcaacacctggtccactattaaatacacaatctgctcgttgcatggactgtggtactcctttctgtcatcaggaaagctcaggtgctggctgtcctcttggaaataagatcccagaattcaatgaattagttcaccagaacagatggcgcgaagcattggatcgactacttgagacaaacaacttccctgaatttactggacgagtatgccctgctccttgtgaggggtcatgtgttcttgggattattgagaatccggtgtctatcaaaagtatagaatgtgcaatcatagacaaaggtttcgaagagggatggatgattccacgacctccacttcaaagaacaggaaggaaggtggccattgttggcagtggaccagctggtttggctgctgcggatcaactaaacaaaatggggcattttgtaactgtgttcgaacgtgcagaccgaattggaggtttaatgatgtacggcgttccaaacatgaagactgacaagattggcattgtccagcgccgtgttaacctaatggcagaagagggtgtcacatttgtggtgaatgccaatgttggtagtgatcctctgtactcaattgaacgtctacgttctgagaatgatgcagttattttggcttgcggagcaacaaaaccaagagatctcaccatccctggacgcgagctatctggagttcattttgcaatggaatttctccatgcaaataccaaaagtttactcgacagcaacctggaggatggtaaatatatatccgcccgcgggaaaaaggtggtggttattggtggaggtgatacaggaacagattgcattggcacatctattaggcatggttgcaccagccttgtaaatcttgaactcctgacaaaaccaccaagcaatagagctgctgataacccatggccccagtggccaagaattttccgtgttgactatgggcatcaagaagctgctaccaagtttggaaaggatccaagaacttatgaagtcttgacaaagcgttttattggcgatgaaaatggcaaggtgaaggctcttgagttagtgcgtgtgaagtgggagaaagtagatggaagatttcaactcaaggagatccaaggatcagaagagattattgaagctgatctcgtcctcctagctatgggattcttgggtcctgaagcgtctatcgctgagaaactgggtttggagaaggacaacagatcaaacttcaaagcgcagtttggagacttcgctaccagtgttgatggtgtgttcgcagccggggactgcaggcgtggacaatcactggtggtatgggccatcacggaggggcggcaggctgctgcagcggtagacaagtacatatcaaggcatgatcagaatgtcgcaggcgacatcactccctttggggcagggctcgttcagccggttggagcataaaaaaaacatagaccgaggcatgttttaggttctcgtcagtggttcctcacagcaaattttgttcttgtatattttgacgatagataaacagttgaaagttttggtgtctattgtttctttttcttctccggttattatgttttgcgtgtctgcatgtggttttctagtccaaaatgtacagttttccttttattaaatagatgtaaatttggtgggtgatatggcgatcattttgtgtgtatatgaaagcgaaattgag

SEQ ID NO: 77481 - DNA, 6610 bp, Zea Mays
cgacgctcccacaccaatccacaacaccgccgcgccgcccgccgccgctggggacgagcgtggggcgagcaaccaaatctaagacaccgatccccgacgcgcaggccgcgaagctagcggcggagaaaagatcggagccacaacgcggtcgtgagcccgcagccaccggttccgcgaggctagacggagacagaggttaatgatgctattgaaatgcttgagagaatggcgcaccgtggtgcctgtggctgcgaaaagaacacaggagacggtgccggcattatggtcgctctaccacatgacttcttcaaagaggtcacaaaggatgctgggtttgagctacccccgccaggcgactatgctgttggaatgtttttcatgccaaccgatgaaaagcgtcgcgagaagggcaaagctgagtttaagaaggtcgcggaatcactgggacatgtaatactcgggtggcgtcctgttcctactgacaactcagacttgggtgaatctgcactcgagactgagccagtcattgagcaggttttcgttaccaagagttcaagatcagaggctgagtttgagcaacagctatatatccttaggagactctcaatcatctctgtccgagcctctctgaacattaagcgtggaggagagagggatttctacatgtgctctctatcttcaaggactattgtttacaagggccagcttaaaccgtgccagcttaaggggtactactatgctgacctaggtcaagaaaacttcatgagttatatggctctggttcactcaaggttctccacaaacacctttcccagctgggaccgtgcgcaaccaatgcgtgttttaggtcataatggagagatcaatacccttagaggaaacaagaattggatgacagcacgtgagggtctcttagaggcggagaagcttggattatcaaaggagcagcttgcaagaattctgccaattgttgatgctacctcttctgattctggcgcattcgataatgttcttgagcttcttgtccgtggtgggcgaagcctgctagaagccgtgatgatgatgatccctgaggcatggcagaacgatggaaacatggatcctgagaagaaagctctctacgagttcttgtcagcacttatggagccttgggatggacctgctctaatatcttttactgatggtcgttaccttggagctaccctggaccgtaacggtttgaggcctggtcggttttatgtgacgcacagtgggcgtgtgatcatgggtagtgaggtcggtgttgttgatgttcctcctgaagacgtgctgagaaaaggcaggttaaaccctggaatgatgctattggttgattttgagaatcacactgtagtggatgatgaagctctgaaagcacaatactctaaagctcacccgtatggggaatggctcaagagacaaaagatatatctcaaggatattgtagaatcagtaccagaaaccgatagggttgctccaagcatttctagctcacttcctgcaaagaatgagaacaaggaccatgttggtatcaatgggattttgaccccactgaaggcttttgggtacacggtggaagccctggacatgttgctactgccaatggctaaggatggagtggaagctctcggttccatgggaaatgatacaccacttgcggtgatgtcaaacagggagaagttgacttttgagtacttcaagcagatgtttgcacaagttacaaaccctccgattgaccctattagagagaaaattgttacatctatggagtgtatgattggccccgaaggcgacttgttggaaacaactgaaaaacaatgcaaccgtctttcacttaaaggtcccttggtttctattgatgaaatggaggctattaaaaagatgaattatcgaggttggcgaagcaaagtgcttgacataacatacccaaaaaagtctgggaggaagggcttggaagaaactttgaacagaatgtgtgctgaagctcgtgaagccatacgcgagggatatactattttggttctctcagatagaggattttcctcagaccgtgttgctgccagttctctcttagcagtgggagcagtgcatcagcaccttgttgcaaatcttgagaggacacgcataggattgttggttgagtcagctgaacctcgtgaagtgcatcatttctgcaccctgcttggatttggtgctgatgctatatgcccttatttggctattgaagcaatttggtgcttgcagaatgatgggaagattcctcctaatggtgatggacaacccaactcaaaggaagagctggtgaagaagtatttctatgcttctaactatggaatgatgaaagttcttgcgaagatgggaatatccacccttgcatcctacaaaggtgcacagatttttgaagctcttggtctttcttccgaagtgattggcaagtgtttcgaaggcacacctagcaggattgagggtgcaacatttgaaatgcttgcacgagatgcacttcgtcttcatgagttagctttcccatcaagaacccctccagctggcagtgcagatgcaaaggcccttcccaacccaggggattaccactggaggaaaaatggtgaagttcatctcaacgacccacttgcaatgggaaaactacaagaagcagctagagtcaacagccgggcagcatacaaggaatattcgaaacgaattcaggagctcaacaaggcgtgcaatttacgtggcatgctgaaatttaaagatatttctgacaagatatctttggatgatgttgaacctgcaagtgagatagtgaaacgcttttgtactggagcaatgagttatggttctatttcattagaagcacatactgcccttgctattgccatgaacaaacttggaggaaaatctaatacaggtgagggaggggaacagccctctcggatggaaccacttcctgatggctcaatgaacccaagacgaagtgcgattaagcaagttgctagtggacggtttggagtttccagctattacctgactaatgcagatgagctgcagataaaaatggcccagggtgccaagcctggtgaaggtggtgagcttccaggccacaaggttattggtgacattgctgtcacaagacattccacagctggtgtaggactgatcagtccacctccgcatcatgatatttattcgattgaggatcttgcacagcttatacatgatcttaagaattcaaatcctggagcccgtatcagtgtcaaactagtttctgaggctggtgtgggagttgttgctagtggtgttgtaaaaggacatgcagaccatgttcttatatctggccatgatggtggcacgggagcttcaagatggacaggtatcaagaacgctggacttccatgggaacttgggttggctgagacacatcaaactctagtagcaaatgggcttcgtggtcgagctgttctgcaaacagatggacagttgaagactggtagagatgttgctgttgcttgcttgcttggtgcagaggaatttggttttagcactgcaccactgatcacactcggttgtattatgatgcgaaaatgccacatgaacacttgtcctgttggtatagctactcaagacccagtgcttcgagaaaagtttgctggagaaccagagcatgtcattaacttttttttcatgcttgctgaggagctaagagaaatcatggcaaaccttgggttccgcaccattactgaaatggttggacgttctgatatgcttgaggttgatccagaagtagtgaagactaatgagaaacttgagaacattgatctctcactaatcttgaaaccagcttcagagattcgtccaggtgttgctcagtactgtgttgagaagcaagaccatggcctagacatggcattagataacaaactaatagatctgtcaagaactgctattgaaaagcaagttcgtgttttcatcgagactccaattcagaacacgaaccgagcagttggaactatgctcagtcatgaagtcacaaaacgttatcacatcaatggattgcctgctggtacaattcatgtgaagtttactggaagtgctggtcaaagctttggtgcttttctttgtcctggagtcactcttgaactggaaggagacagcaatgattatcttggtaagggattatctggtgggaaaattgttgtgtacccaccaaggaacagttcatttagtccagaggacaatattgtcattggtaatgtggctttatatggtgctaccatgggagaggcatatttcaatggtatggcagcagaaaggttttgtgtccgcaactcaggtgctcaagcagtggttgaaggaattggagatcatggatgtgagtacatgactggaggcactgtggttatccttgggaaaactgggcggaactttgctgctggcatgagtggaggcattgcctatgtttatgatgttgatgggaaattcagtgctcgctgcaacaatgagttagttgatctatatcatgtggaggaagaggatgacatcatcacattgaaaatgatgattgagcaacatcgtcgcaacactgagagtgttttggctagagacatactctccgattttgataatcttcttccaaaatttgtaaaagtatatccaagggactataagagggttttagaaaacatgaagttggaaaagagtgttgctaatcatgcaaaggagcctaagatggtaaatggaatatctgtgacgactaagaaagtacaacctgatcagtcagcaagccggccaacacgtgttgccaatgccaaaaagtaccgaggttttattacatatgagcgagagagtatttcttacagagatccaaaagagcgtgttaaagattggaaggaagttgcaatcgaatcaacacctggtccactattaaatacacaatctgctcgttgcatggactgtggtactcctttctgtcatcaggaaagctcaggtgctggctgtcctcttggaaataagatcccagaattcaatgaattagttcaccagaacagatggcgcgaagcattggatcgactacttgagacaaacaacttccctgaatttactggacgagtatgccctgctccttgtgaggggtcatgtgttcttgggattattgagaatccggtgtctatcaaaagtatagaatgtgcaatcatagacaaaggtttcgaagagggatggatgattccacgacctccacttcaaagaacaggaaggaaggtggccattgttggcagtggaccagctggtttggctgctgcggatcaactaaacaaaatggggcattttgtaactgtgttcgaacgtgcagaccgaattggaggtttaatgatgtacggcgttccaaacatgaagactgacaagattggcattgtccagcgccgtgttaacctaatggcagaagagggtgtcacatttgtggtgaatgccaatgttggtagtgatcctctgtactcaattgaacgtctacgttctgagaatgatgcagttattttggcttgcggagcaacaaaaccaagagatctcaccatccctggacgcgagctatctggagttcattttgcaatggaatttctccatgcaaataccaaaagtttactcgacagcaacctggaggatggtaaatatatatccgcccgcgggaaaaaggtggtggttattggtggaggtgatacaggaacagattgcattggcacatctattaggcatggttgcaccagccttgtaaatcttgaactcctgacaaaaccaccaagcaatagagctgctgataacccatggccccagtggccaagaattttccgtgttgactatgggcatcaagaagctgctaccaagtttggaaaggatccaagaacttatgaagtcttgacaaagcgttttattggcgatgaaaatggcaaggtgaaggctcttgagttagtgcgtgtgaagtgggagaaagtagatggaagatttcaactcaaggagatccaaggatcagaagagattattgaagctgatctcgtcctcctagctatgggattcttgggtcctgaagcgtctatcgctgagaaactgggtttggagaaggacaacagatcaaacttcaaagcgcagtttggagacttcgctaccagtgttgatggtgtgttcgcagccggggactgcaggcgtggacaatcactggtggtatgggccatcacggaggggcggcaggctgctgcagcggtagacaagtacatatcaaggcatgatcagaatgtcgcaggcgacatcactccctttggggcagggctcgttcagccggttggagcataaaaaaaacatagaccgaggcatgttttaggttctcgtcagtggttcctcacagcaaattttgttcttgtatattttgacgatagataaacagttgaaagttttggtgtctattgtttctttttcttctccggttattatgttttgcgtgtctgcatgtggttttctagtccaaaatgtacagttttccttttattaaatagatgtaaatttggtgggtgatatggcgatcattttgtgtgtatatgaaagcgaaattgag

SEQ ID NO: 77482 - DNA, 7085 bp, Zea Mays
aggggtcaaggaaggcgagcgacgctcccacaccaatccacaacaccgccgcgccgcccgccgccgctggggacgagcgtggggcgagcaaccaaatctaagacaccgatccccgacgcgcaggccgcgaagctagcggcggagaaaagatcggagccacaacgcggtcgtgagcccgcagccaccggttccgcgaggctagacggagacagagatagcgaggcttgctgttcagccatgtcgacggcgcaagggacagcgttgaagtcggcgccgataggcgcaggtcatcgggcccggcgcggccgccccgtggtgccgccgtaccgttctggctggcaagcatacggcggcgtttccctcgagggcagcgggttcctcggcggcctgcagcgcaccgaggagcgcgtcgctacgctggcgccccgcgcggcggcgcgcgacgcggaggtggtgaggccgctctcgaagctcccgaacagcagcattgggctctatgatccctcgttcgagcgtgacgcgtgcggcgttgggtttgtcgctgagctttctggcgattacaaacgcgagactgttaatgatgctattgaaatgcttgagagaatggcgcaccgtggtgcctgtggctgcgaaaagaacacaggagacggtgccggcattatggtcgctctaccacatgacttcttcaaagaggtcacaaaggatgctgggtttgagctacccccgccaggcgactatgctgttggaatgtttttcatgccaaccgatgaaaagcgtcgcgagaagggcaaagctgagtttaagaaggtcgcggaatcactgggacatgtaatactcgggtggcgtcctgttcctactgacaactcagacttgggtgaatctgcactcgagactgagccagtcattgagcaggttttcgttaccaagagttcaagatcagaggctgagtttgagcaacagctatatatccttaggagactctcaatcatctctgtccgagcctctctgaacattaagcgtggaggagagagggatttctacatgtgctctctatcttcaaggactattgtttacaagggccagcttaaaccgtgccagcttaaggggtactactatgctgacctaggtcaagaaaacttcatgagttatatggctctgagtcaagctgcagttctgctatggccgactgctatgcccgactcatcaggatgtgacctccgattaggtggtgggaaggaaatgtgtttggtttgaggttcactcaaggttctccacaaacacctttcccagctgggaccgtgcgcaaccaatgcgtgttttaggtcataatggagagatcaatacccttagaggaaacaagaattggatgacagcacgtgagggtctcttagaggcggagaagcttggattatcaaaggagcagcttgcaagaattctgccaattgttgatgctacctcttctgattctggcgcattcgataatgttcttgagcttcttgtccgtggtgggcgaagcctgctagaagccgtgatgatgatgatccctgaggcatggcagaacgatggaaacatggatcctgagaagaaagctctctacgagttcttgtcagcacttatggagccttgggatggacctgctctaatatcttttactgatggtcgttaccttggagctaccctggaccgtaacggtttgaggcctggtcggttttatgtgacgcacagtgggcgtgtgatcatgggtagtgaggtcggtgttgttgatgttcctcctgaagacgtgctgagaaaaggcaggttaaaccctggaatgatgctattggttgattttgagaatcacactgtagtggatgatgaagctctgaaagcacaatactctaaagctcacccgtatggggaatggctcaagagacaaaagatatatctcaaggatattgtagaatcagtaccagaaaccgatagggttgctccaagcatttctagctcacttcctgcaaagaatgagaacaaggaccatgttggtatcaatgggattttgaccccactgaaggcttttgggtacacggtggaagccctggacatgttgctactgccaatggctaaggatggagtggaagctctcggttccatgggaaatgatacaccacttgcggtgatgtcaaacagggagaagttgacttttgagtacttcaagcagatgtttgcacaagttacaaaccctccgattgaccctattagagagaaaattgttacatctatggagtgtatgattggccccgaaggcgacttgttggaaacaactgaaaaacaatgcaaccgtctttcacttaaaggtcccttggtttctattgatgaaatggaggctattaaaaagatgaattatcgaggttggcgaagcaaagtgcttgacataacatacccaaaaaagtctgggaggaagggcttggaagaaactttgaacagaatgtgtgctgaagctcgtgaagccatacgcgagggatatactattttggttctctcagatagaggattttcctcagaccgtgttgctgccagttctctcttagcagtgggagcagtgcatcagcaccttgttgcaaatcttgagaggacacgcataggattgttggttgagtcagctgaacctcgtgaagtgcatcatttctgcaccctgcttggatttggtgctgatgctatatgcccttatttggctattgaagcaatttggtgcttgcagaatgatgggaagattcctcctaatggtgatggacaacccaactcaaaggaagagctggtgaagaagtatttctatgcttctaactatggaatgatgaaagttcttgcgaagatgggaatatccacccttgcatcctacaaaggtgcacagatttttgaagctcttggtctttcttccgaagtgattggcaagtgtttcgaaggcacacctagcaggattgagggtgcaacatttgaaatgcttgcacgagatgcacttcgtcttcatgagttagctttcccatcaagaacccctccagctggcagtgcagatgcaaaggcccttcccaacccaggggattaccactggaggaaaaatggtgaagttcatctcaacgacccacttgcaatgggaaaactacaagaagcagctagagtcaacagccgggcagcatacaaggaatattcgaaacgaattcaggagctcaacaaggcgtgcaatttacgtggcatgctgaaatttaaagatatttctgacaagatatctttggatgatgttgaacctgcaagtgagatagtgaaacgcttttgtactggagcaatgagttatggttctatttcattagaagcacatactgcccttgctattgccatgaacaaacttggaggaaaatctaatacaggtgagggaggggaacagccctctcggatggaaccacttcctgatggctcaatgaacccaagacgaagtgcgattaagcaagttgctagtggacggtttggagtttccagctattacctgactaatgcagatgagctgcagataaaaatggcccagggtgccaagcctggtgaaggtggtgagcttccaggccacaaggttattggtgacattgctgtcacaagacattccacagctggtgtaggactgatcagtccacctccgcatcatgatatttattcgattgaggatcttgcacagcttatacatgatcttaagaattcaaatcctggagcccgtatcagtgtcaaactagtttctgaggctggtgtgggagttgttgctagtggtgttgtaaaaggacatgcagaccatgttcttatatctggccatgatggtggcacgggagcttcaagatggacaggtatcaagaacgctggacttccatgggaacttgggttggctgagacacatcaaactctagtagcaaatgggcttcgtggtcgagctgttctgcaaacagatggacagttgaagactggtagagatgttgctgttgcttgcttgcttggtgcagaggaatttggttttagcactgcaccactgatcacactcggttgtattatgatgcgaaaatgccacatgaacacttgtcctgttggtatagctactcaagacccagtgcttcgagaaaagtttgctggagaaccagagcatgtcattaacttttttttcatgcttgctgaggagctaagagaaatcatggcaaaccttgggttccgcaccattactgaaatggttggacgttctgatatgcttgaggttgatccagaagtagtgaagactaatgagaaacttgagaacattgatctctcactaatcttgaaaccagcttcagagattcgtccaggtgttgctcagtactgtgttgagaagcaagaccatggcctagacatggcattagataacaaactaatagatctgtcaagaactgctattgaaaagcaagttcgtgttttcatcgagactccaattcagaacacgaaccgagcagttggaactatgctcagtcatgaagtcacaaaacgttatcacatcaatggattgcctgctggtacaattcatgtgaagtttactggaagtgctggtcaaagctttggtgcttttctttgtcctggagtcactcttgaactggaaggagacagcaatgattatcttggtaagggattatctggtgggaaaattgttgtgtacccaccaaggaacagttcatttagtccagaggacaatattgtcattggtaatgtggctttatatggtgctaccatgggagaggcatatttcaatggtatggcagcagaaaggttttgtgtccgcaactcaggtgctcaagcagtggttgaaggaattggagatcatggatgtgagtacatgactggaggcactgtggttatccttgggaaaactgggcggaactttgctgctggcatgagtggaggcattgcctatgtttatgatgttgatgggaaattcagtgctcgctgcaacaatgagttagttgatctatatcatgtggaggaagaggatgacatcatcacattgaaaatgatgattgagcaacatcgtcgcaacactgagagtgttttggctagagacatactctccgattttgataatcttcttccaaaatttgtaaaagtatatccaagggactataagagggttttagaaaacatgaagttggaaaagagtgttgctaatcatgcaaaggagcctaagatggtaaatggaatatctgtgacgactaagaaagtacaacctgatcagtcagcaagccggccaacacgtgttgccaatgccaaaaagtaccgaggttttattacatatgagcgagagagtatttcttacagagatccaaaagagcgtgttaaagattggaaggaagttgcaatcgaatcaacacctggtccactattaaatacacaatctgctcgttgcatggactgtggtactcctttctgtcatcaggaaagctcaggtgctggctgtcctcttggaaataagatcccagaattcaatgaattagttcaccagaacagatggcgcgaagcattggatcgactacttgagacaaacaacttccctgaatttactggacgagtatgccctgctccttgtgaggggtcatgtgttcttgggattattgagaatccggtgtctatcaaaagtatagaatgtgcaatcatagacaaaggtttcgaagagggatggatgattccacgacctccacttcaaagaacaggaaggaaggtggccattgttggcagtggaccagctggtttggctgctgcggatcaactaaacaaaatggggcattttgtaactgtgttcgaacgtgcagaccgaattggaggtttaatgatgtacggcgttccaaacatgaagactgacaagattggcattgtccagcgccgtgttaacctaatggcagaagagggtgtcacatttgtggtgaatgccaatgttggtagtgatcctctgtactcaattgaacgtctacgttctgagaatgatgcagttattttggcttgcggagcaacaaaaccaagagatctcaccatccctggacgcgagctatctggagttcattttgcaatggaatttctccatgcaaataccaaaagtttactcgacagcaacctggaggatggtaaatatatatccgcccgcgggaaaaaggtggtggttattggtggaggtgatacaggaacagattgcattggcacatctattaggcatggttgcaccagccttgtaaatcttgaactcctgacaaaaccaccaagcaatagagctgctgataacccatggccccagtggccaagaattttccgtgttgactatgggcatcaagaagctgctaccaagtttggaaaggatccaagaacttatgaagtcttgacaaagcgttttattggcgatgaaaatggcaaggtgaaggctcttgagttagtgcgtgtgaagtgggagaaagtagatggaagatttcaactcaaggagatccaaggatcagaagagattattgaagctgatctcgtcctcctagctatgggattcttgggtcctgaagcgtctatcgctgagaaactgggtttggagaaggacaacagatcaaacttcaaagcgcagtttggagacttcgctaccagtgttgatggtgtgttcgcagccggggactgcaggcgtggacaatcactggtggtatgggccatcacggaggggcggcaggctgctgcagcggtagacaagtacatatcaaggcatgatcagaatgtcgcaggcgacatcactccctttggggcagggctcgttcagccggttggagcataaaaaaaacatagaccgaggcatgttttaggttctcgtcagtggttcctcacagcaaattttgttcttgtatattttgacgatagataaacagttgaaagttttggtgtctattgtttctttttcttctccggttattatgttttgcgtgtctgcatgtggttttctagtccaaaatgtacagttttccttttattaaatagatgtaaatttggtgggtgatatggcgatcattttgtgtgtatatgaaagcgaaattgag

SEQ ID NO: 77483 - DNA, 6990 bp, Zea Mays
cggaggaggggtcaaggaaggcgagcgacgctcccacaccaatccacaacaccgccgcgccgcccgccgccgctggggacgagcgtggggcgagcaaccaaatctaagacaccgatccccgacgcgcaggccgcgaagctagcggcggagaaaagatcggagccacaacgcggtcgtgagcccgcagccaccggttccgcgaggctagacggagacagagcgaggcttgctgttcagccatgtcgacggcgcaagggacagcgttgaagtcggcgccgataggcgcaggtcatcgggcccggcgcggccgccccgtggtgccgccgtaccgttctggctggcaagcatacggcggcgtttccctcgagggcagcgggttcctcggcggcctgcagcgcaccgaggagcgcgtcgctacgctggcgccccgcgcggcggcgcgcgacgcggaggtggtgaggccgctctcgaagctcccgaacagcagcattgggctctatgatccctcgttcgagcgtgacgcgtgcggcgttgggtttgtcgctgagctttctggcgattacaaacgcgagactgttaatgatgctattgaaatgcttgagagaatggcgcaccgtggtgcctgtggctgcgaaaagaacacaggagacggtgccggcattatggtcgctctaccacatgacttcttcaaagaggtcacaaaggatgctgggtttgagctacccccgccaggcgactatgctgttggaatgtttttcatgccaaccgatgaaaagcgtcgcgagaagggcaaagctgagtttaagaaggtcgcggaatcactgggacatgtaatactcgggtggcgtcctgttcctactgacaactcagacttgggtgaatctgcactcgagactgagccagtcattgagcaggttttcgttaccaagagttcaagatcagaggctgagtttgagcaacagctatatatccttaggagactctcaatcatctctgtccgagcctctctgaacattaagcgtggaggagagagggatttctacatgtgctctctatcttcaaggactattgtttacaagggccagcttaaaccgtgccagcttaaggggtactactatgctgacctaggtcaagaaaacttcatgagttatatggctctggttcactcaaggttctccacaaacacctttcccagctgggaccgtgcgcaaccaatgcgtgttttaggtcataatggagagatcaatacccttagaggaaacaagaattggatgacagcacgtgagggtctcttagaggcggagaagcttggattatcaaaggagcagcttgcaagaattctgccaattgttgatgctacctcttctgattctggcgcattcgataatgttcttgagcttcttgtccgtggtgggcgaagcctgctagaagccgtgatgatgatgatccctgaggcatggcagaacgatggaaacatggatcctgagaagaaagctctctacgagttcttgtcagcacttatggagccttgggatggacctgctctaatatcttttactgatggtcgttaccttggagctaccctggaccgtaacggtttgaggcctggtcggttttatgtgacgcacagtgggcgtgtgatcatgggtagtgaggtcggtgttgttgatgttcctcctgaagacgtgctgagaaaaggcaggttaaaccctggaatgatgctattggttgattttgagaatcacactgtagtggatgatgaagctctgaaagcacaatactctaaagctcacccgtatggggaatggctcaagagacaaaagatatatctcaaggatattgtagaatcagtaccagaaaccgatagggttgctccaagcatttctagctcacttcctgcaaagaatgagaacaaggaccatgttggtatcaatgggattttgaccccactgaaggcttttgggtacacggtggaagccctggacatgttgctactgccaatggctaaggatggagtggaagctctcggttccatgggaaatgatacaccacttgcggtgatgtcaaacagggagaagttgacttttgagtacttcaagcagatgtttgcacaagttacaaaccctccgattgaccctattagagagaaaattgttacatctatggagtgtatgattggccccgaaggcgacttgttggaaacaactgaaaaacaatgcaaccgtctttcacttaaaggtcccttggtttctattgatgaaatggaggctattaaaaagatgaattatcgaggttggcgaagcaaagtgcttgacataacatacccaaaaaagtctgggaggaagggcttggaagaaactttgaacagaatgtgtgctgaagctcgtgaagccatacgcgagggatatactattttggttctctcagatagaggattttcctcagaccgtgttgctgccagttctctcttagcagtgggagcagtgcatcagcaccttgttgcaaatcttgagaggacacgcataggattgttggttgagtcagctgaacctcgtgaagtgcatcatttctgcaccctgcttggatttggtgctgatgctatatgcccttatttggctattgaagcaatttggtgcttgcagaatgatgggaagattcctcctaatggtgatggacaacccaactcaaaggaagagctggtgaagaagtatttctatgcttctaactatggaatgatgaaagttcttgcgaagatgggaatatccacccttgcatcctacaaaggtgcacagatttttgaagctcttggtctttcttccgaagtgattggcaagtgtttcgaaggcacacctagcaggattgagggtgcaacatttgaaatgcttgcacgagatgcacttcgtcttcatgagttagctttcccatcaagaacccctccagctggcagtgcagatgcaaaggcccttcccaacccaggggattaccactggaggaaaaatggtgaagttcatctcaacgacccacttgcaatgggaaaactacaagaagcagctagagtcaacagccgggcagcatacaaggaatattcgaaacgaattcaggagctcaacaaggcgtgcaatttacgtggcatgctgaaatttaaagatatttctgacaagatatctttggatgatgttgaacctgcaagtgagatagtgaaacgcttttgtactggagcaatgagttatggttctatttcattagaagcacatactgcccttgctattgccatgaacaaacttggaggaaaatctaatacaggtgagggaggggaacagccctctcggatggaaccacttcctgatggctcaatgaacccaagacgaagtgcgattaagcaagttgctagtggacggtttggagtttccagctattacctgactaatgcagatgagctgcagataaaaatggcccagggtgccaagcctggtgaaggtggtgagcttccaggccacaaggttattggtgacattgctgtcacaagacattccacagctggtgtaggactgatcagtccacctccgcatcatgatatttattcgattgaggatcttgcacagcttatacatgatcttaagaattcaaatcctggagcccgtatcagtgtcaaactagtttctgaggctggtgtgggagttgttgctagtggtgttgtaaaaggacatgcagaccatgttcttatatctggccatgatggtggcacgggagcttcaagatggacaggtatcaagaacgctggacttccatgggaacttgggttggctgagacacatcaaactctagtagcaaatgggcttcgtggtcgagctgttctgcaaacagatggacagttgaagactggtagagatgttgctgttgcttgcttgcttggtgcagaggaatttggttttagcactgcaccactgatcacactcggttgtattatgatgcgaaaatgccacatgaacacttgtcctgttggtatagctactcaagacccagtgcttcgagaaaagtttgctggagaaccagagcatgtcattaacttttttttcatgcttgctgaggagctaagagaaatcatggcaaaccttgggttccgcaccattactgaaatggttggacgttctgatatgcttgaggttgatccagaagtagtgaagactaatgagaaacttgagaacattgatctctcactaatcttgaaaccagcttcagagattcgtccaggtgttgctcagtactgtgttgagaagcaagaccatggcctagacatggcattagataacaaactaatagatctgtcaagaactgctattgaaaagcaagttcgtgttttcatcgagactccaattcagaacacgaaccgagcagttggaactatgctcagtcatgaagtcacaaaacgttatcacatcaatggattgcctgctggtacaattcatgtgaagtttactggaagtgctggtcaaagctttggtgcttttctttgtcctggagtcactcttgaactggaaggagacagcaatgattatcttggtaagggattatctggtgggaaaattgttgtgtacccaccaaggaacagttcatttagtccagaggacaatattgtcattggtaatgtggctttatatggtgctaccatgggagaggcatatttcaatggtatggcagcagaaaggttttgtgtccgcaactcaggtgctcaagcagtggttgaaggaattggagatcatggatgtgagtacatgactggaggcactgtggttatccttgggaaaactgggcggaactttgctgctggcatgagtggaggcattgcctatgtttatgatgttgatgggaaattcagtgctcgctgcaacaatgagttagttgatctatatcatgtggaggaagaggatgacatcatcacattgaaaatgatgattgagcaacatcgtcgcaacactgagagtgttttggctagagacatactctccgattttgataatcttcttccaaaatttgtaaaagtatatccaagggactataagagggttttagaaaacatgaagttggaaaagagtgttgctaatcatgcaaaggagcctaagatggtaaatggaatatctgtgacgactaagaaagtacaacctgatcagtcagcaagccggccaacacgtgttgccaatgccaaaaagtaccgaggttttattacatatgagcgagagagtatttcttacagagatccaaaagagcgtgttaaagattggaaggaagttgcaatcgaatcaacacctggtccactattaaatacacaatctgctcgttgcatggactgtggtactcctttctgtcatcaggaaagctcaggtgctggctgtcctcttggaaataagatcccagaattcaatgaattagttcaccagaacagatggcgcgaagcattggatcgactacttgagacaaacaacttccctgaatttactggacgagtatgccctgctccttgtgaggggtcatgtgttcttgggattattgagaatccggtgtctatcaaaagtatagaatgtgcaatcatagacaaaggtttcgaagagggatggatgattccacgacctccacttcaaagaacaggaaggaaggtggccattgttggcagtggaccagctggtttggctgctgcggatcaactaaacaaaatggggcattttgtaactgtgttcgaacgtgcagaccgaattggaggtttaatgatgtacggcgttccaaacatgaagactgacaagattggcattgtccagcgccgtgttaacctaatggcagaagagggtgtcacatttgtggtgaatgccaatgttggtagtgatcctctgtactcaattgaacgtctacgttctgagaatgatgcagttattttggcttgcggagcaacaaaaccaagagatctcaccatccctggacgcgagctatctggagttcattttgcaatggaatttctccatgcaaataccaaaagtttactcgacagcaacctggaggatggtaaatatatatccgcccgcgggaaaaaggtggtggttattggtggaggtgatacaggaacagattgcattggcacatctattaggcatggttgcaccagccttgtaaatcttgaactcctgacaaaaccaccaagcaatagagctgctgataacccatggccccagtggccaagaattttccgtgttgactatgggcatcaagaagctgctaccaagtttggaaaggatccaagaacttatgaagtcttgacaaagcgttttattggcgatgaaaatggcaaggtgaaggctcttgagttagtgcgtgtgaagtgggagaaagtagatggaagatttcaactcaaggagatccaaggatcagaagagattattgaagctgatctcgtcctcctagctatgggattcttgggtcctgaagcgtctatcgctgagaaactgggtttggagaaggacaacagatcaaacttcaaagcgcagtttggagacttcgctaccagtgttgatggtgtgttcgcagccggggactgcaggcgtggacaatcactggtggtatgggccatcacggaggggcggcaggctgctgcagcggtagacaagtacatatcaaggcatgatcagaatgtcgcaggcgacatcactccctttggggcagggctcgttcagccggttggagcataaaaaaaacatagaccgaggcatgttttaggttctcgtcagtggttcctcacagcaaattttgttcttgtatattttgacgatagataaacagttgaaagttttggtgtctattgtttctttttcttctccggttattatgttttgcgtgtctgcatgtggttttctagtccaaaatgtacagttttccttttattaaatagatgtaaatttggtgggtgatatggcgatcattttgtgtgtatatgaaagcgaaattgag

SEQ ID NO: 77484 - DNA, 7100 bp, Zea Mays
gcagcgagggcgagctcaccaccacggcacgtcggcaccaccaccctccctctataaatgcagggacaccgaaataccgaatgctccccaacgccctatactaatccggaggaggggtcaaggaaggcgagcgacgctcccacaccaatccacaacaccgccgcgccgcccgccgccgctggggacgagcgtggggcgagcaaccaaatctaagacaccgatccccgacgcgcaggccgcgaagctagcggcggagaaaagatcggagccacaacgcggtcgtgagcccgcagccaccggttccgcgaggctagacggagacagagatagcgaggcttgctgttcagccatgtcgacggcgcaagggacagcgttgaagtcggcgccgataggcgcaggtcatcgggcccggcgcggccgccccgtggtgccgccgtaccgttctggctggcaagcatacggcggcgtttccctcgagggcagcgggttcctcggcggcctgcagcgcaccgaggagcgcgtcgctacgctggcgccccgcgcggcggcgcgcgacgcggaggtggtgaggccgctctcgaagctcccgaacagcagcattgggctctatgatccctcgttcgagcgtgacgcgtgcggcgttgggtttgtcgctgagctttctggcgattacaaacgcgagactgttaatgatgctattgaaatgcttgagagaatggcgcaccgtggtgcctgtggctgcgaaaagaacacaggagacggtgccggcattatggtcgctctaccacatgacttcttcaaagaggtcacaaaggatgctgggtttgagctacccccgccaggcgactatgctgttggaatgtttttcatgccaaccgatgaaaagcgtcgcgagaagggcaaagctgagtttaagaaggtcgcggaatcactgggacatgtaatactcgggtggcgtcctgttcctactgacaactcagacttgggtgaatctgcactcgagactgagccagtcattgagcaggttttcgttaccaagagttcaagatcagaggctgagtttgagcaacagctatatatccttaggagactctcaatcatctctgtccgagcctctctgaacattaagcgtggaggagagagggatttctacatgtgctctctatcttcaaggactattgtttacaagggccagcttaaaccgtgccagcttaaggggtactactatgctgacctaggtcaagaaaacttcatgagttatatggctctggttcactcaaggttctccacaaacacctttcccagctgggaccgtgcgcaaccaatgcgtgttttaggtcataatggagagatcaatacccttagaggaaacaagaattggatgacagcacgtgagggtctcttagaggcggagaagcttggattatcaaaggagcagcttgcaagaattctgccaattgttgatgctacctcttctgattctggcgcattcgataatgttcttgagcttcttgtccgtggtgggcgaagcctgctagaagccgtgatgatgatgatccctgaggcatggcagaacgatggaaacatggatcctgagaagaaagctctctacgagttcttgtcagcacttatggagccttgggatggacctgctctaatatcttttactgatggtcgttaccttggagctaccctggaccgtaacggtttgaggcctggtcggttttatgtgacgcacagtgggcgtgtgatcatgggtagtgaggtcggtgttgttgatgttcctcctgaagacgtgctgagaaaaggcaggttaaaccctggaatgatgctattggttgattttgagaatcacactgtagtggatgatgaagctctgaaagcacaatactctaaagctcacccgtatggggaatggctcaagagacaaaagatatatctcaaggatattgtagaatcagtaccagaaaccgatagggttgctccaagcatttctagctcacttcctgcaaagaatgagaacaaggaccatgttggtatcaatgggattttgaccccactgaaggcttttgggtacacggtggaagccctggacatgttgctactgccaatggctaaggatggagtggaagctctcggttccatgggaaatgatacaccacttgcggtgatgtcaaacagggagaagttgacttttgagtacttcaagcagatgtttgcacaagttacaaaccctccgattgaccctattagagagaaaattgttacatctatggagtgtatgattggccccgaaggcgacttgttggaaacaactgaaaaacaatgcaaccgtctttcacttaaaggtcccttggtttctattgatgaaatggaggctattaaaaagatgaattatcgaggttggcgaagcaaagtgcttgacataacatacccaaaaaagtctgggaggaagggcttggaagaaactttgaacagaatgtgtgctgaagctcgtgaagccatacgcgagggatatactattttggttctctcagatagaggattttcctcagaccgtgttgctgccagttctctcttagcagtgggagcagtgcatcagcaccttgttgcaaatcttgagaggacacgcataggattgttggttgagtcagctgaacctcgtgaagtgcatcatttctgcaccctgcttggatttggtgctgatgctatatgcccttatttggctattgaagcaatttggtgcttgcagaatgatgggaagattcctcctaatggtgatggacaacccaactcaaaggaagagctggtgaagaagtatttctatgcttctaactatggaatgatgaaagttcttgcgaagatgggaatatccacccttgcatcctacaaaggtgcacagatttttgaagctcttggtctttcttccgaagtgattggcaagtgtttcgaaggcacacctagcaggattgagggtgcaacatttgaaatgcttgcacgagatgcacttcgtcttcatgagttagctttcccatcaagaacccctccagctggcagtgcagatgcaaaggcccttcccaacccaggggattaccactggaggaaaaatggtgaagttcatctcaacgacccacttgcaatgggaaaactacaagaagcagctagagtcaacagccgggcagcatacaaggaatattcgaaacgaattcaggagctcaacaaggcgtgcaatttacgtggcatgctgaaatttaaagatatttctgacaagatatctttggatgatgttgaacctgcaagtgagatagtgaaacgcttttgtactggagcaatgagttatggttctatttcattagaagcacatactgcccttgctattgccatgaacaaacttggaggaaaatctaatacaggtgagggaggggaacagccctctcggatggaaccacttcctgatggctcaatgaacccaagacgaagtgcgattaagcaagttgctagtggacggtttggagtttccagctattacctgactaatgcagatgagctgcagataaaaatggcccagggtgccaagcctggtgaaggtggtgagcttccaggccacaaggttattggtgacattgctgtcacaagacattccacagctggtgtaggactgatcagtccacctccgcatcatgatatttattcgattgaggatcttgcacagcttatacatgatcttaagaattcaaatcctggagcccgtatcagtgtcaaactagtttctgaggctggtgtgggagttgttgctagtggtgttgtaaaaggacatgcagaccatgttcttatatctggccatgatggtggcacgggagcttcaagatggacaggtatcaagaacgctggacttccatgggaacttgggttggctgagacacatcaaactctagtagcaaatgggcttcgtggtcgagctgttctgcaaacagatggacagttgaagactggtagagatgttgctgttgcttgcttgcttggtgcagaggaatttggttttagcactgcaccactgatcacactcggttgtattatgatgcgaaaatgccacatgaacacttgtcctgttggtatagctactcaagacccagtgcttcgagaaaagtttgctggagaaccagagcatgtcattaacttttttttcatgcttgctgaggagctaagagaaatcatggcaaaccttgggttccgcaccattactgaaatggttggacgttctgatatgcttgaggttgatccagaagtagtgaagactaatgagaaacttgagaacattgatctctcactaatcttgaaaccagcttcagagattcgtccaggtgttgctcagtactgtgttgagaagcaagaccatggcctagacatggcattagataacaaactaatagatctgtcaagaactgctattgaaaagcaagttcgtgttttcatcgagactccaattcagaacacgaaccgagcagttggaactatgctcagtcatgaagtcacaaaacgttatcacatcaatggattgcctgctggtacaattcatgtgaagtttactggaagtgctggtcaaagctttggtgcttttctttgtcctggagtcactcttgaactggaaggagacagcaatgattatcttggtaagggattatctggtgggaaaattgttgtgtacccaccaaggaacagttcatttagtccagaggacaatattgtcattggtaatgtggctttatatggtgctaccatgggagaggcatatttcaatggtatggcagcagaaaggttttgtgtccgcaactcaggtgctcaagcagtggttgaaggaattggagatcatggatgtgagtacatgactggaggcactgtggttatccttgggaaaactgggcggaactttgctgctggcatgagtggaggcattgcctatgtttatgatgttgatgggaaattcagtgctcgctgcaacaatgagttagttgatctatatcatgtggaggaagaggatgacatcatcacattgaaaatgatgattgagcaacatcgtcgcaacactgagagtgttttggctagagacatactctccgattttgataatcttcttccaaaatttgtaaaagtatatccaagggactataagagggttttagaaaacatgaagttggaaaagagtgttgctaatcatgcaaaggagcctaagatggtaaatggaatatctgtgacgactaagaaagtacaacctgatcagtcagcaagccggccaacacgtgttgccaatgccaaaaagtaccgaggttttattacatatgagcgagagagtatttcttacagagatccaaaagagcgtgttaaagattggaaggaagttgcaatcgaatcaacacctggtccactattaaatacacaatctgctcgttgcatggactgtggtactcctttctgtcatcaggaaagctcaggtgctggctgtcctcttggaaataagatcccagaattcaatgaattagttcaccagaacagatggcgcgaagcattggatcgactacttgagacaaacaacttccctgaatttactggacgagtatgccctgctccttgtgaggggtcatgtgttcttgggattattgagaatccggtgtctatcaaaagtatagaatgtgcaatcatagacaaaggtttcgaagagggatggatgattccacgacctccacttcaaagaacaggaaggaaggtggccattgttggcagtggaccagctggtttggctgctgcggatcaactaaacaaaatggggcattttgtaactgtgttcgaacgtgcagaccgaattggaggtttaatgatgtacggcgttccaaacatgaagactgacaagattggcattgtccagcgccgtgttaacctaatggcagaagagggtgtcacatttgtggtgaatgccaatgttggtagtgatcctctgtactcaattgaacgtctacgttctgagaatgatgcagttattttggcttgcggagcaacaaaaccaagagatctcaccatccctggacgcgagctatctggagttcattttgcaatggaatttctccatgcaaataccaaaagtttactcgacagcaacctggaggatggtaaatatatatccgcccgcgggaaaaaggtggtggttattggtggaggtgatacaggaacagattgcattggcacatctattaggcatggttgcaccagccttgtaaatcttgaactcctgacaaaaccaccaagcaatagagctgctgataacccatggccccagtggccaagaattttccgtgttgactatgggcatcaagaagctgctaccaagtttggaaaggatccaagaacttatgaagtcttgacaaagcgttttattggcgatgaaaatggcaaggtgaaggctcttgagttagtgcgtgtgaagtgggagaaagtagatggaagatttcaactcaaggagatccaaggatcagaagagattattgaagctgatctcgtcctcctagctatgggattcttgggtcctgaagcgtctatcgctgagaaactgggtttggagaaggacaacagatcaaacttcaaagcgcagtttggagacttcgctaccagtgttgatggtgtgttcgcagccggggactgcaggcgtggacaatcactggtggtatgggccatcacggaggggcggcaggctgctgcagcggtagacaagtacatatcaaggcatgatcagaatgtcgcaggcgacatcactccctttggggcagggctcgttcagccggttggagcataaaaaaaacatagaccgaggcatgttttaggttctcgtcagtggttcctcacagcaaattttgttcttgtatattttgacgatagataaacagttgaaagttttggtgtctattgtttctttttcttctccggttattatgttttgcgtgtctgcatgtggttttctagtccaaaatgtacagttttccttttattaaatagatgtaaatttggtgggtgatatggcgatcattttgtgtgtatatgaaagcgaaattgag

SEQ ID NO: 77485 - DNA, 642 bp, Zea Mays
ctgcgctattatcttcaacttgatttgcacgaatgcaatgtaatatccagcgcatatcctattattgtgtgcatggctgagtacaatgccatctcatattctgaccaaatgagattaagaacagcagttgaacttttaaaagccacgaaggacattgaatcacagttggaaaagatctcctctccattgctgattcttcacggagccgcagacatggtaaccgatcctcaggtcagcaaattcctttatgagaaagccagcacgaaggacaagaccctcaagctctatgaaggcagctaccattcaatcttagagggagaaccagatgaccggatttcaactgccattaacgacatcatttcatggctagattcacactgttaaatacccctttgtctatagcctctcatgtcctcatccattgttttggatttatagttccttattagagtaccatgggtctctagtgctttaaattttgccatggtgtgcagagataagtatctctcgaattaattagttgtgcttgctatcttgacactgttggttttatgttaattgcggacaccgcattcaatagcttggatcctgtcaacaagtatcagcattaccaggtccgattatcaaacaaaacaaaatgac

SEQ ID NO: 77486 - DNA, 2011 bp, Zea Mays
gtctgcgagccgactagtcccggcacccgactccccactcctgaccggagtagccagctcccagacattgacgagacataaacccacttgcccacgcgcacggcaagccggcaaggccacgcgagaaattccatctcgagcagagcgcagcaacacgtgcgcggaggtcacagctccgatcgacaagccggccaagcagccacacatgcctcctcacatggcggcgatctcgcaccggatcgcaggatccggcccgcgcgtcgccgttgtggcgccgcctcgcccgcgggggcgcgctgccgtggtcgcgggtgctgcggcgaagggcgcacatcgggagcggacgctggagggcgcgagtgacgacctgagggccgccgcggctcagtgtctggactgggctcccgcgcggcgtcgggtgcgggccgccttcgcgcccgtgctccccaccctcgaccactgccttttcaagatggctcacaatgaaatccagatggaagagaattacgagaccaattcaaagggcgttgaaatattctggaagagttggctgccaagagagggcactgcaactaaggctgcacttttcttctgccatggatatggggatacctgcactttcttttttgaagggattgctaagaggatagcagctgctggttatgcagtttatgctatggattatcctggttttggcatgtcatatggtctccatggctatattgcaagctttgatggaatggtggaccatgtcattgaacagtatgcacgaataagaggcatgaaagaagtgtgtgagctgccacactttctcttggggcagtcaatgggaggtgcagttgccctgaaagtacacttgaagcaacaacaagaatgggatggtgtgcttcttgtcgcacctatgtgcaaggtatttctcaaactcccaattaccatcagattacgtcatcacacaatcacatccttttggttgtgttagtataaggtgtgtatatgtttcactgtccactaactatccaatcatgacttgtgctagtgcacaatagtggattgtagttcacagttgacagtaggtggaaatatagtgcttggtgaaatttgggagccactggtcaagaaatgacttcttatggatatgtttgcaaaacaattttattcatagttactgataactgctaagtccatgccaaatttatttatttttcttgcaatctagcatatttccagttttacttcatggtagggcaactaacctgaagaatgcatgaagaaatttgggagccactggtcaagaaaggacttcatagtaactgaagatgtaacaccacctgcacctgtattgaaggcactgagcatattgtcatgtcttcttcctgaggcgaagttatttccgcagaaagatataggagatttggcatttagagatccaaggaaaaggaaagtagctgagtacaatgccatctcatattctgaccaaatgagattaagaacagcagttgaacttttaaaagccacgaaggacattgaatcacagttggaaaagatctcctctccattgctgattcttcacggagccgcagacatggtaaccgatcctcaggtcagcaaattcctttatgagaaagccagcacgaaggacaagaccctcaagctctatgaaggcagctaccattcaatcttagagggagaaccagatgaccggatttcaactgccattaacgacatcatttcatggctagattcacactgttaaatacccctttgtctatagcctctcatgtcctcatccattgttttggatttatagttccttattagagtaccatgggtctctagtgctttaaattttgccatggtgtgcagagataagtatctctcgaattaattagttgtgcttgctatcttgacactgttggttttatgttaattgcggacaccgcattcaatagcttggatcctgtcaacaagtatcagcattaccaggtccgattatcaaacaaaacaaaatgac

SEQ ID NO: 77487 - DNA, 2190 bp, Zea Mays
gtctgcgagccgactagtcccggcacccgactccccactcctgaccggagtagccagctcccagacattgacgagacataaacccacttgcccacgcgcacggcaagccggcaaggccacgcgagaaattccatctcgagcagagcgcagcaacacgtgcgcggaggtcacagctccgatcgacaagccggccaagcagccacacatgcctcctcacatggcggcgatctcgcaccggatcgcaggatccggcccgcgcgtcgccgttgtggcgccgcctcgcccgcgggggcgcgctgccgtggtcgcgggtgctgcggcgaagggcgcacatcgggagcggacgctggagggcgcgagtgacgacctgagggccgccgcggctcagtgtctggactgggctcccgcgcggcgtcgggtgcgggccgccttcgcgcccgtgctccccaccctcgaccactgccttttcaaggttcgatgtgcaagtcgctccgtcctagcttgatttggtttcgtacgctgtagcggaggatcagctgtcaaaattattttttgggaaatggtcgaacgcttccagtactgcggcgcttgccacctcatttagatggctcacaatgaaatccagatggaagaggtacgggcgtgatgggatttctgaattgaccttgcattccattttgttcaacgttcaagtagttccctcgctgaaatattgtggcacaagcaaactttctgttggaaaatctttaccatgtccctgtttgtttgaactaaaaaggctttccatcttgagtagccaatagtagattttcgaagatatttttagctttctggactcaagaacctcatgaaagctcagaaaagtgagcttttaagctttccgtataaactcaggttcttcgggattctggcttttcgaaagctagatgaaaaagcctattgacttttcacactaaaaagctgtccagaagctcatacaaacagggctgattcaagagcttctttccttgctttgagtattgatagatactgctagttactgtagaattacgagaccaattcaaagggcgttgaaatattctggaagagttggctgccaagagagggcactgcaactaaggctgcacttttcttctgccatggatatggggatacctgcactttcttttttgaagggattgctaagaggatagcagctgctggttatgcagtttatgctatggattatcctggttttggcatgtcatatggtctccatggctatattgcaagctttgatggaatggtggaccatgtcattgaacagtatgcacgaataagaggcatgaaagaagtgtgtgagctgccacactttctcttggggcagtcaatgggaggtgcagttgccctgaaagtacacttgaagcaacaacaagaatgggatggtgtgcttcttgtcgcacctatgtgcaagtgattttataagactggcttctctttggcaagatttcagaagatgtaacaccacctgcacctgtattgaaggcactgagcatattgtcatgtcttcttcctgaggcgaagttatttccgcagaaagatataggagatttggcatttagagatccaaggaaaaggaaagtagctgagtacaatgccatctcatattctgaccaaatgagattaagaacagcagttgaacttttaaaagccacgaaggacattgaatcacagttggaaaagatctcctctccattgctgattcttcacggagccgcagacatggtaaccgatcctcaggtcagcaaattcctttatgagaaagccagcacgaaggacaagaccctcaagctctatgaaggcagctaccattcaatcttagagggagaaccagatgaccggatttcaactgccattaacgacatcatttcatggctagattcacactgttaaatacccctttgtctatagcctctcatgtcctcatccattgttttggatttatagttccttattagagtaccatgggtctctagtgctttaaattttgccatggtgtgcagagataagtatctctcgaattaattagttgtgcttgctatcttgacactgttggttttatgttaattgcggacaccgcattcaatagcttggatcctgtcaacaagtatcagcattaccaggtccgattatcaaacaaaacaaaatgac

SEQ ID NO: 77488 - DNA, 1691 bp, Zea Mays
gtctgcgagccgactagtcccggcacccgactccccactcctgaccggagtagccagctcccagacattgacgagacataaacccacttgcccacgcgcacggcaagccggcaaggccacgcgagaaattccatctcgagcagagcgcagcaacacgtgcgcggaggtcacagctccgatcgacaagccggccaagcagccacacatgcctcctcacatggcggcgatctcgcaccggatcgcaggatccggcccgcgcgtcgccgttgtggcgccgcctcgcccgcgggggcgcgctgccgtggtcgcgggtgctgcggcgaagggcgcacatcgggagcggacgctggagggcgcgagtgacgacctgagggccgccgcggctcagtgtctggactgggctcccgcgcggcgtcgggtgcgggccgccttcgcgcccgtgctccccaccctcgaccactgccttttcaagatggctcacaatgaaatccagatggaagagaattacgagaccaattcaaagggcgttgaaatattctggaagagttggctgccaagagagggcactgcaactaaggctgcacttttcttctgccatggatatggggatacctgcactttcttttttgaagggattgctaagaggatagcagctgctggttatgcagtttatgctatggattatcctggttttggcatgtcatatggtctccatggctatattgcaagctttgatggaatggtggaccatgtcattgaacagtatgcacgaataagaggcatgaaagaagtgtgtgagctgccacactttctcttggggcagtcaatgggaggtgcagttgccctgaaagtacacttgaagcaacaacaagaatgggatggtgtgcttcttgtcgcacctatgtgcaagggcaactaacctgaagaatgcatgaagaaatttgggagccactggtcaagaaaggacttcatagtaactggtgttggaatctcccttggaagtcttttttcatgacttcttatgggcactgagcatattgtcatgtcttcttcctgaggcgaagttatttccgcagaaagatataggagatttggcatttagagatccaaggaaaaggaaagtagctgagtacaatgccatctcatattctgaccaaatgagattaagaacagcagttgaacttttaaaagccacgaaggacattgaatcacagttggaaaagatctcctctccattgctgattcttcacggagccgcagacatggtaaccgatcctcaggtcagcaaattcctttatgagaaagccagcacgaaggacaagaccctcaagctctatgaaggcagctaccattcaatcttagagggagaaccagatgaccggatttcaactgccattaacgacatcatttcatggctagattcacactgttaaatacccctttgtctatagcctctcatgtcctcatccattgttttggatttatagttccttattagagtaccatgggtctctagtgctttaaattttgccatggtgtgcagagataagtatctctcgaattaattagttgtgcttgctatcttgacactgttggttttatgttaattgcggacaccgcattcaatagcttggatcctgtcaacaagtatcagcattaccaggtccgattatcaaacaaaacaaaatgac

SEQ ID NO: 77489 - DNA, 2481 bp, Zea Mays
cgcggatggtcaaagtcaaacaagcctctcgacactgcagagtgcagtctgcgagccgactagtcccggcacccgactccccactcctgaccggagtagccagctcccagacattgacgagacataaacccacttgcccacgcgcacggcaagccggcaaggccacgcgagaaattccatctcgagcagagcgcagcaacacgtgcgcggaggtcacagctccgatcgacaagccggccaagcagccacacatgcctcctcacatggcggcgatctcgcaccggatcgcaggatccggcccgcgcgtcgccgttgtggcgccgcctcgcccgcgggggcgcgctgccgtggtcgcgggtgctgcggcgaagggcgcacatcgggagcggacgctggagggcgcgagtgacgacctgagggccgccgcggctcagtgtctggactgggctcccgcgcggcgtcgggtgcgggccgccttcgcgcccgtgctccccaccctcgaccactgccttttcaagatggctcacaatgaaatccagatggaagaggtacgggcgtgatgggatttctgaattgaccttgcattccattttgttcaacgttcaagtagttccctcgctgaaatattgtggcacaagcaaactttctgttggaaaatctttaccatgtccctgtttgtttgaactaaaaaggctttccatcttgagtagccaatagtagattttcgaagatatttttagctttctggactcaagaacctcatgaaagctcagaaaagtgagcttttaagctttccgtataaactcaggttcttcgggattctggcttttcgaaagctagatgaaaaagcctattgacttttcacactaaaaagctgtccagaagctcatacaaacagggctgattcaagagcttctttccttgctttgagtattgatagatactgctagttactgtagaattacgagaccaattcaaagggcgttgaaatattctggaagagttggctgccaagagagggcactgcaactaaggctgcacttttcttctgccatggatatggggatacctgcactttcttttttgaagggattgctaagaggatagcagctgctggttatgcagtttatgctatggattatcctggttttggcatgtcatatggtctccatggctatattgcaagctttgatggaatggtggaccatgtcattgaacagtatgcacgaataagaggcatgaaagaagtgtgtgagctgccacactttctcttggggcagtcaatgggaggtgcagttgccctgaaagtacacttgaagcaacaacaagaatgggatggtgtgcttcttgtcgcacctatgtgcaaggtatttctcaaactcccaattaccatcagattacgtcatcacacaatcacatccttttggttgtgttagtataaggtgtgtatatgtttcactgtccactaactatccaatcatgacttgtgctagtgcacaatagtggattgtagttcacagttgacagtaggtggaaatatagtgcttggtgaaatttgggagccactggtcaagaaatgacttcttatggatatgtttgcaaaacaattttattcatagttactgataactgctaagtccatgccaaatttatttatttttcttgcaatctagcatatttccagttttacttcatggtagggcaactaacctgaagaatgcatgaagaaatttgggagccactggtcaagaaaggacttcatagtaactggtgttggaatctcccttggaagtcttttttcatgacttcttatgggcactgagcatattgtcatgtcttcttcctgaggcgaagttatttccgcagaaagatataggagatttggcatttagagatccaaggaaaaggaaagtagctgagtacaatgccatctcatattctgaccaaatgagattaagaacagcagttgaacttttaaaagccacgaaggacattgaatcacagttggaaaagatctcctctccattgctgattcttcacggagccgcagacatggtaaccgatcctcaggtcagcaaattcctttatgagaaagccagcacgaaggacaagaccctcaagctctatgaaggcagctaccattcaatcttagagggagaaccagatgaccggatttcaactgccattaacgacatcatttcatggctagattcacactgttaaatacccctttgtctatagcctctcatgtcctcatccattgttttggatttatagttccttattagagtaccatgggtctctagtgctttaaattttgccatggtgtgcagagataagtatctctcgaattaattagttgtgcttgctatcttgacactgttggttttatgttaattgcggacaccgcattcaatagcttggatcctgtcaacaagtatcagcattaccaggtccgattatcaaacaaaacaaaatgac

SEQ ID NO: 77490 - DNA, 3708 bp, Zea Mays
tcgacgaattggcgttggatggtcatttttccagcactcgatatccgagtaaagaatgttgcagggacctattccttagagcataaaggagaaagcgatctttttagccagttatttgatctcctgcaattggacatacataatgatgatggtcttcgtagggagcttgcgtcatgcacaggcgcgatacagacatgtctcagccaacatatgtccaaggaggaagaacaggtctttccattgcttacaaagaaattttcgtgtgaagaacaagctgatttagtgtggcaattcctatgcaacattcctgtcaatatggtggcagagttccttccatggctttcaacttctgtcacatctgatgagcaccaagatatccgtaactgcttatgcaaagtagttcctgatgagaaacttctccaacaggttgtattcacatggatggaagggaaagcaacaagagaagtggcagagagcattgctgctggtatttcagcaagaaataatagtgttgaggatgtcccagaccaagggaagattcatatttgtttacatcacaattctaaacttgggagtaaaaactgtggagaatctaatggtcctcaggctgacaagcatcctatagatgatattttatactggcacaatgctattcgtatggagttacgtgatataaaagaggagacaagaagggtgcagcaatctggggatttttctgatatatcagccttcaatgagaggcttcagttcattgcagatgtatgcatctaccacagtatcgctgaggatcaggttgtttttcctgcagtcgatagtgagctgtcctttgtgcaggagcatgctgaagaagaatgcaggtttaacaattttaggtgtttaattcagcaaatccaaatagcaggagccgaatcaactgcattggacttctactcaaaactgtgttcacatgctgataaaatattggaggcaatcgaaaaacacttctgcaatgaagaaaccaaggtgcttcctcaagctaggatgctcttctctcttgagaagcaaagggaactttcatacaaaagtttgtgtgttatgccattgaaattattggaacgtgttttgccgtggttggtgtcgaagctgagtgatgttcaggcaacttcatttcttcagaatatacgcttggcagcatcaccatctgaaactgcactggtcactcttatctctggttgggcatgcaaaggccgggataaatccaaagatggagaatatttatgcttaacatcaggtgcggcgagatgtctatcagatgatgtagatgatctgggaaaatgccgatcattctgtccatgtgcttcacccaacagctcagatctttctctgcagctacatactgagaatgattctaggccaggcaagcgaggaaaagatgcagtatctttttctcatactaatggaatctactgctctcaaactgctgacattgaagcaattccatgtagcaaaaaaccatgttgtattcctggtttgagagtagagagtagcaatcttggtattggttccttggcttctgcaaagtcttttcactctttatcatacaattcaactgctccttcactatattcgagcctcttttcatgggagacagatacatcattgtcttgttcggacagcatttcaaggccaatcgatacaatattcaaatttcataaggcaattcgcaaggatttagaatacttagatgttgaatctggcaagctcattgatggcaacgagtcctgccttcgccaattcattggaaggttccgtttgttatggggtctttacagggctcacagcaatgctgaggatgaaattgtgtttccagcattggaatccagagaaacattacacaatgtgagccattcatatactcttgaccacaagcaggaagaacagttgtttgaagatatctcaaatgttctctttcaactttcacaactacatgatagccagggccatgcccagactgaagttaatgaagtaaagaaaagctgtttccattcatctaatgatgtcgattttgctagaaagtataatgaacttgccacaaaacttcagggcatgtgcaagtctatccgggtcgccttgactaatcatgtccatagagaagaacttgaattatggccgttgtttgataaacatttttctgtggaggagcaagataaacttgtaggtcgtataattggttcaacaggtgctgaggttctccaatctatgttaccctgggttacatcagttctcactcaagaggagcagaacaaaatgcttgatatgtggaagcaagctacaaaaaatacaatgtttggggaatggctaaacgagtggtggaagggagctggaacagcatctgattcttcagcagaggcgtcctctgctccagaagatagtcatttacaagataagcttgaacaaaatgaccagatgttcaagcctggctggaaggacatatttcgaatgaatcagagtgaacttgaggctgaggtgcgaaaggtttcacgagattctacacttgacccaaggcggaaggcgtatctaattcaaaatctcatgacaagccgctggatagctgcacagcagaagttaccagaaccaaattctgaagaatgtaatcacgatgccagtatacctggatgtgcaccttcataccgagaccaggagaaacaaatttatggttgtgaacactacaaacggaactgcaaacttgttgctgcatgctgcaacaagctcttcacatgcaggttctgccatgataaagttagtgaccatacgatggaaaggactgtgtaccactgtccgttttgtaatttgtgtcgtcttgggaaaggtcttggtgttgatttcttccattgcatgaaatgcaactgctgccttggaatgaaattaactgagcacaaatgtcgggaaaaagggctagagacaaattgtccaatatgctgtgacttcctatttacatcaagtgccgcagtcagagccctcccttgtggccacttcatgcattcagcttgctttcaggcatacacttgtagtcactacacttgccctatctgctgcaaatccttgggagatatggcggtttattttggcatgcttgatgccttgttggcggctgaagagcttccggaggaataccgtgatcggtgtcaggatatactttgcaatgactgtgagaggaaaggtagatgtcgatttcattggttataccacaaatgcggctcctgtgggtcgtacaacacccgagttatcaagactgccacagcagattgctctacaccaaactagttggagggaacatttgtgcttaattagtcactgtattctttgtttctctttgtacatatcttctagagagaaggaaaaagagaagttgtgtagcatagttataccataatttcattcgtagccatttcagttttgtaagtgtagcagtttacaatttactaggtctagtgcgttatactgacaaaattgacggttctgatggaagaacataacctgaggaaattggcttgttagaagtactcgtgagcatgttctgcaatttggcggccacttagactatcttcaattatatcttctatattccttctctatatccctcttttatggactcttaaaagatttctttctttatatctatctcttctatacgttaattaacttacaagagatatattttgatctaga

SEQ ID NO: 77491 - DNA, 3856 bp, Zea Mays
gtagaagctttcgacgaattggcgttggatggtcatttttccagcactcgatatccgagtaaagaatgttgcagggacctattccttagagcataaaggagaaagcgatctttttagccagttatttgatctcctgcaattggacatacataatgatgatggtcttcgtagggagcttgcgtcatgcacaggcgcgatacagacatgtctcagccaacatatgtccaaggaggaagaacaggtctttccattgcttacaaagaaattttcgtgtgaagaacaagctgatttagtgtggcaattcctatgcaacattcctgtcaatatggtggcagagttccttccatggctttcaacttctgtcacatctgatgagcaccaagatatccgtaactgcttatgcaaagtagttcctgatgagaaacttctccaacaggttgtattcacatggatggaagggaaagcaacaagagaagtggcagagagcattgctgctggtatttcagcaagaaataatagtgttgaggatgtcccagaccaagggaagattcatatttgtttacatcacaattctaaacttgggagtaaaaactgtggagaatctaatggtcctcaggctgacaagcatcctatagatgatattttatactggcacaatgctattcgtatggagttacgtgatataaaagaggagacaagaagggtgcagcaatctggggatttttctgatatatcagccttcaatgagaggcttcagttcattgcagatgtatgcatctaccacagtatcgctgaggatcaggttgtttttcctgcagtcgatagtgagctgtcctttgtgcaggagcatgctgaagaagaatgcaggtttaacaattttaggtgtttaattcagcaaatccaaatagcaggagccgaatcaactgcattggacttctactcaaaactgtgttcacatgctgataaaatattggaggcaatcgaaaaacacttctgcaatgaagaaaccaaggtgcttcctcaagctaggatgctcttctctcttgagaagcaaagggaactttcatacaaaagtttgtgtgttatgccattgaaattattggaacgtgttttgccgtggttggtgtcgaagctgagtgatgttcaggcaacttcatttcttcagaatatacgcttggcagcatcaccatctgaaactgcactggtcactcttatctctggttgggcatgcaaaggccgggataaatccaaagatggagaatatttatgcttaacatcaggtgcggcgagatgtctatcagatgatgtagatgatctgggaaaatgccgatcattctgtccatgtgcttcacccaacagctcagatctttctctgcagctacatactgagaatgattctaggccaggcaagcgaggaaaagatgcagtatctttttctcatactaatggaatctactgctctcaaactgctgacattgaagcaattccatgtagcaaaaaaccatgttgtattcctggtttgagagtagagagtagcaatcttggtattggttccttggcttctgcaaagtcttttcactctttatcatacaattcaactgctccttcactatattcgagcctcttttcatgggagacagatacatcattgtcttgttcggacagcatttcaaggccaatcgatacaatattcaaatttcataaggcaattcgcaaggatttagaatacttagatgttgaatctggcaagctcattgatggcaacgagtcctgccttcgccaattcattggaaggttccgtttgttatggggtctttacagggctcacagcaatgctgaggatgaaattgtgtttccagcattggaatccagagaaacattacacaatgtgagccattcatatactcttgaccacaagcaggaagaacagttgtttgaagatatctcaaatgttctctttcaactttcacaactacatgatagccagggccatgcccagactgaagttaatgaagtaaagaaaagctgtttccattcatctaatgatgtcgattttgctagaaagtataatgaacttgccacaaaacttcagggcatgtgcaagtctatccgggtcgccttgactaatcatgtccatagagaagaacttgaattatggccgttgtttgataaacatttttctgtggaggagcaagataaacttgtaggtcgtataattggttcaacaggtgctgaggttctccaatctatgttaccctgggttacatcagttctcactcaagaggagcagaacaaaatgcttgatatgtggaagcaagctacaaaaaatacaatgtttggggaatggctaaacgagtggtggaagggagctggaacagcatctgattcttcagcagaggcgtcctctgctccagaagatagtcatttacaagataagcttgaacaaaatgaccagatgttcaagcctggctggaaggacatatttcgaatgaatcagagtgaacttgaggctgaggtgcgaaaggtttcacgagattctacacttgacccaaggcggaaggcgtatctaattcaaaatctcatgacaagccgctggatagctgcacagcagaagttaccagaaccaaattctgaagaatgtaatcacgatgccagtatacctggatgtgcaccttcataccgagaccaggagaaacaaatttatggttgtgaacactacaaacggaactgcaaacttgttgctgcatgctgcaacaagctcttcacatgcaggttctgccatgataaagttagtgaccatacgatggaaaggaaagcaacacaggagatgatgtgcatggtatgcctaaagattcaacctgttggttcgttctgccaaaccccatcttgcaacagactatcgatggcaaagtactactgtaacatctgtaaattttttgatgatgaaaggactgtgtaccactgtccgttttgtaatttgtgtcgtcttgggaaaggtcttggtgttgatttcttccattgcatgaaatgcaactgctgccttggaatgaaattaactgagcacaaatgtcgggaaaaagggctagagacaaattgtccaatatgctgtgacttcctatttacatcaagtgccgcagtcagagccctcccttgtggccacttcatgcattcagcttgctttcaggcatacacttgtagtcactacacttgccctatctgctgcaaatccttgggagatatggcggtttattttggcatgcttgatgccttgttggcggctgaagagcttccggaggaataccgtgatcggtgtcaggatatactttgcaatgactgtgagaggaaaggtagatgtcgatttcattggttataccacaaatgcggctcctgtgggtcgtacaacacccgagttatcaagactgccacagcagattgctctacaccaaactagttggagggaacatttgtgcttaattagtcactgtattctttgtttctctttgtacatatcttctagagagaaggaaaaagagaagttgtgtagcatagttataccataatttcattcgtagccatttcagttttgtaagtgtagcagtttacaatttactaggtctagtgcgttatactgacaaaattgacggttctgatggaagaacataacctgaggaaattggcttgttagaagtactcgtgagcatgttctgcaatttggcggccacttagactatcttcaattatatcttctatattccttctctatatccctcttttatggactcttaaaagatttctttctttatatctatctcttctatacgttaattaacttacaagagatatattttgatctaga

SEQ ID NO: 77492 - DNA, 4993 bp, Zea Mays
gatatgaataattttttaaaagaatcatccgacagtttatttaaataattatctaaatatagacatcttcttctgttcctgtgttatcgttagacaaagatagaaaaagtaaataacttttcagagtgcaaataagatatagaaaatctattggatgcgagacctacctagccaaccgcttcaaatcaaagttcaaacctacaacaagcagtaaaataaccacacagacgagacggcaacacacacattgagagctctaccgagcgaaagagacccaggaaaagccaacgggacgccaaatccattcctcctccctcgtccacaggccgtgagggccgaacccgaagccagccgaggaagccaggcgacaggcgacgccaagtcgagaagagcctaggtggtcgctcgcgggctgcgagggagagccgtggcggagtcgccgtcgtcgcccacggaggaggacacggccgccgccgccgcagtggcatggcgacgccgacgcccatgcctggaggcgaggggacgctcgcagcggtgatgccgcggtccccgtctccgacgccggcggaggcggggacctcggcgaccgagacgcccgtgctgatattcctttactttcacaaggcgatccgcgcggagctcgaggcgctgcacggcgccgccgtgctcctggccaccgagcgcaccggcgatgtagagatgctcgccaagcgctgccgcttcttcttcaacatttacaaacaccactgcgacgccgaggatgcggtcatttttccagcactcgatatccgagtaaagaatgttgcagggacctattccttagagcataaaggagaaagcgatctttttagccagttatttgatctcctgcaattggacatacataatgatgatggtcttcgtagggagcttgcgtcatgcacaggcgcgatacagacatgtctcagccaacatatgtccaaggaggaagaacaggtctttccattgcttacaaagaaattttcgtgtgaagaacaagctgatttagtgtggcaattcctatgcaacattcctgtcaatatggtggcagagttccttccatggctttcaacttctgtcacatctgatgagcaccaagatatccgtaactgcttatgcaaagtagttcctgatgagaaacttctccaacaggttgtattcacatggatggaagggaaagcaacaagagaagtggcagagagcattgctgctggtatttcagcaagaaataatagtgttgaggatgtcccagaccaagggaagattcatatttgtttacatcacaattctaaacttgggagtaaaaactgtggagaatctaatggtcctcaggctgacaagcatcctatagatgatattttatactggcacaatgctattcgtatggagttacgtgatataaaagaggagacaagaagggtgcagcaatctggggatttttctgatatatcagccttcaatgagaggcttcagttcattgcagatgtatgcatctaccacagtatcgctgaggatcaggttgtttttcctgcagtcgatagtgagctgtcctttgtgcaggagcatgctgaagaagaatgcaggtttaacaattttaggtgtttaattcagcaaatccaaatagcaggagccgaatcaactgcattggacttctactcaaaactgtgttcacatgctgataaaatattggaggcaatcgaaaaacacttctgcaatgaagaaaccaaggtgcttcctcaagctaggatgctcttctctcttgagaagcaaagggaactttcatacaaaagtttgtgtgttatgccattgaaattattggaacgtgttttgccgtggttggtgtcgaagctgagtgatgttcaggcaacttcatttcttcagaatatacgcttggcagcatcaccatctgaaactgcactggtcactcttatctctggttgggcatgcaaaggccgggataaatccaaagatggagaatatttatgcttaacatcaggtgcggcgagatgtctatcagatgatgtagatgatctgggaaaatgccgatcattctgtccatgtgcttcacccaacagctcagatctttctctgcagctacatactgagaatgattctaggccaggcaagcgaggaaaagatgcagtatctttttctcatactaatggaatctactgctctcaaactgctgacattgaagcaattccatgtagcaaaaaaccatgttgtattcctggtttgagagtagagagtagcaatcttggtattggttccttggcttctgcaaagtcttttcactctttatcatacaattcaactgctccttcactatattcgagcctcttttcatgggagacagatacatcattgtcttgttcggacagcatttcaaggccaatcgatacaatattcaaatttcataaggcaattcgcaaggatttagaatacttagatgttgaatctggcaagctcattgatggcaacgagtcctgccttcgccaattcattggaaggttccgtttgttatggggtctttacagggctcacagcaatgctgaggatgaaattgtgtttccagcattggaatccagagaaacattacacaatgtgagccattcatatactcttgaccacaagcaggaagaacagttgtttgaagatatctcaaatgttctctttcaactttcacaactacatgatagccagggccatgcccagactgaagttaatgaagtaaagaaaagctgtttccattcatctaatgatgtcgattttgctagaaagtataatgaacttgccacaaaacttcagggcatgtgcaagtctatccgggtcgccttgactaatcatgtccatagagaagaacttgaattatggccgttgtttgataaacatttttctgtggaggagcaagataaacttgtaggtcgtataattggttcaacaggtgctgaggttctccaatctatgttaccctgggttacatcagttctcactcaagaggagcagaacaaaatgcttgatatgtggaagcaagctacaaaaaatacaatgtttggggaatggctaaacgagtggtggaagggagctggaacagcatctgattcttcagcagaggcgtcctctgctccagaagtcatttacaagataagcttgaacaaaatgaccagatgttcaagcctggctggaaggacatatttcgaatgaatcagagtgaacttgaggctgaggtgcgaaaggtttcacgagattctacacttgacccaaggcggaaggcgtatctaattcaaaatctcatgacaagccgctggatagctgcacagcagaagttaccagaaccaaattctgaagaatgtaatcacgatgccagtatacctggatgtgcaccttcataccgagaccaggagaaacaaatttatggttgtgaacactacaaacggaactgcaaacttgttgctgcatgctgcaacaagctcttcacatgcaggttctgccatgataaagttagtgaccatacgatggaaaggtaaattctatggcctgtaagtcaattatttttatcttgtttgtgccagaggtactgtgctttgggttcttttcctttaaacctcgattctttctccaaacgagtgtactatgataaaaaagatggaaggtgtgtaagaagtagagaaccttctgttaaaatgttccccctggtttgctgctcttcattgtatatggttgcaacttcctgttcatgtgtggttgtagtgtgggcttgcaattcagtccaaccttttgaatgtattatctttagttctcttgtaaacctcttaacactgttgaaaacaaaatttgttacagtccttgtgtcgatgtgcattttctcttctatacttttgcaacacattttagaaagtataacgagccaactcatcttgatgtctcaaggaaagcaacacaggagatgatgtgcatggtatgcctaaagattcaacctgttggttcgttctgccaaaccccatcttgcaacagactatcgatggcaaagtactactgtaacatctgtaaattttttgatgatgaaaggactgtgtaccactgtccgttttgtaatttgtgtcgtcttgggaaaggtcttggtgttgatttcttccattgcatgaaatgcaactgctgccttggaatgaaattaactgagcacaaatgtcgggaaaaagggctagagacaaattgtccaatatgctgtgacttcctatttacatcaagtgccgcagtcagagccctcccttgtggccacttcatgcattcagcttgctttcaggcatacacttgtagtcactacacttgccctatctgctgcaaatccttgggagatatggcggtttattttggcatgcttgatgccttgttggcggctgaagagcttccggaggaataccgtgatcggtgtcaggatatactttgcaatgactgtgagaggaaaggtagatgtcgatttcattggttataccacaaatgcggctcctgtgggtcgtacaacacccgagttatcaagactgccacagcagattgctctacaccaaactagttggagggaacatttgtgcttaattagtcactgtattctttgtttctctttgtacatatcttctagagagaaggaaaaagagaagttgtgtagcatagttataccataatttcattcgtagccatttcagttttgtaagtgtagcagtttacaatttactaggtctagtgcgttatactgacaaaattgacggttctgatggaagaacataacctgaggaaattggcttgttagaagtactcgtgagcatgttctgcaatttggcggccacttagactatcttcaattatatcttctatattccttctctatatccctcttttatggactcttaaaagatttctttctttatatctatctcttctatacgttaattaacttacaagagatatattttgatctaga

SEQ ID NO: 77493 - DNA, 4585 bp, Zea Mays
gatatgaataattttttaaaagaatcatccgacagtttatttaaataattatctaaatatagacatcttcttctgttcctgtgttatcgttagacaaagatagaaaaagtaaataacttttcagagtgcaaataagatatagaaaatctattggatgcgagacctacctagccaaccgcttcaaatcaaagttcaaacctacaacaagcagtaaaataaccacacagacgagacggcaacacacacattgagagctctaccgagcgaaagagacccaggaaaagccaacgggacgccaaatccattcctcctccctcgtccacaggccgtgagggccgaacccgaagccagccgaggaagccaggcgacaggcgacgccaagtcgagaagagcctaggtggtcgctcgcgggctgcgagggagagccgtggcggagtcgccgtcgtcgcccacggaggaggacacggccgccgccgccgcagtggcatggcgacgccgacgcccatgcctggaggcgaggggacgctcgcagcggtgatgccgcggtccccgtctccgacgccggcggaggcggggacctcggcgaccgagacgcccgtgctgatattcctttactttcacaaggcgatccgcgcggagctcgaggcgctgcacggcgccgccgtgctcctggccaccgagcgcaccggcgatgtagagatgctcgccaagcgctgccgcttcttcttcaacatttacaaacaccactgcgacgccgaggatgcggtcatttttccagcactcgatatccgagtaaagaatgttgcagggacctattccttagagcataaaggagaaagcgatctttttagccagttatttgatctcctgcaattggacatacataatgatgatggtcttcgtagggagcttgcgtcatgcacaggcgcgatacagacatgtctcagccaacatatgtccaaggaggaagaacaggtctttccattgcttacaaagaaattttcgtgtgaagaacaagctgatttagtgtggcaattcctatgcaacattcctgtcaatatggtggcagagttccttccatggctttcaacttctgtcacatctgatgagcaccaagatatccgtaactgcttatgcaaagtagttcctgatgagaaacttctccaacaggttgtattcacatggatggaagggaaagcaacaagagaagtggcagagagcattgctgctggtatttcagcaagaaataatagtgttgaggatgtcccagaccaagggaagattcatatttgtttacatcacaattctaaacttgggagtaaaaactgtggagaatctaatggtcctcaggctgacaagcatcctatagatgatattttatactggcacaatgctattcgtatggagttacgtgatataaaagaggagacaagaagggtgcagcaatctggggatttttctgatatatcagccttcaatgagaggcttcagttcattgcagatgtatgcatctaccacagtatcgctgaggatcaggttgtttttcctgcagtcgatagtgagctgtcctttgtgcaggagcatgctgaagaagaatgcaggtttaacaattttaggtgtttaattcagcaaatccaaatagcaggagccgaatcaactgcattggacttctactcaaaactgtgttcacatgctgataaaatattggaggcaatcgaaaaacacttctgcaatgaagaaaccaaggtgcttcctcaagctaggatgctcttctctcttgagaagcaaagggaactttcatacaaaagtttgtgtgttatgccattgaaattattggaacgtgttttgccgtggttggtgtcgaagctgagtgatgttcaggcaacttcatttcttcagaatatacgcttggcagcatcaccatctgaaactgcactggtcactcttatctctggttgggcatgcaaaggccgggataaatccaaagatggagaatatttatgcttaacatcaggtgcggcgagatgtctatcagatgatgtagatgatctgggaaaatgccgatcattctgtccatgtgcttcacccaacagctcagatctttctctgcagctacatactgagaatgattctaggccaggcaagcgaggaaaagatgcagtatctttttctcatactaatggaatctactgctctcaaactgctgacattgaagcaattccatgtagcaaaaaaccatgttgtattcctggtttgagagtagagagtagcaatcttggtattggttccttggcttctgcaaagtcttttcactctttatcatacaattcaactgctccttcactatattcgagcctcttttcatgggagacagatacatcattgtcttgttcggacagcatttcaaggccaatcgatacaatattcaaatttcataaggcaattcgcaaggatttagaatacttagatgttgaatctggcaagctcattgatggcaacgagtcctgccttcgccaattcattggaaggttccgtttgttatggggtctttacagggctcacagcaatgctgaggatgaaattgtgtttccagcattggaatccagagaaacattacacaatgtgagccattcatatactcttgaccacaagcaggaagaacagttgtttgaagatatctcaaatgttctctttcaactttcacaactacatgatagccagggccatgcccagactgaagttaatgaagtaaagaaaagctgtttccattcatctaatgatgtcgattttgctagaaagtataatgaacttgccacaaaacttcagggcatgtgcaagtctatccgggtcgccttgactaatcatgtccatagagaagaacttgaattatggccgttgtttgataaacatttttctgtggaggagcaagataaacttgtaggtcgtataattggttcaacaggtgctgaggttctccaatctatgttaccctgggttacatcagttctcactcaagaggagcagaacaaaatgcttgatatgtggaagcaagctacaaaaaatacaatgtttggggaatggctaaacgagtggtggaagggagctggaacagcatctgattcttcagcagaggcgtcctctgctccagaagatagtcatttacaagataagcttgaacaaaatgaccagatgttcaagcctggctggaaggacatatttcgaatgaatcagagtgaacttgaggctgaggtgcgaaaggtttcacgagattctacacttgacccaaggcggaaggcgtatctaattcaaaatctcatgacaagccgctggatagctgcacagcagaagttaccagaaccaaattctgaagaatgtaatcacgatgccagtatacctggatgtgcaccttcataccgagaccaggagaaacaaatttatggttgtgaacactacaaacggaactgcaaacttgttgctgcatgctgcaacaagctcttcacatgcaggttctgccatgataaagttagtgaccatacgatggaaagcaacacaggagatgatgtgcatggtatgcctaaagattcaacctgttggttcgttctgccaaaccccatcttgcaacagactatcgatggcaaagtactactgtaacatctgtaaattttttgatgatgaaaggactgtgtaccactgtccgttttgtaatttgtgtcgtcttgggaaaggtcttggtgttgatttcttccattgcatgaaatgcaactgctgccttggaatgaaattaactgagcacaaatgtcgggaaaaagggctagagacaaattgtccaatatgctgtgacttcctatttacatcaagtgccgcagtcagagccctcccttgtggccacttcatgcattcagcttgctttcaggcatacacttgtagtcactacacttgccctatctgctgcaaatccttgggagatatggcggtttattttggcatgcttgatgccttgttggcggctgaagagcttccggaggaataccgtgatcggtgtcaggatatactttgcaatgactgtgagaggaaaggtagatgtcgatttcattggttataccacaaatgcggctcctgtgggtcgtacaacacccgagttatcaagactgccacagcagattgctctacaccaaactagttggagggaacatttgtgcttaattagtcactgtattctttgtttctctttgtacatatcttctagagagaaggaaaaagagaagttgtgtagcatagttataccataatttcattcgtagccatttcagttttgtaagtgtagcagtttacaatttactaggtctagtgcgttatactgacaaaattgacggttctgatggaagaacataacctgaggaaattggcttgttagaagtactcgtgagcatgttctgcaatttggcggccacttagactatcttcaattatatcttctatattccttctctatatccctcttttatggactcttaaaagatttctttctttatatctatctcttctatacgttaattaacttacaagagatatattttgatctaga

SEQ ID NO: 77494 - DNA, 805 bp, Zea Mays
aagggatcctgcatcaggcctgtcctcgaggaacaaaaggaaactacattgggggcttgacattaaagaacgatgggaaagaaaggcaaacatgtaaaaatatctgaagatccaacaacaaaagcatatccacaccgcactcatttgaaatttgaaagctgagggacaaaacaaagcggccgaccttttccacggatcatcatgttgctggtaaaggtttgtcagctagcagaactgatcagtaagctagtatctaatttttcagtgttttgtctaacgttttctccagacgtttggttgggactttgctctgttgtattgtccgatccaaacttgcaaagttcaagtgcgatgataatttgtttattgctgtgtgatatagtttgggtttgtttgtcctctttttgtgtgagaaaaggtactgatggtgcaacacaggcccatgtgcacaatggaacatagttgttgctgatgatactagtgtatatagaagattatttctcatatgcttctcgcaacttgctggtgcggcttgtttacaagaatgaagcaggtgaaggcaaatcgtgcaataagttatcgacggaccgcatacagatctcgcccccaggatgtgcccatttttaaatcctcgagcgcctttggcctggtccatctgggaccttttgcgatggtttccgttcgtactatgctgtcctgtcaacgcaagtactatatatatgtacttgaagttgtatctgcaaacttgccagcgaagtggtggtgtataaaaaaaataaagatttgattaaatgcttcacgtttg

SEQ ID NO: 77495 - DNA, 1084 bp, Zea Mays
tgcccttctggctcctggaattacacaagaaacggttacagataactgaaaagccgaagtataaaagaaaaccgaaaggaaccactgagagaagtatcaaagtaaccagcaattataaattcactgataaggatgcatctgctgatagttctccaagagatgtgcatcatatgtcatcagttacaggaattcaagggaaggcaaggtaggtggacaatatcggcttcgagctctggtatacagggacaactgtagacagaaatggacgtgagaagacaagaaggatcctgcatcaggcctgtcctcgaggaacaaaaggaaactacattgggggcttgacattaaagaacgatgggaaagaaaggcaaacatgtaaaaatatctgaagatccaacaacaaaagcatatccacaccgcactcatttgaaatttgaaagctgagggacaaaacaaagcggccgaccttttccacggatcatcatgttgctggtaaaggtttgtcagctagcagaactgatcagtaagctagtatctaatttttcagtgttttgtctaacgttttctccagacgtttggttgggactttgctctgttgtattgtccgatccaaacttgcaaagttcaagtgcgatgataatttgtttattgctgtgtgatatagtttgggtttgtttgtcctctttttgtgtgagaaaaggtactgatggtgcaacacaggcccatgtgcacaatggaacatagttgttgctgatgatactagtgtatatagaagattatttctcatatgcttctcgcaacttgctggtgcggcttgtttacaagaatgaagcaggtgaaggcaaatcgtgcaataagttatcgacggaccgcatacagatctcgcccccaggatgtgcccatttttaaatcctcgagcgcctttggcctggtccatctgggaccttttgcgatggtttccgttcgtactatgctgtcctgtcaacgcaagtactatatatatgtacttgaagttgtatctgcaaacttgccagcgaagtggtggtgtataaaaaaaataaagatttgattaaatgcttcacgtttg

SEQ ID NO: 77496 - DNA, 999 bp, Zea Mays
gtgcccttctggctcctggaattacacaagaaacggttacagataactgaaaagccgaagtataaaagaaaaccgaaaggaaccactgagagaagtatcaaagtaaccagcaattataaattcactgataaggatgcatctgctgatagttctccaagagatgtgcatcatatgtcatcagttacaggaattcaaggggatcctgcatcaggcctgtcctcgaggaacaaaaggaaactacattgggggcttgacattaaagaacgatgggaaagaaaggcaaacatgtaaaaatatctgaagatccaacaacaaaagcatatccacaccgcactcatttgaaatttgaaagctgagggacaaaacaaagcggccgaccttttccacggatcatcatgttgctggtaaaggtttgtcagctagcagaactgatcagtaagctagtatctaatttttcagtgttttgtctaacgttttctccagacgtttggttgggactttgctctgttgtattgtccgatccaaacttgcaaagttcaagtgcgatgataatttgtttattgctgtgtgatatagtttgggtttgtttgtcctctttttgtgtgagaaaaggtactgatggtgcaacacaggcccatgtgcacaatggaacatagttgttgctgatgatactagtgtatatagaagattatttctcatatgcttctcgcaacttgctggtgcggcttgtttacaagaatgaagcaggtgaaggcaaatcgtgcaataagttatcgacggaccgcatacagatctcgcccccaggatgtgcccatttttaaatcctcgagcgcctttggcctggtccatctgggaccttttgcgatggtttccgttcgtactatgctgtcctgtcaacgcaagtactatatatatgtacttgaagttgtatctgcaaacttgccagcgaagtggtggtgtataaaaaaaataaagatttgattaaatgcttcacgtttg

SEQ ID NO: 77497 - DNA, 1247 bp, Zea Mays
gggcgctctcggtctcggccatggaggccgcaagcaatcaggagccggggagatgcggcggcgacgacgacgaggcgaagaggagggaggcagagcttgcgtcaagcaggctcctcgacccggggttcaagccctccaaactatcccaggaccggctcgacaagtttaagagaaaaagaagccgatgccagctatatacgcaaaagcacaaatgcacaatgaatctatcaaatcaaagaagaggcccaactgagaaaagtgcaacagaattacacaagaaacggttacagataactgaaaagccgaagtataaaagaaaaccgaaaggaaccactgagagaagtatcaaagtaaccagcaattataaattcactgataaggatgcatctgctgatagttctccaagagatgtgcatcatatgtcatcagttacaggaattcaaggggatcctgcatcaggcctgtcctcgaggaacaaaaggaaactacattgggggcttgacattaaagaacgatgggaaagaaaggcaaacatgtaaaaatatctgaagatccaacaacaaaagcatatccacaccgcactcatttgaaatttgaaagctgagggacaaaacaaagcggccgaccttttccacggatcatcatgttgctggtaaaggtttgtcagctagcagaactgatcagtaagctagtatctaatttttcagtgttttgtctaacgttttctccagacgtttggttgggactttgctctgttgtattgtccgatccaaacttgcaaagttcaagtgcgatgataatttgtttattgctgtgtgatatagtttgggtttgtttgtcctctttttgtgtgagaaaaggtactgatggtgcaacacaggcccatgtgcacaatggaacatagttgttgctgatgatactagtgtatatagaagattatttctcatatgcttctcgcaacttgctggtgcggcttgtttacaagaatgaagcaggtgaaggcaaatcgtgcaataagttatcgacggaccgcatacagatctcgcccccaggatgtgcccatttttaaatcctcgagcgcctttggcctggtccatctgggaccttttgcgatggtttccgttcgtactatgctgtcctgtcaacgcaagtactatatatatgtacttgaagttgtatctgcaaacttgccagcgaagtggtggtgtataaaaaaaataaagatttgattaaatgcttcacgtttg

SEQ ID NO: 77498 - DNA, 1135 bp, Zea Mays
gggcgctctcggtctcggccatggaggccgcaagcaatcaggagccggggagatgcggcggcgacgacgacgaggcgaagaggagggaggcagagcttgcgtcaagcaggctcctcgacccggggttcaagccctccaaactatcccaggaccggctcgacaagtttaaggaattacacaagaaacggttacagataactgaaaagccgaagtataaaagaaaaccgaaagtatcaaagtaaccagcaattataaattcactgataaggatgcatctgctgatagttctccaagagatgtgcatcatatgtcatcagttacaggaattcaaggggatcctgcatcaggcctgtcctcgaggaacaaaaggaaactacattgggggcttgacattaaagaacgatgggaaagaaaggcaaacatgtaaaaatatctgaagatccaacaacaaaagcatatccacaccgcactcatttgaaatttgaaagctgagggacaaaacaaagcggccgaccttttccacggatcatcatgttgctggtaaaggtttgtcagctagcagaactgatcagtaagctagtatctaatttttcagtgttttgtctaacgttttctccagacgtttggttgggactttgctctgttgtattgtccgatccaaacttgcaaagttcaagtgcgatgataatttgtttattgctgtgtgatatagtttgggtttgtttgtcctctttttgtgtgagaaaaggtactgatggtgcaacacaggcccatgtgcacaatggaacatagttgttgctgatgatactagtgtatatagaagattatttctcatatgcttctcgcaacttgctggtgcggcttgtttacaagaatgaagcaggtgaaggcaaatcgtgcaataagttatcgacggaccgcatacagatctcgcccccaggatgtgcccatttttaaatcctcgagcgcctttggcctggtccatctgggaccttttgcgatggtttccgttcgtactatgctgtcctgtcaacgcaagtactatatatatgtacttgaagttgtatctgcaaacttgccagcgaagtggtggtgtataaaaaaaataaagatttgattaaatgcttcacgtttg

SEQ ID NO: 77499 - DNA, 1101 bp, Zea Mays
gggcgctctcggtctcggccatggaggccgcaagcaatcaggagccggggagatgcggcggcgacgacgacgaggcgaagaggagggaggcagagcttgcgtcaagcaggctcctcgacccggggttcaagccctccaaactatcccaggaccggctcgacaagtttaaggaattacacaagaaacggttacagataactgaaaagccgaagtataaaagaaaaccgaaaggaaccactgagagaagtatcaaagtaaccagcaattataaattcactgataaggatgcatctgctgatagttctccaagagatgtgcatcatatgtcatcagttacaggaattcaaggggcttgacattaaagaacgatgggaaagaaaggcaaacatgtaaaaatatctgaagatccaacaacaaaagcatatccacaccgcactcatttgaaatttgaaagctgagggacaaaacaaagcggccgaccttttccacggatcatcatgttgctggtaaaggtttgtcagctagcagaactgatcagtaagctagtatctaatttttcagtgttttgtctaacgttttctccagacgtttggttgggactttgctctgttgtattgtccgatccaaacttgcaaagttcaagtgcgatgataatttgtttattgctgtgtgatatagtttgggtttgtttgtcctctttttgtgtgagaaaaggtactgatggtgcaacacaggcccatgtgcacaatggaacatagttgttgctgatgatactagtgtatatagaagattatttctcatatgcttctcgcaacttgctggtgcggcttgtttacaagaatgaagcaggtgaaggcaaatcgtgcaataagttatcgacggaccgcatacagatctcgcccccaggatgtgcccatttttaaatcctcgagcgcctttggcctggtccatctgggaccttttgcgatggtttccgttcgtactatgctgtcctgtcaacgcaagtactatatatatgtacttgaagttgtatctgcaaacttgccagcgaagtggtggtgtataaaaaaaataaagatttgattaaatgcttcacgtttg

SEQ ID NO: 77500 - DNA, 999 bp, Zea Mays
aacccaacaacagaccgctaagcccaacccacctgctctctctctctctcgggcgctctcggtctcggccatggaggccgcaagcaatcaggagccggggagatgcggcggcgacgacgacgaggcgaagaggagggaggcagagcttgcgtcaagcaggctcctcgacccggggttcaagccctccaaactatcccaggaccggctcgacaagtttaaggaattacacaagaaacggttacagataactgaaaagccgaagtataaaagaaaaccgaaaggaaccactgagagaagtatcaaagtaaccagcaattataaattcactgataaggatgcatctgctgatagttctccaagagatgtgcatcatatgtcatcagttacaggaattcaaggggatcctgcatcaggcctgtcctcgaggaacaaaaggaaactacattgggggcttgacattaaagaacgatgggaaagaaaggcaaacatgtaaaaatatctgaagatccaacaacaaaagcatatccacaccgcactcatttgaaatttgaaagctgagggacaaaacaaagcggccgaccttttccacggatcatcatgttgctggtaaaggtactgatggtgcaacacaggcccatgtgcacaatggaacatagttgttgctgatgatactagtgtatatagaagattatttctcatatgcttctcgcaacttgctggtgcggcttgtttacaagaatgaagcaggtgaaggcaaatcgtgcaataagttatcgacggaccgcatacagatctcgcccccaggatgtgcccatttttaaatcctcgagcgcctttggcctggtccatctgggaccttttgcgatggtttccgttcgtactatgctgtcctgtcaacgcaagtactatatatatgtacttgaagttgtatctgcaaacttgccagcgaagtggtggtgtataaaaaaaataaagatttgattaaatgcttcacgtttg

SEQ ID NO: 77501 - DNA, 997 bp, Zea Mays
gctcaacccaacaacagaccgctaagcccaacccacctgctctctctctctctcgggcgctctcggtctcggccatggaggccgcaagcaatcaggagccggggagatgcggcggcgacgacgacgaggcgaagaggagggaggcagagcttgcgtcaagcaggctcctcgacccggggttcaagccctccaaactatcccaggaccggctcgacaagtttaaggaattacacaagaaacggttacagataactgaaaagccgaagtataaaagaaaaccgaaaggaaccactgagagaagtatcaaagtaaccagcaattataaattcactgataaggatgcatctgctgatagttctccaagagatgtgcatcatatgtcatcagttacaggaattcaaggggatcctgcatcaggcctgtcctcgaggaacaaaaggaaactacattgggggcttgacattaaagaacgatgggaaagaaaggcaaacatgtaaaaatatctgaagatccaacaacaaaagcatatccacaccgcactcatttgaaatttgaaagctgagggacaaaacaaagcggccgaccttttccacggatcatcatgttgctggtactgatggtgcaacacaggcccatgtgcacaatggaacatagttgttgctgatgatactagtgtatatagaagattatttctcatatgcttctcgcaacttgctggtgcggcttgtttacaagaatgaagcaggtgaaggcaaatcgtgcaataagttatcgacggaccgcatacagatctcgcccccaggatgtgcccatttttaaatcctcgagcgcctttggcctggtccatctgggaccttttgcgatggtttccgttcgtactatgctgtcctgtcaacgcaagtactatatatatgtacttgaagttgtatctgcaaacttgccagcgaagtggtggtgtataaaaaaaataaagatttgattaaatgcttcacgtttg

SEQ ID NO: 77502 - DNA, 1037 bp, Zea Mays
tgggccatagctcaacccaacaacagaccgctaagcccaacccacctgctctctctctctctcgggcgctctcggtctcggccatggaggccgcaagcaatcaggagccggggagatgcggcggcgacgacgacgaggcgaagaggagggaggcagagcttgcgtcaagcaggctcctcgacccggggttcaagccctccaaactatcccaggaccggctcgacaagtttaaggaattacacaagaaacggttacagataactgaaaagccgaagtataaaagaaaaccgaaaggaaccactgagagaagtatcaaagtaaccagcaattataaattcactgataaggatgcatctgctgatagttctccaagagatgtgcatcatatgtcatcagttacaggaattcaaggggatcctgcatcaggcctgtcctcgaggaacaaaaggaaactacattgggggcttgacattaaagaacgatgggaaagaaaggcaaacatgtaaaaatatctgaagatccaacaacaaaagcatatccacaccgcactcatttgaaatttgaaagctgagggacaaaacaaagcggccgaccttttccacggatcatcatgttgctggtaaaggtttgtcagctagcagaactgatcagtactgatggtgcaacacaggcccatgtgcacaatggaacatagttgttgctgatgatactagtgtatatagaagattatttctcatatgcttctcgcaacttgctggtgcggcttgtttacaagaatgaagcaggtgaaggcaaatcgtgcaataagttatcgacggaccgcatacagatctcgcccccaggatgtgcccatttttaaatcctcgagcgcctttggcctggtccatctgggaccttttgcgatggtttccgttcgtactatgctgtcctgtcaacgcaagtactatatatatgtacttgaagttgtatctgcaaacttgccagcgaagtggtggtgtataaaaaaaataaagatttgattaaatgcttcacgtttg

SEQ ID NO: 77503 - DNA, 1108 bp, Zea Mays
agtttttcggccttgggccatagctcaacccaacaacagaccgctaagcccaacccacctgctctctctctctctcgggcgctctcggtctcggccatggaggccgcaagcaatcaggagccggggagatgcggcggcgacgacgacgaggcgaagaggagggaggcagagcttgcgtcaagcaggctcctcgacccggggttcaagccctccaaactatcccaggaccggctcgacaagtttaaggaattacacaagaaacggttacagataactgaaaagccgaagtataaaagaaaaccgaaaggatcctgcatcaggcctgtcctcgaggaacaaaaggaaactacattgggggcttgacattaaagaacgatgggaaagaaaggcaaacatgtaaaaatatctgaagatccaacaacaaaagcatatccacaccgcactcatttgaaatttgaaagctgagggacaaaacaaagcggccgaccttttccacggatcatcatgttgctggtaaaggtttgtcagctagcagaactgatcagtaagctagtatctaatttttcagtgttttgtctaacgttttctccagacgtttggttgggactttgctctgttgtattgtccgatccaaacttgcaaagttcaagtgcgatgataatttgtttattgctgtgtgatatagtttgggtttgtttgtcctctttttgtgtgagaaaaggtactgatggtgcaacacaggcccatgtgcacaatggaacatagttgttgctgatgatactagtgtatatagaagattatttctcatatgcttctcgcaacttgctggtgcggcttgtttacaagaatgaagcaggtgaaggcaaatcgtgcaataagttatcgacggaccgcatacagatctcgcccccaggatgtgcccatttttaaatcctcgagcgcctttggcctggtccatctgggaccttttgcgatggtttccgttcgtactatgctgtcctgtcaacgcaagtactatatatatgtacttgaagttgtatctgcaaacttgccagcgaagtggtggtgtataaaaaaaataaagatttgattaaatgcttcacgtttg

SEQ ID NO: 77504 - DNA, 1322 bp, Zea Mays
ggccgcaccagtttttcggccttgggccatagctcaacccaacaacagaccgctaagcccaacccacctgctctctctctctctcgggcgctctcggtctcggccatggaggccgcaagcaatcaggagccggggagatgcggcggcgacgacgacgaggcgaagaggagggaggcagagcttgcgtcaagcaggctcctcgacccggggttcaagccctccaaactatcccaggaccggctcgacaagtttaaggaattacacaagaaacggttacagataactgaaaagccgaagtataaaagaaaaccgaaaggaaccactgagagaagtatcaaagtaaccagcaattataaattcactgataaggatgcatctgctgatagttctccaagagatgtgcatcatatgtcatcagttacaggaattcaagggaaggcaaggtaggtggacaatatcggcttcgagctctggtatacagggacaactgtagacagaaatggacgtgagaagacaagaaggatcctgcatcaggcctgtcctcgaggaacaaaaggaaactacattgggggcttgacattaaagaacgatgggaaagaaaggcaaacatgtaaaaatatctgaagatccaacaacaaaagcatatccacaccgcactcatttgaaatttgaaagctgagggacaaaacaaagcggccgaccttttccacggatcatcatgttgctggtaaaggtttgtcagctagcagaactgatcagtaagctagtatctaatttttcagtgttttgtctaacgttttctccagacgtttggttgggactttgctctgttgtattgtccgatccaaacttgcaaagttcaagtgcgatgataatttgtttattgctgtgtgatatagtttgggtttgtttgtcctctttttgtgtgagaaaaggtactgatggtgcaacacaggcccatgtgcacaatggaacatagttgttgctgatgatactagtgtatatagaagattatttctcatatgcttctcgcaacttgctggtgcggcttgtttacaagaatgaagcaggtgaaggcaaatcgtgcaataagttatcgacggaccgcatacagatctcgcccccaggatgtgcccatttttaaatcctcgagcgcctttggcctggtccatctgggaccttttgcgatggtttccgttcgtactatgctgtcctgtcaacgcaagtactatatatatgtacttgaagttgtatctgcaaacttgccagcgaagtggtggtgtataaaaaaaataaagatttgattaaatgcttcacgtttg

SEQ ID NO: 77505 - DNA, 1413 bp, Zea Mays
aaccgttcctgcatggaagaggattcattgtgcaagcgtgcaatgtcactatttgttccgtgcagtttttattagtaggattcttcacgggcctggccgcaccagtttttcggccttgggccatagctcaacccaacaacagaccgctaagcccaacccacctgctctctctctctctcgggcgctctcggtctcggccatggaggccgcaagcaatcaggagccggggagatgcggcggcgacgacgacgaggcgaagaggagggaggcagagcttgcgtcaagcaggctcctcgacccggggttcaagccctccaaactatcccaggaccggctcgacaagtttaaggaattacacaagaaacggttacagataactgaaaagccgaagtataaaagaaaaccgaaaggaaccactgagagaagtatcaaagtaaccagcaattataaattcactgataaggatgcatctgctgatagttctccaagagatgtgcatcatatgtcatcagttacaggaattcaaggggcaaggtaggtggacaatatcggcttcgagctctggtatacagggacaactgtagacagaaatggacgtgagaagacaagaaggatcctgcatcaggcctgtcctcgaggaacaaaaggaaactacattgggggcttgacattaaagaacgatgggaaagaaaggcaaacatgtaaaaatatctgaagatccaacaacaaaagcatatccacaccgcactcatttgaaatttgaaagctgagggacaaaacaaagcggccgaccttttccacggatcatcatgttgctggtaaaggtttgtcagctagcagaactgatcagtaagctagtatctaatttttcagtgttttgtctaacgttttctccagacgtttggttgggactttgctctgttgtattgtccgatccaaacttgcaaagttcaagtgcgatgataatttgtttattgctgtgtgatatagtttgggtttgtttgtcctctttttgtgtgagaaaaggtactgatggtgcaacacaggcccatgtgcacaatggaacatagttgttgctgatgatactagtgtatatagaagattatttctcatatgcttctcgcaacttgctggtgcggcttgtttacaagaatgaagcaggtgaaggcaaatcgtgcaataagttatcgacggaccgcatacagatctcgcccccaggatgtgcccatttttaaatcctcgagcgcctttggcctggtccatctgggaccttttgcgatggtttccgttcgtactatgctgtcctgtcaacgcaagtactatatatatgtacttgaagttgtatctgcaaacttgccagcgaagtggtggtgtataaaaaaaataaagatttgattaaatgcttcacgtttg

SEQ ID NO: 77506 - DNA, 1455 bp, Zea Mays
ctttttgcaaacatcatcacggtgcgcgtgaaaaaccgttcctgcatggaagaggattcattgtgcaagcgtgcaatgtcactatttgttccgtgcagtttttattagtaggattcttcacgggcctggccgcaccagtttttcggccttgggccatagctcaacccaacaacagaccgctaagcccaacccacctgctctctctctctctcgggcgctctcggtctcggccatggaggccgcaagcaatcaggagccggggagatgcggcggcgacgacgacgaggcgaagaggagggaggcagagcttgcgtcaagcaggctcctcgacccggggttcaagccctccaaactatcccaggaccggctcgacaagtttaaggaattacacaagaaacggttacagataactgaaaagccgaagtataaaagaaaaccgaaaggaaccactgagagaagtatcaaagtaaccagcaattataaattcactgataaggatgcatctgctgatagttctccaagagatgtgcatcatatgtcatcagttacaggaattcaagggggttagaaggcaaggtaggtggacaatatcggcttcgagctctggtatacagggacaactgtagacagaaatggacgtgagaagacaagaaggatcctgcatcaggcctgtcctcgaggaacaaaaggaaactacattgggggcttgacattaaagaacgatgggaaagaaaggcaaacatgtaaaaatatctgaagatccaacaacaaaagcatatccacaccgcactcatttgaaatttgaaagctgagggacaaaacaaagcggccgaccttttccacggatcatcatgttgctggtaaaggtttgtcagctagcagaactgatcagtaagctagtatctaatttttcagtgttttgtctaacgttttctccagacgtttggttgggactttgctctgttgtattgtccgatccaaacttgcaaagttcaagtgcgatgataatttgtttattgctgtgtgatatagtttgggtttgtttgtcctctttttgtgtgagaaaaggtactgatggtgcaacacaggcccatgtgcacaatggaacatagttgttgctgatgatactagtgtatatagaagattatttctcatatgcttctcgcaacttgctggtgcggcttgtttacaagaatgaagcaggtgaaggcaaatcgtgcaataagttatcgacggaccgcatacagatctcgcccccaggatgtgcccatttttaaatcctcgagcgcctttggcctggtccatctgggaccttttgcgatggtttccgttcgtactatgctgtcctgtcaacgcaagtactatatatatgtacttgaagttgtatctgcaaacttgccagcgaagtggtggtgtataaaaaaaataaagatttgattaaatgcttcacgtttg

SEQ ID NO: 77507 - DNA, 1473 bp, Zea Mays
gtatagtcaaaaaggaaagcaagaattcttgctggtgccctgggtggtggtgctgctgcgctgcttgttggtgctgccatatttttgttcgtcatcatgcgcaagaggaagcagaagaagaaagtgatcaactcgtcttcgaagctcctcaagtacagcggctctggtgggaccccgcgttcgcgggttggtgacatggagtccggcagcatcgaggacccgccaacgcaccacttcacctacgaggagctcgaggaggcgaccaaccgcttcgacgaaagcagagaactcggcgatggcggcttcggcaccgtctacaaagggtacctcagggacgggcgcgtggtggcggtgaagcggctgtacaacaacgggtaccggcgcgtggagcagttccagaacgaggcggccatcctgtcggggctgcgccaccccaacctcgtcatgttctacggctgcacgtccagccacagccgcgagctccttctggtgtacgagttcgtggccaacggcacggtcgccgaccacctgcacgggcagcgggcccccgagcgcgccctctcgtggccgctccgcctcagcgtcgccgtggagtccgccgcggcgctcacctacctgcacgccatcgagccgcccgtcgtgcaccgcgacgtcaagaccaccaacatcctcctggacgccgactaccacgtcaaggtcgccgacttcggcctctcccgcctcttccccctcgacgtcacgcacgtctccaccgctccgcagggcacgccagggtatgttgatccagagtaccaccagtgctaccagctgacggacaagagcgacgtgtacagcttcggggtggtcctggtggagctcatctcgtccaagccggccgtcgacatcacccggcaccgcagcgagatcaacctggccagcatggccatcagcaagatccagaagtgccagctggaggagctcgtcgacctcggcctgggctacgacaccgacccggccaccaggaagatgatgacgatggtcgcggagctggccttccgctgcctgcagcagaacggcgagatgcgcccgccgatcaaggaggtgctcgaggtgctcaggaacatccagggcgagtgtctgacgtcggggaaggatggggacaagagcaaggacgggcccttctctcccaccacggttcacgctccgtgggacagcaggtccacgacgcccaacaccagcagggactaggatagttagtgcttgaggactgagaccggccgaggtttaattcgtgtctgtattgctgctgtgtgactgctaggcatgccatctgttttcaggcttcgtagttagttcctggtgatgtaaatatttgttttgttggtgctgtcaggacagagggaatgcacatacatgtgtaagagtggcgaatggtattatacatatatatacacgggtacttactgaataaatagatagatgtcgcttgtgact

SEQ ID NO: 77508 - DNA, 2319 bp, Zea Mays
cctccctcggcttccccccgttcacacgcgatggctcctctgctcctgctcctgctcctcttccccgtccagctccagctcctgctcctcctagccgtagccgacgccgtccccggtctctgcgccagagccacatgcgccggccatgtcatccagtacccgttctggctcaactcctcggcgcccgactgcggccaccgccacgggatcggccttgtctgcgagggcaactcgacgctgaccctcccctacatgtcccacagatacgtagtgtccagcatcgactacaagacgcgtaccgtgctggtctcggacgccgacatcggcgacgagtacgacgcggccggctgcccgcgtgtccgggtgaacctcaccatcgacaccgcctggctgcggcccgcggcctccgacgccaacatcaccttcctgtacgactgcaagaagagcatcaccctgccctccgccgtggaactgagtgggtgccattggcaacagcagcagcagcaacaggattattgccgtaggtcgtacgtgctgccggacggcgggatcacgggcgcggaggcgcaccagtacgggtgcgaggacgtggtggtggcgccggtgctggacgcgcacaggagggagatcctgggcgcgcccccggcgaacggatccctccgccgggtgctgcagggcgggttcgagctgaactacgacacccactccgagctgtgcgaccggtgcggggcctccggcgggtggtgcggctaccgacgcgacgaggcgcccgccgccggcgccggcggcgggctgacgttcgcctgcttctgcgacggcggcccgacgaccacgggcctgtgcggtgccgagtcaaaaaggaaagcaagaattcttgctggtgccctgggtggtggtgctgctgcgctgcttgttggtgctgccatatttttgttcgtcatcatgcgcaagaggaagcagaagaagaaagtgatcaactcgtcttcgaagctcctcaagtacagcggctctggtgggaccccgcgttcgcgggttggtgacatggagtccggcagcatcgaggacccgccaacgcaccacttcacctacgaggagctcgaggaggcgaccaaccgcttcgacgaaagcagagaactcggcgatggcggcttcggcaccgtctacaaagggtacctcagggacgggcgcgtggtggcggtgaagcggctgtacaacaacgggtaccggcgcgtggagcagttccagaacgaggcggccatcctgtcggggctgcgccaccccaacctcgtcatgttctacggctgcacgtccagccacagccgcgagctccttctggtgtacgagttcgtggccaacggcacggtcgccgaccacctgcacgggcagcgggcccccgagcgcgccctctcgtggccgctccgcctcagcgtcgccgtggagtccgccgcggcgctcacctacctgcacgccatcgagccgcccgtcgtgcaccgcgacgtcaagaccaccaacatcctcctggacgccgactaccacgtcaaggtcgccgacttcggcctctcccgcctcttccccctcgacgtcacgcacgtctccaccgctccgcagggcacgccagggtatgttgatccagagtaccaccagtgctaccagctgacggacaagagcgacgtgtacagcttcggggtggtcctggtggagctcatctcgtccaagccggccgtcgacatcacccggcaccgcagcgagatcaacctggccagcatggccatcagcaagatccagaagtgccagctggaggagctcgtcgacctcggcctgggctacgacaccgacccggccaccaggaagatgatgacgatggtcgcggagctggccttccgctgcctgcagcagaacggcgagatgcgcccgccgatcaaggaggtgctcgaggtgctcaggaacatccagggcgagtgtctgacgtcggggaaggatggggacaagagcaaggacgggcccttctctcccaccacggttcacgctccgtgggacagcaggtccacgacgcccaacaccagcagggactaggatagttagtgcttgaggactgagaccggccgaggtttaattcgtgtctgtattgctgctgtgtgactgctaggcatgccatctgttttcaggcttcgtagttagttcctggtgatgtaaatatttgttttgttggtgctgtcaggacagagggaatgcacatacatgtgtaagagtggcgaatggtattatacatatatatacacgggtacttactgaataaatagatagatgtcgcttgtgact

SEQ ID NO: 77509 - DNA, 2314 bp, Zea Mays
tcgccactgggagttgacgccgctcggtcgtcccactttgtgacgttcaaccagagtctagagatgtaattctctgcgaatacaggactagttggagctaacaacgcagcttgacgagggtgaacccagctccacacctcgtctaccacgtcttctcctcgccatggctgctcacctaccacgcctccccgtcctcctcctcgtcctcctcgctgcccatgtcgtctccacctccacccgtgccgagcctcttcttcccagcacttacaacgtctccatgtgctcggaatcgttctggtgcggcggcgtcgagatccgctacccgttctatcttgccaacgcaaccgccgactacagcgggagctactactcctgcggctacaccgacttgagcgtttcctgcgaactcgaggtcgaggggccgccgacgacctggacccctaccatccgtctcggcggcgacaactacaccgtcaagaacatcttgtacgactatcataccatctcactggcggacagcgatgtgctcggaggcggcgagtgccccgtcgtccgccacaacgtcagcttcgacgagacgtggctgcacaacgccagcgccttcaacaacctcaccttcttcttcggatgccactgggggccacgcgatacactgcctgaatttgccggctataacatcagctgcgacgggttcagtactccaactatcagcggtggaggctccttcgtgttcaagactgaagatcttgacgaacaagaggagcaggatttcgcttcacactgcgacgaggttttctccgtgccagtgggaagcgaggctctgcgggcgaccgacaccttcagcctctcaaggtacgggtacggcgagctgcttaggcaggggttcgagttggaatggaatcggacatcggaggatcagtgtggccagtgcgagggatcgagctccggcggacggtgcgcctacaaccagaagagagaattcctgggctgcttgtgcagcggagggaaggcgggcaacccgttctgcaaaccctcaagatcaaaaaggaatgaaggacctattgttggtgctgttgttgccgttgcattcctgtgtctagtcattctcacatgcttcttggcttgtagacatggttcgctgcccttcaaatcgaagaacaaaccagggacaaggattgagtccttcctacagaagaacgagagtagtatacatccgaaaagatacacctacgcggacgtgaaaagaatgacaaaatccttcgctgtgaagctaggccaaggtgggtttggtgctgtatacaaaggcagcctccacggccgacaggtagcagtcaagatgctgaaggacacccaaggtgacggcgaggaattcatgaacgaggtggctagcatcagcaggacttctcatgtcaacgtcgtgacacttctagggttttgcttgcaagggtcgaaaagagcactgatctacgagtacatgcccaatggttcgctcgaaaggtatgccttcaccggtgacatgaacagtgagaatttgctaagctgggaaagactatttgacatagcgattggcacggccagagggctcgaatacctacaccggggatgcaacactcggatcgtgcattttgacatcaagccacacaacatcctgttagaccaggatttctgccctaagatctctgactttggactggccaagctatgtctgaacaaagagagcgctatctccattgttggcgcaagagggacgatagggtatatcgccccggaggtctactcaaagcaatttggaacgataagcagcaagtctgatgtctatagctatgggatgatggtccttgagatggttggagcaagggacaggaatacaagcgcagatagtgaccatagcagccaatatttccctcagtggctttatgaacatttggacgactattgtgttggtgcttccgagattaatggtgagaccacagagctcgtgaggaagatgatagttgtaggtctgtggtgcatacaagtgattccgactgatcggccaacaatgacgagagtcgtcgagatgttggaagggagcacaagtaatctagagttgccacccagagttctcttgagctgacaaagcgtagatatttttcctatcaaatgctgcttccaggtcacacaaatgcaaatatttgtggagacgagtgcccagtaacctcatacactgtatctgtatgacaaaagtcccacgactcactggacacggaaatgtcgcttgactacgccaattttctaaaaagattggcacaattaatggggcttatagcggtaa

SEQ ID NO: 77510 - DNA, 2687 bp, Zea Mays
atgtcatccgaggcggtgaaggtgacaatgctagaatcgatgttccgcagacggaagcgtgaggagcagtgggctgtcaagaagaagaaggccatgcccgagaagaagaagtccatcgagagacgcaagctcatattcagtcgtgcaaagcggtgtattccggggtcaatcggactacagtgctgttggaggaagggaaccggacaaatcaccccgtcgtctcgtcccgtagtcactcgcagagtcgcagtcgcagcccctgcgcccaccgggatcgtgatggagagctgggtccgcgcggtggtggaggccatccactcctctcgctcccagacagtcatctacctcgccggcggtgcatcccaggcgctcggttggctcctctccgtgcccggcgcttcgggcaccgtcctcgaggtcgtcgtgccctactctagggcctccatggcgcagctccttggcaagatgcccctgcaattcactagcaagcaggctgcagaggacatggcactggccgcatacaatcgagcactcaagctttctggaccaggtctgcaagttatgggtgttggatttactgggtcactggcgagctcacgtccaaaacatggtgaccacaggttttacgtgtcaacatggacacataattgtctcaggacatcacatgttaccttgtcgaagggtttacggagtagggaggaagaagacaaggtttcaagctactttttgcttaaggcaatagcagatacctgcagagtttctgcaaccattcagtcagacattcacaaatctgaaattccagaagaaatcatggaacaatttgatgaagatcaagaactccagcaagttattaatgggcaagtttgcatgaaagtatataattttgctgctccggcggaaagtaacttgaacagaaaaataattctgcctggttcgttcaaccccttgcacgatggtcaccttagattgctagaagctgcagtaagaaattaagaggcgtgttgagcaatttagaaaagcagggaagaatgtgattatatctaaccagccatacttctataagaaagcagaacttttcccaggaagcgcttttataattggtgcagacactgcagcaaggcttgttaaccctaagtactatggaggagattacaacagaatgctggagatacttctcgaatgtaagagcatagggactacttttcttgttggtggtcgaaagattgaaggagatttcaaggtccttgagaacttagacattccagaagagctgagagaaatgttcatttctattccggaggaaaagtttcgcatagatatttcatctactgaaataagaaagagccaagggctctgatgtatcaagtggtcgtattctacagcagatttgggatgattctccacgactatagaaggtacatttggatgctagcagtcaagtctgaattctccaagcttacttttttcacatttgtggggttgtattcacgcattctattgcagattatgataggtccattcatgcatccttgcaaaggaactgttgatgtattctcagggagaatattttatttaacttttgtcttgactgggccccttggtattttgttcagcaaattggaatcaatcctcttgtagaacctcttgatgtcttcactaccccttgcggctaggtggtcaacctctgtctcatatctttggtacaacgctggcaaagtgtgggcgcagagaaatcctgtggatgaaatataagaattgttaaatgtatgtcataactgctttatatattgtcttgccttgttataaaagtcacaattttctgcgctactcaccaagatatagaagacttgtgaagctgtaagaacttacaacctctgacactattagcagtgacaagaccaccttagaatcagaaacagaacattgttagcgcaagactacaacatcgtagatttccaagaactctattagattgttgaatagcatcaaagtaatggcatagccgttcagtgctttgggatgttcaagtttaacttaaattccaagaatcacacatgtcagatctttgcagtgttctctatcttcgcactgtaacaattgccacatgattttctcataaacgtagcaaagtaaatgtaccaggaggaatttcttcagatccttcccgcatgcaatgtcataaagagcagacacggtgtgtgccagtttgtaatggatgatctgtgctatttgtcggaaggcatgctcagagatgatcacttctgggatccttggaggagctctgcaacgcaaaactgggaagtctcgtacatgttcaagaggggcgcagcattcgaccagatgaagacgacgagcatggccaggatggctatctggcaaacgagcggtacaatgctgtactcaactacctcgaacaggtaccataccaacgtggccccagcgagcaggcctgcagacaaattcctgtccttccacagcaagatgtccgcggctgcgagaggcacagataacaacgggggtccatgagtaaaccgggccatgacgcacgcagatggcgtcgcctagctaatagtttcccagaaagaacaagaacagcagagagcagcagcgtacgtacctcgccctccaccgagaagctgatgaatcggcttgcgcctgctatggccgccgccgccgcccacccctcg

SEQ ID NO: 77511 - DNA, 2034 bp, Zea Mays
atgtcatccgaggcggtgaaggtgacaatgctagaatcgatgttccgcagacggaagcgtgaggagcagtgggctgtcaagaagaagaaggccatgcccgagaagaagaagtccatcgagagacgcaagctcatattcagtcgtgcaaagcggtgtattccggggtcaatcggactacagtgctgttggaggaagggaaccggacaaatcaccccgtcgtctcgtcccgtagtcactcgcagagtcgcagtcgcagcccctgcgcccaccgggatcgtgatggagagctgggtccgcgcggtggtggaggccatccactcctctcgctcccagacagtcatctacctcgccggcggtgcatcccaggcgctcggttggctcctctccgtgcccggcgcttcgggcaccgtcctcgaggtcgtcgtgccctactctagggcctccatggcgcagctccttggcaagatgcccctgcaattcactagcaagcaggctgcagaggacatggcactggccgcatacaatcgagcactcaagctttctggaccaggtctgcaagttatgggtgttggatttactgggtcactggcgagctcacgtccaaaacatggtgaccacaggttttacgtgtcaacatggacacataattgtctcaggacatcacatgttaccttgtcgaagggtttacggagtagggaggaagaagacaaggtttcaagctactttttgcttaaggcaatagcagatacctgcagagtttctgcaaccattcagtcagacattcacaaatctgaaattccagaagaaatcatggaacaatttgatgaagatcaagaactccagcaagttattaatgggcaagtttgcatgaaagtatataattttgctgctccggcggaaagtaacttgaacagaaaaataattctgcctggttcgttcaaccccttgcacgatggtcaccttagattgctagaagctgcagtaagcatgtgtgatgatgggcttccattctttgagatatcagcaattaatgctgataaacctccactatctattgcagaaattaagaggcgtgttgagcaatttagaaaagcagggaagaatgtgattatatctaaccagccatacttctataagaaagcagaacttttcccaggaagcgcttttataattggtgcagacactgcagcaaggcttgttaaccctaagtactatggaggagattacaacagaatgctggagatacttctcgaatgtaagagcatagggactacttttcttgttggtggtcgaaagattgaaggagatttcaaggtccttgagaacttagacattccagaagagctgagagaaatgttcatttctattccggaggaaaagtttcgcatagatatttcatctactgaaataagaaagagccaagggctctgatgtatcaagtggtcgtattctacagcagatttgggatgattctccacgactatagaaggaggaatttcttcagatccttcccgcatgcaatgtcataaagagcagacacggtgtgtgccagtttgtaatggatgatctgtgctatttgtcggaaggcatgctcagagatgatcacttctgggatccttggaggagctctgcaacgcaaaactgggaagtctcgtacatgttcaagaggggcgcagcattcgaccagatgaagacgacgagcatggccaggatggctatctggcaaacgagcggtacaatgctgtactcaactacctcgaacaggtaccataccaacgtggccccagcgagcaggcctgcagacaaattcctgtccttccacagcaagatgtccgcggctgcgagaggcacagataacaacgggggtccatgagtaaaccgggccatgacgcacgcagatggcgtcgcctagctaatagtttcccagaaagaacaagaacagcagagagcagcagcgtacgtacctcgccctccaccgagaagctgatgaatcggcttgcgcctgctatggccgccgccgccgcccacccctcg

SEQ ID NO: 77512 - DNA, 2761 bp, Zea Mays
atgtcatccgaggcggtgaaggtgacaatgctagaatcgatgttccgcagacggaagcgtgaggagcagtgggctgtcaagaagaagaaggccatgcccgagaagaagaagtccatcgagagacgcaagctcatattcagtcgtgcaaagcggtgtattccggggtcaatcggactacagtgctgttggaggaagggaaccggacaaatcaccccgtcgtctcgtcccgtagtcactcgcagagtcgcagtcgcagcccctgcgcccaccgggatcgtgatggagagctgggtccgcgcggtggtggaggccatccactcctctcgctcccagacagtcatctacctcgccggcggtgcatcccaggcgctcggttggctcctctccgtgcccggcgcttcgggcaccgtcctcgaggtcgtcgtgccctactctagggcctccatggcgcagctccttggcaagatgcccctgcaattcactagcaagcaggctgcagaggacatggcactggccgcatacaatcgagcactcaagctttctggaccaggtctgcaagttatgggtgttggatttactgggtcactggcgagctcacgtccaaaacatggtgaccacaggttttacgtgtcaacatggacacataattgtctcaggacatcacatgttaccttgtcgaagggtttacggagtagggaggaagaagacaaggtttcaagctactttttgcttaaggcaatagcagatacctgcagagtttctgcaaccattcagtcagacattcacaaatctgaaattccagaagaaatcatggaacaatttgatgaagatcaagaactccagcaagttattaatgggcaagtttgcatgaaagtatataattttgctgctccggcggaaagtaacttgaacagaaaaataattctgcctggttcgttcaaccccttgcacgatggtcaccttagattgctagaagctgcagtaagcatgtgtgatgatgggcttccattctttgagatatcagcaattaatgctgataaacctccactatctattgcagaaattaagaggcgtgttgagcaatttagaaaagcagggaagaatgtgattatatctaaccagccatacttctataagaaagcagaacttttcccaggaagcgcttttataattggtgcagacactgcagcaaggcttgttaaccctaagtactatggaggagattacaacagaatgctggagatacttctcgaatgtaagagcatagggactacttttcttgttggtggtcgaaagattgaaggagatttcaaggtccttgagaacttagacattccagaagagctgagagaaatgttcatttctattccggaggaaaagtttcgcatagatatttcatctactgaaataagaaagagccaagggctctgatgtatcaagtggtcgtattctacagcagatttgggatgattctccacgactatagaaggtacatttggatgctagcagtcaagtctgaattctccaagcttacttttttcacatttgtggggttgtattcacgcattctattgcagattatgataggtccattcatgcatccttgcaaaggaactgttgatgtattctcagggagaatattttatttaacttttgtcttgactgggccccttggtattttgttcagcaaattggaatcaatcctcttgtagaacctcttgatgtcttcactaccccttgcggctaggtggtcaacctctgtctcatatctttggtacaacgctggcaaagtgtgggcgcagagaaatcctgtggatgaaatataagaattgttaaatgtatgtcataactgctttatatattgtcttgccttgttataaaagtcacaattttctgcgctactcaccaagatatagaagacttgtgaagctgtaagaacttacaacctctgacactattagcagtgacaagaccaccttagaatcagaaacagaacattgttagcgcaagactacaacatcgtagatttccaagaactctattagattgttgaatagcatcaaagtaatggcatagccgttcagtgctttgggatgttcaagtttaacttaaattccaagaatcacacatgtcagatctttgcagtgttctctatcttcgcactgtaacaattgccacatgattttctcataaacgtagcaaagtaaatgtaccaggaggaatttcttcagatccttcccgcatgcaatgtcataaagagcagacacggtgtgtgccagtttgtaatggatgatctgtgctatttgtcggaaggcatgctcagagatgatcacttctgggatccttggaggagctctgcaacgcaaaactgggaagtctcgtacatgttcaagaggggcgcagcattcgaccagatgaagacgacgagcatggccaggatggctatctggcaaacgagcggtacaatgctgtactcaactacctcgaacaggtaccataccaacgtggccccagcgagcaggcctgcagacaaattcctgtccttccacagcaagatgtccgcggctgcgagaggcacagataacaacgggggtccatgagtaaaccgggccatgacgcacgcagatggcgtcgcctagctaatagtttcccagaaagaacaagaacagcagagagcagcagcgtacgtacctcgccctccaccgagaagctgatgaatcggcttgcgcctgctatggccgccgccgccgcccacccctcg

SEQ ID NO: 77513 - DNA, 2383 bp, Zea Mays
atgtcatccgaggcggtgaaggtgacaatgctagaatcgatgttccgcagacggaagcgtgaggagcagtgggctgtcaagaagaagaaggccatgcccgagaagaagaagtccatcgagagacgcaagctcatattcagtcgtgcaaagcggtgtattccggggtcaatcggactacagtgctgttggaggaagggaaccggacaaatcaccccgtcgtctcgtcccgtagtcactcgcagagtcgcagtcgcagcccctgcgcccaccgggatcgtgatggagagctgggtccgcgcggtggtggaggccatccactcctctcgctcccagacagtcatctacctcgccggcggtgcatcccaggcgctcggttggctcctctccgtgcccggcgcttcgggcaccgtcctcgaggtcgtcgtgccctactctagggcctccatggcgcagctccttggcaagatgcccctgcaattcactagcaagcaggctgcagaggacatggcactggccgcatacaatcgagcactcaagctttctggaccaggtctgcaagttatgggtgttggatttactgggtcactggcgagctcacgtccaaaacatggtgaccacaggttttacgtgtcaacatggacacataattgtctcaggacatcacatgttaccttgtcgaagggtttacggagtagggaggaagaagacaaggtttcaagctactttttgcttaaggcaatagcagatacctgcagagtttctgcaaccattcagtcagacattcacaaatctgaaattccagaagaaatcatggaacaatttgatgaagatcaagaactccagcaagttattaatgggcaagtttgcatgaaagtatataattttgctgctccggcggaaagtaacttgaacagaaaaataattctgcctggttcgttcaaccccttgcacgatggtcaccttagattgctagaagctgcagtaagcatgtgtgatgatgggcttccattctttgagatatcagcaattaatgctgataaacctccactatctattgcagaaattaagaggcgtgttgagcaatttagaaaagcagggaagaatgtgattatatctaaccagccatacttctataagaaagcagaacttttcccaggaagcgcttttataattggtgcagacactgcagcaaggcttgttaaccctaagtactatggaggagattacaacagaatgctggagatacttctcgaatgtaagagcatagggactacttttcttgttggtggtcgaaagattgaaggagatttcaaggtccttgagaacttagacattccagaagagctgagagaaatgttcatttctattccggaggaaaagtttcgcatagatatttcatctactgaaataagaaagagccaagggctctgatgtatcaagtggtcgtattctacagcagatttgggatgattctccacgactatagaaggtacatttggatgctagcagtcaagtctgaattctccaagcttacttttttcacatttgtggggttgtattcacgcattctattgcagattatgataggtccattcatgcatccttgcaaaggaactgttgatgtattctcagggagaatattttatttaacttttgtcttgactgggccccttggtattttgttcagcaaattggaatcaatcctcttgtagaacctcttgatgtcttcactaccccttgcggctaggtggtcaacctctgtctcatatctttggtacaacgctggcaaagtgtgggcgcagagaaatcctgtggatgaaatataagaattgttaaatgaggaatttcttcagatccttcccgcatgcaatgtcataaagagcagacacggtgtgtgccagtttgtaatggatgatctgtgctatttgtcggaaggcatgctcagagatgatcacttctgggatccttggaggagctctgcaacgcaaaactgggaagtctcgtacatgttcaagaggggcgcagcattcgaccagatgaagacgacgagcatggccaggatggctatctggcaaacgagcggtacaatgctgtactcaactacctcgaacaggtaccataccaacgtggccccagcgagcaggcctgcagacaaattcctgtccttccacagcaagatgtccgcggctgcgagaggcacagataacaacgggggtccatgagtaaaccgggccatgacgcacgcagatggcgtcgcctagctaatagtttcccagaaagaacaagaacagcagagagcagcagcgtacgtacctcgccctccaccgagaagctgatgaatcggcttgcgcctgctatggccgccgccgccgcccacccctcg

SEQ ID NO: 77514 - DNA, 1831 bp, Zea Mays
atgtcatccgaggcggtgaaggtgacaatgctagaatcgatgttccgcagacggaagcgtgaggagcagtgggctgtcaagaagaagaaggccatgcccgagaagaagaagtccatcgagagacgcaagctcatattcagtcgtgcaaagcggtgtattccggggtcaatcggactacagtgctgttggaggaagggaaccggacaaatcaccccgtcgtctcgtcccgtagtcactcgcagagtcgcagtcgcagcccctgcgcccaccgggatcgtgatggagagctgggtccgcgcggtggtggaggccatccactcctctcgctcccagacagtcatctacctcgccggcggtgcatcccaggtatccgtaccaacacctcccacgcccacacgcgtgatgtaattttgccgtcaaatctgtcaactccaactgctcggcacctccattcggcgcaggcgctcggttggctcctctccgtgcccggcgcttcgggcaccgtcctcgaggtcgtcgtgccctactctagggcctccatggcgcagctccttggcaagatgcccctgcaattcactagcaagcaggctgcagaggacatggcactggccgcatacaatcgagcactcaagctttctggaccagcaatgagtcggagtatgtgtaggtctgcaagttatgggtgttggatttactgggtcactggcgagctcacgtccaaaacatggtgaccacaggttttacgtgtcaacatggacacataattgtctcaggacatcacatgttaccttgtcgaagggtttacggagtagggaggaagaagacaaggtttcaagctactttttgcttaaggcaatagcagatacctgcagagtttctgcaaccattcagtcagacattcacaaatctgaaattccagaagaaatcatggaacaatttgatgaagatcaagaactccagcaagttattaatgggcaagtttgcatgaaagtatataattttgctgctccggcggaaagtaacttgaacagaaaaataattctgcctggttcgttcaaccccttgcacgatggtcaccttagattgctagaagctgcagtaagaaattaagaggcgtgttgagcaatttagaaaagcagggaagaatgtgattatatctaaccagccatacttctataagaaagcagaacttttcccaggaagcgcttttataattggtgcagacactgcagcaaggcttgttaaccctaagtactatggaggagattacaacagaatgctggagatacttctcgaatgtaagagcatagggactacttttcttgttggtggtcgaaagattgaaggagatttcaaggtccttgagaacttagacattccagaagagctgagagaaatgttcatttctattccggaggaaaagtttcgcatagatatttcatctactgaaataagaaagagccaagggctctgatgtatcaagtggtcgtattctacagcagatttgggatgattctccacgactatagaagattatgataggtccattcatgcatccttgcaaaggaactgttgatgtattctcagggagaatattttatttaacttttgtcttgactgggccccttggtattttgttcagcaaattggaatcaatcctcttgtagaacctcttgatgtcttcactaccccttgcggctaggtggtcaacctctgtctcatatctttggtacaacgctggcaaagtgtgggcgcagagaaatcctgtggatgaaatataagaattgttaaatgaggaatttcttcagatccttcccgcatgcaatgtcat

SEQ ID NO: 77515 - DNA, 1898 bp, Zea Mays
atgtcatccgaggcggtgaaggtgacaatgctagaatcgatgttccgcagacggaagcgtgaggagcagtgggctgtcaagaagaagaaggccatgcccgagaagaagaagtccatcgagagacgcaagctcatattcagtcgtgcaaagcggtgtattccggggtcaatcggactacagtgctgttggaggaagggaaccggacaaatcaccccgtcgtctcgtcccgtagtcactcgcagagtcgcagtcgcagcccctgcgcccaccgggatcgtgatggagagctgggtccgcgcggtggtggaggccatccactcctctcgctcccagacagtcatctacctcgccggcggtgcatcccaggcgctcggttggctcctctccgtgcccggcgcttcgggcaccgtcctcgaggtcgtcgtgccctactctagggcctccatggcgcagctccttggcaagatgcccctgcaattcactagcaagcaggctgcagaggacatggcactggccgcatacaatcgagcactcaagctttctggaccagcaatgagtcggagtatgtgtaggtctgcaagttatgggtgttggatttactgggtcactggcgagctcacgtccaaaacatggtgaccacaggttttacgtgtcaacatggacacataattgtctcaggacatcacatgttaccttgtcgaagggtttacggagtagggaggaagaagacaaggtttcaagctactttttgcttaaggcaatagcagatacctgcagagtttctgcaaccattcagtcagacattcacaaatctgaaattccagaagaaatcatggaacaatttgatgaagatcaagaactccagcaagttattaatgggcaagtttgcatgaaagtatataattttgctgctccggcggaaagtaacttgaacagaaaaataattctgcctggttcgttcaaccccttgcacgatggtcaccttagattgctagaagctgcagtaagcatgtgtgatgatgggcttccattctttgagatatcagcaattaatgctgataaacctccactatctattgcagaaattaagaggcgtgttgagcaatttagaaaagcagggaagaatgtgattatatctaaccagccatacttctataagaaagcagaacttttcccaggaagcgcttttataattggtgcagacactgcagcaaggcttgttaaccctaagtactatggaggagattacaacagaatgctggagatacttctcgaatgtaagagcatagggactacttttcttgttggtggtcgaaagattgaaggagatttcaaggtccttgagaacttagacattccagaagagctgagagaaatgttcatttctattccggaggaaaagtttcgcatagatatttcatctactgaaataagaaagagccaagggctctgatgtatcaagtggtcgtattctacagcagatttgggatgattctccacgactatagaaggtacatttggatgctagcagtcaagtctgaattctccaagcttacttttttcacatttgtggggttgtattcacgcattctattgcagattatgataggtccattcatgcatccttgcaaaggaactgttgatgtattctcagggagaatattttatttaacttttgtcttgactgggccccttggtattttgttcagcaaattggaatcaatcctcttgtagaacctcttgatgtcttcactaccccttgcggctaggtggtcaacctctgtctcatatctttggtacaacgctggcaaagtgtgggcgcagagaaatcctgtggatgaaatataagaattgttaaatgaggaatttcttcagatccttcccgcatgcaatgtcat

SEQ ID NO: 77516 - DNA, 1453 bp, Zea Mays
atgtcatccgaggcggtgaaggtgacaatgctagaatcgatgttccgcagacggaagcgtgaggagcagtgggctgtcaagaagaagaaggccatgcccgagaagaagaagtccatcgagagacgcaagctcatattcagtcgtgcaaagcggtgtattccggggtcaatcggactacagtgctgttggaggaagggaaccggacaaatcaccccgtcgtctcgtcccgtagtcactcgcagagtcgcagtcgcagcccctgcgcccaccgggatcgtgatggagagctgggtccgcgcggtggtggaggccatccactcctctcgctcccagacagtcatctacctcgccggcggtgcatcccaggcgctcggttggctcctctccgtgcccggcgcttcgggcaccgtcctcgaggtcgtcgtgccctactctagggcctccatggcgcagctccttggcaagatgcccctgcaattcactagcaagcaggctgcagaggacatggcactggccgcatacaatcgagcactcaagctttctggaccaggtctgcaagttatgggtgttggatttactgggtcactggcgagctcacgtccaaaacatggtgaccacaggttttacgtgtcaacatggacacataattgtctcaggacatcacatgttaccttgtcgaagggtttacggagtagggaggaagaagacaaggtttcaagctactttttgcttaaggcaatagcagatacctgcagagtttctgcaaccattcagtcagacattcacaaatctgaaattccagaagaaatcatggaacaatttgatgaagatcaagaactccagcaagttattaatgggcaagtttgcatgaaagtatataattttgctgctccggcggaaagtaacttgaacagaaaaataattctgcctggttcgttcaaccccttgcacgatggtcaccttagattgctagaagctgcagtaagaaattaagaggcgtgttgagcaatttagaaaagcagggaagaatgtgattatatctaaccagccatacttctataagaaagcagaacttttcccaggaagcgcttttataattggtgcagacactgcagcaaggcttgttaaccctaagtactatggaggagattacaacagaatgctggagatacttctcgaatgtaagagcatagggactacttttcttgttggtggtcgaaagattgaaggagatttcaaggtccttgagaacttagacattccagaagagctgagagaaatgttcatttctattccggaggaaaagtttcgcatagatatttcatctactgaaataagaaagagccaagggctctgatgtatcaagtggtcgtattctacagcagatttgggatgattctccacgactatagaaggaggaatttcttcagatccttcccgcatgcaatgtcat

SEQ ID NO: 77517 - DNA, 1549 bp, Zea Mays
atgtcatccgaggcggtgaaggtgacaatgctagaatcgatgttccgcagacggaagcgtgaggagcagtgggctgtcaagaagaagaaggccatgcccgagaagaagaagtccatcgagagacgcaagctcatattcagtcgtgcaaagcggtgtattccggggtcaatcggactacagtgctgttggaggaagggaaccggacaaatcaccccgtcgtctcgtcccgtagtcactcgcagagtcgcagtcgcagcccctgcgcccaccgggatcgtgatggagagctgggtccgcgcggtggtggaggccatccactcctctcgctcccagacagtcatctacctcgccggcggtgcatcccaggcgctcggttggctcctctccgtgcccggcgcttcgggcaccgtcctcgaggtcgtcgtgccctactctagggcctccatggcgcagctccttggcaagatgcccctgcaattcactagcaagcaggctgcagaggacatggcactggccgcatacaatcgagcactcaagctttctggaccagcaatgagtcggagtatgtgtaggtctgcaagttatgggtgttggatttactgggtcactggcgagctcacgtccaaaacatggtgaccacaggttttacgtgtcaacatggacacataattgtctcaggacatcacatgttaccttgtcgaagggtttacggagtagggaggaagaagacaaggtttcaagctactttttgcttaaggcaatagcagatacctgcagagtttctgcaaccattcagtcagacattcacaaatctgaaattccagaagaaatcatggaacaatttgatgaagatcaagaactccagcaagttattaatgggcaagtttgcatgaaagtatataattttgctgctccggcggaaagtaacttgaacagaaaaataattctgcctggttcgttcaaccccttgcacgatggtcaccttagattgctagaagctgcagtaagcatgtgtgatgatgggcttccattctttgagatatcagcaattaatgctgataaacctccactatctattgcagaaattaagaggcgtgttgagcaatttagaaaagcagggaagaatgtgattatatctaaccagccatacttctataagaaagcagaacttttcccaggaagcgcttttataattggtgcagacactgcagcaaggcttgttaaccctaagtactatggaggagattacaacagaatgctggagatacttctcgaatgtaagagcatagggactacttttcttgttggtggtcgaaagattgaaggagatttcaaggtccttgagaacttagacattccagaagagctgagagaaatgttcatttctattccggaggaaaagtttcgcatagatatttcatctactgaaataagaaagagccaagggctctgatgtatcaagtggtcgtattctacagcagatttgggatgattctccacgactatagaaggaggaatttcttcagatccttcccgcatgcaatgtcat

SEQ ID NO: 77518 - DNA, 1437 bp, Zea Mays
atgtcatccgaggcggtgaaggtgacaatgctagaatcgatgttccgcagacggaagcgtgaggagcagtgggctgtcaagaagaagaaggccatgcccgagaagaagaagtccatcgagagacgcaagctcatattcagtcgtgcaaagcggtgtattccggggtcaatcggactacagtgctgttggaggaagggaaccggacaaatcaccccgtcgtctcgtcccgtagtcactcgcagagtcgcagtcgcagcccctgcgcccaccgggatcgtgatggagagctgggtccgcgcggtggtggaggccatccactcctctcgctcccagacagtcatctacctcgccggcggtgcatcccaggcgctcggttggctcctctccgtgcccggcgcttcgggcaccgtcctcgaggtcgtcgtgccctactctagggcctccatggcgcagctccttggcaagatgcccctgcaattcactagcaagcaggctgcagaggacatggcactggccgcatacaatcgagcactcaagctttctggaccaggtctgcaagttatgggtgttggatttactgggtcactggcgagctcacgtccaaaacatggtgaccacaggttttacgtgtcaacatggacacataattgtctcaggacatcacatgttaccttgtcgaagggtttacggagtagggaggaagaagacaaggtttcaagctactttttgcttaaggcaatagcagatacctgcagagtttctgcaaccattcagtcagacattcacaaatctgaaattccagaagaaatcatggaacaatttgatgaagatcaagaactccagcaagttattaatgggcaagtttgcatgaaactccggcggaaagtaacttgaacagaaaaataattctgcctggttcgttcaaccccttgcacgatggtcaccttagattgctagaagctgcagtaagaaattaagaggcgtgttgagcaatttagaaaagcagggaagaatgtgattatatctaaccagccatacttctataagaaagcagaacttttcccaggaagcgcttttataattggtgcagacactgcagcaaggcttgttaaccctaagtactatggaggagattacaacagaatgctggagatacttctcgaatgtaagagcatagggactacttttcttgttggtggtcgaaagattgaaggagatttcaaggtccttgagaacttagacattccagaagagctgagagaaatgttcatttctattccggaggaaaagtttcgcatagatatttcatctactgaaataagaaagagccaagggctctgatgtatcaagtggtcgtattctacagcagatttgggatgattctccacgactatagaaggaggaatttcttcagatccttcccgcatgcaatgtcat

SEQ ID NO: 77519 - DNA, 2073 bp, Zea Mays
atgtcatccgaggcggtgaaggtgacaatgctagaatcgatgttccgcagacggaagcgtgaggagcagtgggctgtcaagaagaagaaggccatgcccgagaagaagaagtccatcgagagacgcaagctcatattcagtcgtgcaaagcggtgtattccggggtcaatcggactacagtgctgttggaggaagggaaccggacaaatcaccccgtcgtctcgtcccgtagtcactcgcagagtcgcagtcgcagcccctgcgcccaccgggatcgtgatggagagctgggtccgcgcggtggtggaggccatccactcctctcgctcccagacagtcatctacctcgccggcggtgcatcccaggcgctcggttggctcctctccgtgcccggcgcttcgggcaccgtcctcgaggtcgtcgtgccctactctagggcctccatggcgcagctccttggcaagatgcccctgcaattcactagcaagcaggctgcagaggacatggcactggccgcatacaatcgagcactcaagctttctggaccaggtctgcaagttatgggtgttggatttactgggtcactggcgagctcacgtccaaaacatggtgaccacaggttttacgtgtcaacatggacacataattgtctcaggacatcacatgttaccttgtcgaagggtttacggagtagggaggaagaagacaaggtttcaagctactttttgcttaaggcaatagcagatacctgcagagtttctgcaaccattcagtcagacattcacaaatctgaaattccagaagaaatcatggaacaatttgatgaagatcaagaactccagcaagttattaatgggcaagtttgcatgaaactccggcggaaagtaacttgaacagaaaaataattctgcctggttcgttcaaccccttgcacgatggtcaccttagattgctagaagctgcagtaagcatgtgtgatgatgggcttccattctttgagatatcagcaattaatgctgataaacctccactatctattgcagaaattaagaggcgtgttgagcaatttagaaaagcagggaagaatgtgattatatctaaccagccatacttctataagaaagcagaacttttcccaggaagcgcttttataattggtgcagacactgcagcaaggcttgttaaccctaagtactatggaggagattacaacagaatgctggagatacttctcgaatgtaagagcatagggactacttttcttgttggtggtcgaaagattgaaggagatttcaaggtccttgagaacttagacattccagaagagctgagagaaatgttcatttctattccggaggaaaagtttcgcatagatatttcatctactgaaataagaaagagccaagggctctgatgtatcaagtggtcgtattctacagcagatttgggatgattctccacgactatagaaggtacatttggatgctagcagtcaagtctgaattctccaagcttacttttttcacatttgtggggttgtattcacgcattctattgcagattatgataggtccattcatgcatccttgcaaaggaactgttgatgtattctcagggagaatattttatttaacttttgtcttgactgggccccttggtattttgttcagcaaattggaatcaatcctcttgtagaacctcttgatgtcttcactaccccttgcggctaggtggtcaacctctgtctcatatctttggtacaacgctggcaaagtgtgggcgcagagaaatcctgtggatgaaatataagaattgttaaatgtatgtcataactgctttatatattgtcttgccttgttataaaagtcacaattttctgcgctactcaccaagatatagaagacttgtgaagctgtaagaacttacaacctctgacactattagcagtgacaagaccaccttagaatcagaaacagaacattgttagcgcaagactacaacatcgtagatttccaagaactctattagattgttgaatagcatcaaagtaatggcatagccgttcagtgctt

SEQ ID NO: 77520 - DNA, 2057 bp, Zea Mays
atgtcatccgaggcggtgaaggtgacaatgctagaatcgatgttccgcagacggaagcgtgaggagcagtgggctgtcaagaagaagaaggccatgcccgagaagaagaagtccatcgagagacgcaagctcatattcagtcgtgcaaagcggtgtattccggggtcaatcggactacagtgctgttggaggaagggaaccggacaaatcaccccgtcgtctcgtcccgtagtcactcgcagagtcgcagtcgcagcccctgcgcccaccgggatcgtgatggagagctgggtccgcgcggtggtggaggccatccactcctctcgctcccagacagtcatctacctcgccggcggtgcatcccaggcgctcggttggctcctctccgtgcccggcgcttcgggcaccgtcctcgaggtcgtcgtgccctactctagggcctccatggcgcagctccttggcaagatgcccctgcaattcactagcaagcaggctgcagaggacatggcactggccgcatacaatcgagcactcaagctttctggaccaggtctgcaagttatgggtgttggatttactgggtcactggcgagctcacgtccaaaacatggtgaccacaggttttacgtgtcaacatggacacataattgtctcaggacatcacatgttaccttgtcgaagggtttacggagtagggaggaagaagacaaggtttcaagctactttttgcttaaggcaatagcagatacctgcagagtttctgcaaccattcagtcagacattcacaaatctgaaattccagaagaaatcatggaacaatttgatgaagatcaagaactccagcaagttattaatggctccggcggaaagtaacttgaacagaaaaataattctgcctggttcgttcaaccccttgcacgatggtcaccttagattgctagaagctgcagtaagcatgtgtgatgatgggcttccattctttgagatatcagcaattaatgctgataaacctccactatctattgcagaaattaagaggcgtgttgagcaatttagaaaagcagggaagaatgtgattatatctaaccagccatacttctataagaaagcagaacttttcccaggaagcgcttttataattggtgcagacactgcagcaaggcttgttaaccctaagtactatggaggagattacaacagaatgctggagatacttctcgaatgtaagagcatagggactacttttcttgttggtggtcgaaagattgaaggagatttcaaggtccttgagaacttagacattccagaagagctgagagaaatgttcatttctattccggaggaaaagtttcgcatagatatttcatctactgaaataagaaagagccaagggctctgatgtatcaagtggtcgtattctacagcagatttgggatgattctccacgactatagaaggtacatttggatgctagcagtcaagtctgaattctccaagcttacttttttcacatttgtggggttgtattcacgcattctattgcagattatgataggtccattcatgcatccttgcaaaggaactgttgatgtattctcagggagaatattttatttaacttttgtcttgactgggccccttggtattttgttcagcaaattggaatcaatcctcttgtagaacctcttgatgtcttcactaccccttgcggctaggtggtcaacctctgtctcatatctttggtacaacgctggcaaagtgtgggcgcagagaaatcctgtggatgaaatataagaattgttaaatgtatgtcataactgctttatatattgtcttgccttgttataaaagtcacaattttctgcgctactcaccaagatatagaagacttgtgaagctgtaagaacttacaacctctgacactattagcagtgacaagaccaccttagaatcagaaacagaacattgttagcgcaagactacaacatcgtagatttccaagaactctattagattgttgaatagcatcaaagtaatggcatagccgttcagtgctt

SEQ ID NO: 77521 - DNA, 1270 bp, Zea Mays
atgtcatccgaggcggtgaaggtgacaatgctagaatcgatgttccgcagacggaagcgtgaggagcagtgggctgtcaagaagaagaaggccatgcccgagaagaagaagtccatcgagagacgcaagctcatattcagtcgtgcaaagcggtgtattccggggtcaatcggactacagtgctgttggaggaagggaaccggacaaatcaccccgtcgtctcgtcccgtagtcactcgcagagtcgcagtcgcagcccctgcgcccaccgggatcgtgatggagagctgggtccgcgcggtggtggaggccatccactcctctcgctcccagacagtcatctacctcgccggcggtgcatcccaggcgctcggttggctcctctccgtgcccggcgcttcgggcaccgtcctcgaggtcgtcgtgccctactctagggcctccatggcgcagctccttggcaagatgcccctgcaattcactagcaagcaggctgcagaggacatggcactggccgcatacaatcgagcactcaagctttctggaccaggtctgcaagttatgggtgttggatttactgggtcactggcgagctcacgtccaaaacatggtgaccacaggttttacgtgtcaacatggacacataattgtctcaggacatcacatgttaccttgtcgaagggtttacggagtagggaggaagaagacaaggtttcaagctactttttgcttaaggcaatagcagatacctgcagagtttctgcaaccattcagtcagacattcacaaatctgaaattccagaagaaatcatggaacaatttgatgaagatcaagaactccagcaagttattaatgggcaagtttgcatgaaagtatataattttgctgctccggcggaaagtaacttgaacagaaaaataattctgcctggttcgttcaaccccttgcacgatggtcaccttagattgctagaagctgcagtaagcatgtgtgatgatgggcttccattctttgagatatcagcaattaatgctgataaacctccactatctattgcagaaattaagaggcgtgttgagcaatttagaaaagcagggaagaatgtgattatatctaaccagccatacttctataagaaagcagaacttttcccaggaagcgcttttataattggtgcagacactgcagcaaggcttgttaacctccaaatcggcctacagggctttcttcattggagttgaaaccttcgagcctttgaaaaggatctgg

SEQ ID NO: 77522 - DNA, 1605 bp, Zea Mays
aaaaaaccccaaaacctagctcctactcggcctgtcggcttaccagtgttccttgctgattaattggtaactcgccttgataagtcggtctacgatgttgattagtcggtcctaaccgatggaacgactgggaggcccacgcccacaccatcccctcgcactgctgctcctactaggctactactacgccgcagccgcacaggcagacgcgtcgattcaaccacactgctgccagtctgccacaactatttactgccgccccctcatcaccgccacgggcccggcgagcaagcgccagccaggggagggaagccgaggcctaggacaggaggccatgtcaggggaccgctcgtccacggcagagcgccggcgggggatccggcgcctcctcctgcatccgcgcggcgaggcctcctcgcctccgcctccgccgccagcgccggcgccggaggaggggagaaggaaggggttcgcctcggcggcgctgcgcggcctgggctgcacgtcggcggcggcgtccaaggcgtacgcgcccggagcggccgcggcggcggccttgcggtcgtcggcggactggcacgggcggcggcggaggaggggcaaggacaggaggaaggagcgtggcggcggcggagcgggagcgggcggaggcctcgtcaccggtgggatcggcgccgatgtgtggtgcgcacccgggatacccttcgccgcggaggcgtcctcggtggactgcgtggtggcgcggcaccagacggtggggaggggcggccgcggcgccgagggggagaggtcccacagagagaggccgtgcatgtcccggagggcgaccgtgcaggagcagatatcctcgcccttcatggactcgccgccgccgcacctcgacgcccccttcttcggggccgatctgatcccctccggccgcctccgtcggatgcgcgggtaccgctactcccccggaggcctcgaggaagagataatgatgtttcagacaagagttttactgggaggaatgaacatgtacgatcgctaccaggattggcgccttgatgtagataacatgacatacgaggagttggtcgagcttggagacagaattggatacgtcaacacagggctacgtgaggacgagattgctcgcagccttaggaaggccaagcacccatccttcggttccttgcgattcgcagcagaagtggaaaggaaatgcactatttgccaagaagaatttcagtcaaatgaagagatgggaaggctagtctgtggccatagctaccatgtgttgtgcatcaagcagtggctctctcagaagaacacttgcccggtttgcaaaactgccgtcagcaagaattgaaatgcaaactccaggcacgctgtctgcatgcctaaggtgaaatcaatgtgaaattggcaaattatgttgtcgtgtacagcccgtcatatataatattagggggtgtttgggagtgaagttttttcacagttttggaagaatactgcagtattcttaaatactgcagtattatatacagaatggtgtttggcaagctggctaaaatctatgttttcaaaactgtagtattacaaatactatagttgttttaaggt

SEQ ID NO: 77523 - DNA, 1434 bp, Zea Mays
aaaaaaccccaaaacctagctcctactcggcctgtcggcttaccagtgttccttgctgattaattggtaactcgccttgataagtcggtctacgatgttgattagtcggtcctaaccgatggaacgactgggaggcccacgcccacaccatcccctcgcactgctgctcctactaggctactactacgccgcagccgcacaggcagacgcgtcgattcaaccacactgctgccagtctgccacaactatttactgccgccccctcatcaccgccacgggcccggcgagcaagcgccagccaggggagggaagccgaggcctaggacaggaggccatgtcaggggaccgctcgtccacggcagagcgccggcgggggatccggcgcctcctcctgcatccgcgcggcgaggcctcctcgcctccgcctccgccgccagcgccggcgccggaggaggggagaaggaaggggttcgcctcggcggcgctgcgcggcctgggctgcacgtcggcggcggcgtccaaggcgtacgcgcccggagcggccgcggcggcggccttgcggtcgtcggcggactggcacgggcggcggcggaggaggggcaaggacaggaggaaggagcgtggcggcggcggagcgggagcgggcggaggcctcgtcaccggtgggatcggcgccgatgtgtggtgcgcacccgggatacccttcgccgcggaggcgtcctcggtggactgcgtggtggcgcggcaccagacggtggggaggggcggccgcggcgccgagggggagaggtcccacagagagataatgatgtttcagacaagagttttactgggaggaatgaacatgtacgatcgctaccaggattggcgccttgatgtagataacatgacatacgaggagttggtcgagcttggagacagaattggatacgtcaacacagggctacgtgaggacgagattgctcgcagccttaggaaggccaagcacccatccttcggttccttgcgattcgcagcagaagtggaaaggaaatgcactatttgccaagaagaatttcagtcaaatgaagagatgggaaggctagtctgtggccatagctaccatgtgttgtgcatcaagcagtggctctctcagaagaacacttgcccggtttgcaaaactgccgtcagcaagaattgaaatgcaaactccaggcacgctgtctgcatgcctaaggtgaaatcaatgtgaaattggcaaattatgttgtcgtgtacagcccgtcatatataatattagggggtgtttgggagtgaagttttttcacagttttggaagaatactgcagtattcttaaatactgcagtattatatacagaatggtgtttggcaagctggctaaaatctatgttttcaaaactgtagtattacaaatactatagttgttttaaggt

SEQ ID NO: 77524 - DNA, 1774 bp, Zea Mays
atcgcttcgggctccagatcccagcgccagcgccccaaaggtccaggggcatatgactggttcaatcaaggccatgctcctgctgtgacattttaatgctaacgaataagatagcagcatcgatgaaaacagcctgaacataacccagcatactaacattcaagacaagatagcaataaaccaaatcaatacttctagctcattggaatgtcttcctgccttattttatccggattctttgagaaagagacatggatgcacccgattttccctgccctcttctatgcctgtgaaagagtcataaggaaatttcatgagaacgactaccattcaggtattgtgagcaatttatctgggagatgtgctctctattcacatgaagaagcctcggggtttcaagtactaaagtggaatgcatcttttttttgtaaaataccaagtcttgcctttcgactggtatcattttattaattattgcacacatattcgagaagtaatttatctgtggttcttgcttacagttttcccatatatacaggcaccccttctctataactctggcaccaggagataactacttgactgtgcatatccgcgcgctgggtgaccgggcatccaaactttcgattctctgagattttgaactttgatggcagtgaaagggatcaggctccgaaaacagggagcaagaatatgtgtgttgtcttgcaagtcctctttcacgaacgagttgcttcttttatttttttaacatctaaatatccattcaaaatcatacacaatacttcactttgttcttcatgttatacagttcactaagtcaaaaggaaccttgtgcctcctgtgtttccatgatttactattgaacaatgaacatatctgattcacaatgatttagagaacaaaacaacaaggggattaacattttactttcactactttagaccagcactcttgtccgtttttttgtatccaataataaaggccaatttctggcttctctttgcaatatgctttgttgggattgaatctagaaccactgttcttaataatctagcacaaatatgaactgctgccaacaccaccatcttgctctttgtcttcaatatctagaacttttttggctggctgggggaggtgttcttatttctgaattgattcaagacatcgatactcccttagccaagggtgaaagggctataaagccaagaagacgaagaagggtgaagaattcaggttttcggaagcaatagtgaagactattttttggcttctctttgcaatatgctttattgggattggatcctcgatcattgttattaataatctatcacaaatatgagttgttgcagatcctattgacacaaccatctgactctctaccttcatttttttgcaatttttggttgcctgggaggtgttgttgttcctgagtatcttgtcaggcctccttcatgtcttctccctgttcaagtggtgggcttgggagattggctcttgagatatcttctctacgtacatgtactataataaaattcttcatctaaatctagctcatatcatttattttctgatgctatatttttattgagaaatcaaaatatccatatgttgagagcaaatcttgatgtaatcactactgatcaaagtgcacctgagtattttatgcctttaaatgagtagccgaggaactaaagaaggaacgattgggacatgtttgttaggatgaacttaagttaagttcattccactctttgaaatcttaagaaatgtg

SEQ ID NO: 77525 - DNA, 1786 bp, Zea Mays
catcgcttcgggctccagatcccagcgccagcgccccaaaggtccaggggcatatgactggttcaatcaaggccatgctcctgctgtgacattttaatgctaacgaataagatagcagcatcgatgaaaacagcctgaacataacccagtttttttaaagcatactaacattcaagacaagatagcaataaaccaaatcaatacttctagctcattggaatgtcttcctgccttattttatccggattctttgagaaagagacatggatgcacccgattttccctgccctcttctatgcctgtgaaagagtcataaggaaatttcatgagaacgactaccattcaggtattgtgagcaatttatctgggagatgtgctctctattcacatgaagaagcctcggggtttcaagtactaaagtggaatgcatcttttttttgtaaaataccaagtcttgcctttcgactggtatcattttattaattattgcacacatattcgagaagtaatttatctgtggttcttgcttacagttttcccatatatacaggcaccccttctctataactctggcaccaggagataactacttgactgtgcatatccgcgcgctgggtgaccgggcatccaaactttcgattctctgagattttgaactttgatggcagtgaaagggatcaggctccgaaaacagggagcaagaatatgtgtgttgtcttgcaagtcctctttcacgaacgagttgcttcttttatttttttaacatctaaatatccattcaaaatcatacacaatacttcactttgttcttcatgttatacagttcactaagtcaaaaggaaccttgtgcctcctgtgtttccatgatttactattgaacaatgaacatatctgattcacaatgatttagagaacaaaacaacaaggggattaacattttactttcactactttagaccagcactcttgtccgtttttttgtatccaataataaaggccaatttctggcttctctttgcaatatgctttgttgggattgaatctagaaccactgttcttaataatctagcacaaatatgaactgctgccaacaccaccatcttgctctttgtcttcaatatctagaacttttttggctggctgggggaggtgttcttatttctgaattgattcaagacatcgatactcccttagccaagggtgaaagggctataaagccaagaagacgaagaagggtgaagaattcaggttttcggaagcaatagtgaagactattttttggcttctctttgcaatatgctttattgggattggatcctcgatcattgttattaataatctatcacaaatatgagttgttgcagatcctattgacacaaccatctgactctctaccttcatttttttgcaatttttggttgcctgggaggtgttgttgttcctgagtatcttgtcaggcctccttcatgtcttctccctgttcaagtggtgggcttgggagattggctcttgagatatcttctctacgtacatgtactataataaaattcttcatctaaatctagctcatatcatttattttctgatgctatatttttattgagaaatcaaaatatccatatgttgagagcaaatcttgatgtaatcactactgatcaaagtgcacctgagtattttatgcctttaaatgagtagccgaggaactaaagaaggaacgattgggacatgtttgttaggatgaacttaagttaagttcattccactctttgaaatcttaagaaatgtg

SEQ ID NO: 77526 - DNA, 2405 bp, Zea Mays
ctcctccctcccccgcccgttcgtagctccggtgacagccgccatcgcttcgggctccagatcccagcgccagcgccccaaaggtccaggtaagcggaggcggatcttccccttctcccccattcgttttccttgctagggttcatcgtcccctcctcattcccttcccgacgagctctctccccattgctagggttcgtcgtgctggggttggagtagacacggctgcggcggtggctcttccccttcccccctcatccatttttccttgctggggtttgactagacacagaaattcctcatgctaccatttagggtttagggttggttctcctacgtttcagcctcaaggtatcaatgattctgaggcatacgacatattttttgcggtacgacatgtagcaactacaaacctgcttgggattgttgtcttttgggtctgggtgtggaggtatttgaagatatgaagaataatgtctgaattggaccacactaattgttgttgacatgttctgccatatggagatggaaagtgatgccacttttctttgcaacattatcaacatctatccattattaacgtctatccatatttgactatctaatcttaacgacgtgatgtttatttttctcatattctcaaaggggaacactcacattccaagcgcatctctcaaggtgcccaagatatactaagcaaaaatcttgtatcctaatctgataacatgcataaatgtggatggaataggggcatatgactggttcaatcaaggccatgctcctgctgtgacattttaatgctaacgaataagatagcagcatcgatgaaaacagcctgaacataacccagtttttttaaagcatactaacattcaagacaagatagcaataaaccaaatcaatacttctagctcattggaatgtcttcctgccttattttatccggattctttgagaaagagacatggatgcacccgattttccctgccctcttctatgcctgtgaaagagtcataaggaaatttcatgagaacgactaccattcaggtattgtgagcaatttatctgggagatgtgctctctattcacatgaagaagcctcggggtttcaagtactaaagtggaatgcatcttttttttgtaaaataccaagtcttgcctttcgactggcaccccttctctataactctggcaccaggagataactacttgactgtgcatatccgcgcgctgggtgaccgggcatccaaactttcgattctctgagattttgaactttgatggcagtgaaagggatcaggctccgaaaacagggagcaagaatatgtgtgttgtcttgcaagtcctctttcacgaacgagttgcttcttttatttttttaacatctaaatatccattcaaaatcatacacaatacttcactttgttcttcatgttatacagttcactaagtcaaaaggaaccttgtgcctcctgtgtttccatgatttactattgaacaatgaacatatctgattcacaatgatttagagaacaaaacaacaaggggattaacattttactttcactactttagaccagcactcttgtccgtttttttgtatccaataataaaggccaatttctggcttctctttgcaatatgctttgttgggattgaatctagaaccactgttcttaataatctagcacaaatatgaactgctgccaacaccaccatcttgctctttgtcttcaatatctagaacttttttggctggctgggggaggtgttcttatttctgaattgattcaagacatcgatactcccttagccaagggtgaaagggctataaagccaagaagacgaagaagggtgaagaattcaggttttcggaagcaatagtgaagactattttttggcttctctttgcaatatgctttattgggattggatcctcgatcattgttattaataatctatcacaaatatgagttgttgcagatcctattgacacaaccatctgactctctaccttcatttttttgcaatttttggttgcctgggaggtgttgttgttcctgagtatcttgtcaggcctccttcatgtcttctccctgttcaagtggtgggcttgggagattggctcttgagatatcttctctacgtacatgtactataataaaattcttcatctaaatctagctcatatcatttattttctgatgctatatttttattgagaaatcaaaatatccatatgttgagagcaaatcttgatgtaatcactactgatcaaagtgcacctgagtattttatgcctttaaatgagtagccgaggaactaaagaaggaacgattgggacatgtttgttaggatgaacttaagttaagttcattccactctttgaaatcttaagaaatgtg

SEQ ID NO: 77527 - DNA, 2445 bp, Zea Mays
ctcctccctcccccgcccgttcgtagctccggtgacagccgccatcgcttcgggctccagatcccagcgccagcgccccaaaggtccaggtaagcggaggcggatcttccccttctcccccattcgttttccttgctagggttcatcgtcccctcctcattcccttcccgacgagctctctccccattgctagggttcgtcgtgctggggttggagtagacacggctgcggcggtggctcttccccttcccccctcatccatttttccttgctggggtttgactagacacagaaattcctcatgctaccatttagggtttagggttggttctcctacgtttcagcctcaaggtatcaatgattctgaggcatacgacatattttttgcggtacgacatgtagcaactacaaacctgcttgggattgttgtcttttgggtctgggtgtggaggtatttgaagatatgaagaataatgtctgaattggaccacactaattgttgttgacatgttctgccatatggagatggaaagtgatgccacttttctttgcaacattatcaacatctatccattattaacgtctatccatatttgactatctaatcttaacgacgtgatgtttatttttctcatattctcaaaggggaacactcacattccaagcgcatctctcaaggtgcccaagatatactaagcaaaaatcttgtatcctaatctgataacatgcataaatgtggatggaataggggcatatgactggttcaatcaaggccatgctcctgctgtgacattttaatgctaacgaataagatagcagcatcgatgaaaacagcctgaacataacccaggtaacttatgtcagttgtacttacattttccatataacaccatggttttaggcttctatcaaactgatgaagactgaattttgtctaagtttttttaaagcatactaacattcaagacaagatagcaataaaccaaatcaatacttctagctcattggaatgtcttcctgccttattttatccggattctttgagaaagaggtaagctcaatgtttgtttcaatctaattttttagtatgttttaatttcttcgcatctgctggagactttaaatttgaactaagtctcaggagaagcatttgaattgttacagatacttttggtctcacctaactgtgtggtatttatagtttgctcatttgtatacaatcatcggctttacaaccttgtttgctcaacccaaaaaaaaggtgggcagaaactgtctgtttcatcactcaccaagcacacccaacgtacatttaaggagaacagcacaagaagacaagaagcacctaaacggaagtgaataattaattaaccatgtaaaaccatgtcctcacacgtttaagttgtttacatttcctcataaatgaatttgtaccaattcaaacaagcttgttagcaagtacgagtagcatttgtgttagaaaaatacaagaaaaaagatctcttaagttctcaacttttgcttgatcttgtgtgttagactgttagtgttcatatggcgcatcccaaatattcctgtcctgtaattgaacacagacagcccaaatactccttctgtaattgaacacaagaatatgtttagttgatggtctggtcatggagctcaaatttggttcaacatgaattatgatactgactgtgtactctagatatttatgtttattttttgcaaatttgtttgttcatttcagacatggatgcacccgattttccctgccctcttctatgcctgtgaaagagtcataaggaaatttcatgagaacgactaccattcaggtattgtgagcaatttatctgggagatgtgctctctattcacatgaagaagcctcggggtttcaagtactaaagtggaatgcatcttttttttgtaaaataccaagtcttgcctttcgactgaggcaccccttctctataactctggcaccaggagataactacttgactgtgcatatccgcgcgctgggtgaccgggcatccaaactttcgattctctgagattttgaactttgatggcagtgaaagggatcaggctccgaaaacagggagcaagaatatgcctccttcatgtcttctccctgttcaagtggtgggcttgggagattggctcttgagatatcttctctacgtacatgtactataataaaattcttcatctaaatctagctcatatcatttattttctgatgctatatttttattgagaaatcaaaatatccatatgttgagagcaaatcttgatgtaatcactactgatcaaagtgcacctgagtattttatgcctttaaatgagtagccgaggaactaaagaaggaacgattgggacatgtttgttaggatgaacttaagttaagttcattccactctttgaaatcttaagaaatgtg

SEQ ID NO: 77528 - DNA, 2290 bp, Zea Mays
ctcctccctcccccgcccgttcgtagctccggtgacagccgccatcgcttcgggctccagatcccagcgccagcgccccaaaggtccagggttcgtcgtgctggggttggagtagacacggctgcggcggtggctcttccccttcccccctcatccatttttccttgctggggtttgactagacacagaaattcctcatgctaccatttagggtttagggttggttctcctacgtttcagcctcaaggtatcaatgattctgaggcatacgacatattttttgcggtacgacatgtagcaactacaaacctgcttgggattgttgtcttttgggtctgggtgtggaggtatttgaagatatgaagaataatgtctgaattggaccacactaattgttgttgacatgttctgccatatggagatggaaagtgatgccacttttctttgcaacattatcaacatctatccattattaacgtctatccatatttgactatctaatcttaacgacgtgatgtttatttttctcatattctcaaaggggaacactcacattccaagcgcatctctcaaggtgcccaagatatactaagcaaaaatcttgtatcctaatctgataacatgcataaatgtggatggaataggggcatatgactggttcaatcaaggccatgctcctgctgtgacattttaatgctaacgaataagatagcagcatcgatgaaaacagcctgaacataacccagcatactaacattcaagacaagatagcaataaaccaaatcaatacttctagctcattggaatgtcttcctgccttattttatccggattctttgagaaagagacatggatgcacccgattttccctgccctcttctatgcctgtgaaagagtcataaggaaatttcatgagaacgactaccattcaggtattgtgagcaatttatctgggagatgtgctctctattcacatgaagaagcctcggggtttcaagtactaaagtggaatgcatcttttttttgtaaaataccaagtcttgcctttcgactggcaccccttctctataactctggcaccaggagataactacttgactgtgcatatccgcgcgctgggtgaccgggcatccaaactttcgattctctgagattttgaactttgatggcagtgaaagggatcaggctccgaaaacagggagcaagaatatgtgtgttgtcttgcaagtcctctttcacgaacgagttgcttcttttatttttttaacatctaaatatccattcaaaatcatacacaatacttcactttgttcttcatgttatacagttcactaagtcaaaaggaaccttgtgcctcctgtgtttccatgatttactattgaacaatgaacatatctgattcacaatgatttagagaacaaaacaacaaggggattaacattttactttcactactttagaccagcactcttgtccgtttttttgtatccaataataaaggccaatttctggcttctctttgcaatatgctttgttgggattgaatctagaaccactgttcttaataatctagcacaaatatgaactgctgccaacaccaccatcttgctctttgtcttcaatatctagaacttttttggctggctgggggaggtgttcttatttctgaattgattcaagacatcgatactcccttagccaagggtgaaagggctataaagccaagaagacgaagaagggtgaagaattcaggttttcggaagcaatagtgaagactattttttggcttctctttgcaatatgctttattgggattggatcctcgatcattgttattaataatctatcacaaatatgagttgttgcagatcctattgacacaaccatctgactctctaccttcatttttttgcaatttttggttgcctgggaggtgttgttgttcctgagtatcttgtcaggcctccttcatgtcttctccctgttcaagtggtgggcttgggagattggctcttgagatatcttctctacgtacatgtactataataaaattcttcatctaaatctagctcatatcatttattttctgatgctatatttttattgagaaatcaaaatatccatatgttgagagcaaatcttgatgtaatcactactgatcaaagtgcacctgagtattttatgcctttaaatgagtagccgaggaactaaagaaggaacgattgggacatgtttgttaggatgaacttaagttaagttcattccactctttgaaatcttaagaaatgtg

SEQ ID NO: 77529 - DNA, 2622 bp, Zea Mays
cccctgcttgcccgcggctccggcgacagccgctttgcactccggttccctccaccgccgctccaaaggtccaggggaacactcacattccaagcgcatctctcaaggtgcccaagatatactaagcaaaaatcttgtatcctaatctgataacatgcataaatgtggatggaataggggcatatgactggttcaatcaaggccatgctcctgctgtgacattttaatgctaacgaataagatagcagcatcgatgaaaacagcctgaacataacccaggtaacttatgtcagttgtacttacattttccatataacaccatggttttaggcttctatcaaactgatgaagactgaattttgtctaagtttttttaaagcatactaacattcaagacaagatagcaataaaccaaatcaatacttctagctcattggaatgtcttcctgccttattttatccggattctttgagaaagaggtaagctcaatgtttgtttcaatctaattttttagtatgttttaatttcttcgcatctgctggagactttaaatttgaactaagtctcaggagaagcatttgaattgttacagatacttttggtctcacctaactgtgtggtatttatagtttgctcatttgtatacaatcatcggctttacaaccttgtttgctcaacccaaaaaaaaggtgggcagaaactgtctgtttcatcactcaccaagcacacccaacgtacatttaaggagaacagcacaagaagacaagaagcacctaaacggaagtgaataattaattaaccatgtaaaaccatgtcctcacacgtttaagttgtttacatttcctcataaatgaatttgtaccaattcaaacaagcttgttagcaagtacgagtagcatttgtgttagaaaaatacaagaaaaaagatctcttaagttctcaacttttgcttgatcttgtgtgttagactgttagtgttcatatggcgcatcccaaatattcctgtcctgtaattgaacacagacagcccaaatactccttctgtaattgaacacaagaatatgtttagttgatggtctggtcatggagctcaaatttggttcaacatgaattatgatactgactgtgtactctagatatttatgtttattttttgcaaatttgtttgttcatttcagacatggatgcacccgattttccctgccctcttctatgcctgtgaaagagtcataaggaaatttcatgagaacgactaccattcaggtattgtgagcaatttatctgggagatgtgctctctattcacatgaagaagcctcggggtttcaagtactaaagtggaatgcatcttttttttgtaaaataccaagtcttgcctttcgactggcaccccttctctataactctggcaccaggagataactacttgactgtgcatatccgcgcgctgggtgaccgggcatccaaactttcgattctctgagattttgaactttgatggcagtgaaagggatcaggctccgaaaacagggagcaagaatatgtgtgttgtcttgcaagtcctctttcacgaacgagttgcttcttttatttttttaacatctaaatatccattcaaaatcatacacaatacttcactttgttcttcatgttatacagttcactaagtcaaaaggaaccttgtgcctcctgtgtttccatgatttactattgaacaatgaacatatctgattcacaatgatttagagaacaaaacaacaaggggattaacattttactttcactactttagaccagcactcttgtccgtttttttgtatccaataataaaggccaatttctggcttctctttgcaatatgctttgttgggattgaatctagaaccactgttcttaataatctagcacaaatatgaactgctgccaacaccaccatcttgctctttgtcttcaatatctagaacttttttggctggctgggggaggtgttcttatttctgaattgattcaagacatcgatactcccttagccaagggtgaaagggctataaagccaagaagacgaagaagggtgaagaattcaggttttcggaagcaatagtgaagactattttttggcttctctttgcaatatgctttattgggattggatcctcgatcattgttattaataatctatcacaaatatgagttgttgcagatcctattgacacaaccatctgactctctaccttcatttttttgcaatttttggttgcctgggaggtgttgttgttcctgagtatcttgtcaggcctccttcatgtcttctccctgttcaagtggtgggcttgggagattggctcttgagatatcttctctacgtacatgtactataataaaattcttcatctaaatctagctcatatcatttattttctgatgctatatttttattgagaaatcaaaatatccatatgttgagagcaaatcttgatgtaatcactactgatcaaagtgcacctgagtattttatgcctttaaatgagtagccgaggaactaaagaaggaacgattgggacatgtttgttaggatgaacttaagttaagttcattccactctttgaaatcttaagaaatgtg

SEQ ID NO: 77530 - DNA, 3204 bp, Zea Mays
ccaccctcccctgcttgcccgcggctccggcgacagccgctttgcactccggttccctccaccgccgctccaaaggtccaggtaagcgcgctccctccccctcctccctcccccgcccgttcgtagctccggtgacagccgccatcgcttcgggctccagatcccagcgccagcgccccaaaggtccaggtaagcggaggcggatcttccccttctcccccattcgttttccttgctagggttcatcgtcccctcctcattcccttcccgacgagctctctccccattgctagggttcgtcgtgctggggttggagtagacacggctgcggcggtggctcttccccttcccccctcatccatttttccttgctggggtttgactagacacagaaattcctcatgctaccatttagggtttagggttggttctcctacgtttcagcctcaaggtatcaatgattctgaggcatacgacatattttttgcggtacgacatgtagcaactacaaacctgcttgggattgttgtcttttgggtctgggtgtggaggtatttgaagatatgaagaataatgtctgaattggaccacactaattgttgttgacatgttctgccatatggagatggaaagtgatgccacttttctttgcaacattatcaacatctatccattattaacgtctatccatatttgactatctaatcttaacgacgtgatgtttatttttctcatattctcaaaggggaacactcacattccaagcgcatctctcaaggtgcccaagatatactaagcaaaaatcttgtatcctaatctgataacatgcataaatgtggatggaataggggcatatgactggttcaatcaaggccatgctcctgctgtgacattttaatgctaacgaataagatagcagcatcgatgaaaacagcctgaacataacccagtttttttaaagcatactaacattcaagacaagatagcaataaaccaaatcaatacttctagctcattggaatgtcttcctgccttattttatccggattctttgagaaagaggtaagctcaatgtttgtttcaatctaattttttagtatgttttaatttcttcgcatctgctggagactttaaatttgaactaagtctcaggagaagcatttgaattgttacagatacttttggtctcacctaactgtgtggtatttatagtttgctcatttgtatacaatcatcggctttacaaccttgtttgctcaacccaaaaaaaaggtgggcagaaactgtctgtttcatcactcaccaagcacacccaacgtacatttaaggagaacagcacaagaagacaagaagcacctaaacggaagtgaataattaattaaccatgtaaaaccatgtcctcacacgtttaagttgtttacatttcctcataaatgaatttgtaccaattcaaacaagcttgttagcaagtacgagtagcatttgtgttagaaaaatacaagaaaaaagatctcttaagttctcaacttttgcttgatcttgtgtgttagactgttagtgttcatatggcgcatcccaaatattcctgtcctgtaattgaacacagacagcccaaatactccttctgtaattgaacacaagaatatgtttagttgatggtctggtcatggagctcaaatttggttcaacatgaattatgatactgactgtgtactctagatatttatgtttattttttgcaaatttgtttgttcatttcagacatggatgcacccgattttccctgccctcttctatgcctgtgaaagagtcataaggaaatttcatgagaacgactaccattcaggtattgtgagcaatttatctgggagatgtgctctctattcacatgaagaagcctcggggtttcaagtactaaagtggaatgcatcttttttttgtaaaataccaagtcttgcctttcgactggcaccccttctctataactctggcaccaggagataactacttgactgtgcatatccgcgcgctgggtgaccgggcatccaaactttcgattctctgagattttgaactttgatggcagtgaaagggatcaggctccgaaaacagggagcaagaatatgtgtgttgtcttgcaagtcctctttcacgaacgagttgcttcttttatttttttaacatctaaatatccattcaaaatcatacacaatacttcactttgttcttcatgttatacagttcactaagtcaaaaggaaccttgtgcctcctgtgtttccatgatttactattgaacaatgaacatatctgattcacaatgatttagagaacaaaacaacaaggggattaacattttactttcactactttagaccagcactcttgtccgtttttttgtatccaataataaaggccaatttctggcttctctttgcaatatgctttgttgggattgaatctagaaccactgttcttaataatctagcacaaatatgaactgctgccaacaccaccatcttgctctttgtcttcaatatctagaacttttttggctggctgggggaggtgttcttatttctgaattgattcaagacatcgatactcccttagccaagggtgaaagggctataaagccaagaagacgaagaagggtgaagaattcaggttttcggaagcaatagtgaagactattttttggcttctctttgcaatatgctttattgggattggatcctcgatcattgttattaataatctatcacaaatatgagttgttgcagatcctattgacacaaccatctgactctctaccttcatttttttgcaatttttggttgcctgggaggtgttgttgttcctgagtatcttgtcaggcctccttcatgtcttctccctgttcaagtggtgggcttgggagattggctcttgagatatcttctctacgtacatgtactataataaaattcttcatctaaatctagctcatatcatttattttctgatgctatatttttattgagaaatcaaaatatccatatgttgagagcaaatcttgatgtaatcactactgatcaaagtgcacctgagtattttatgcctttaaatgagtagccgaggaactaaagaaggaacgattgggacatgtttgttaggatgaacttaagttaagttcattccactctttgaaatcttaagaaatgtg

SEQ ID NO: 77531 - DNA, 2247 bp, Zea Mays
tcaacaacacatgagagtgagtttttctaccactggtcacagccaccgtctccctccttccccaacctcgccgctatcaggtggtggatgcagcagcgcggccgctccttcaacagccgctctcggagcttctcccgcgcccgcgtcgccatcgagggatcttaatctcacagccatccctcggtcatttcgtttgaactcggttctgaaattctgactgacgaacgcacgcaacgacctaccgtgatggacgccgccgccgccgccgccgttgtttctcttaacgggaagatgggggccgaggagaggaaggcgcagaagagctactgggaggagcattccaagaacctcaccgtcgaggccatgatgctggactcccgcgccgctgatctcgacaaggaggagcgccctgaggtcctgtctttgcttccttcatatgaaggaaaatctgtactagagcttggtgctggaataggccgtttcactggagaactcgctaaaacagctgggaatgttcttgctctggattttattgaaagtgcaattaaaaagaatgaaagcattaatggtcactacaagaatgcatcctttatgtgtgctgatgtgacatcccaggacctagtgcttcaagctaactccatcgatctgatattttcaaattggttattgatgtatctttcagatgaagaggtaatggatgagacatgatttgaataagtaacaaattctaattccatagtattccttgatcttctcgctgaggttgctcttgtaaaatggatctgtgtcataaaaagttctgaatggcgccttttttctaaatgagttaaaattggtgttcaaatgtactgactgaaatatatttgaagtttctggttcttgcattttccaacttttgtctctatgtaggttgaacagctagttcagagaatggtaaaatggttgaaggttggtggctatatcttctttagggaatcttgcttccatcaatctggagattcaaaaaggaaagttaatccgacacactatagggaaccaagtttttatactaaggttttcaaagaatgccatacctttgatcaagatgggaattctttcgaactttctctggttacttgcaagtgtattggtgcttatgttaaaaacaagaaaaaccaaaaccagatatgttggctatggcaaaaggtccattctacagaagataaaggatttcaaagatttttggacaatgtgcagtacaaagccagtggaatattacgttacgagcgcatttttggagaaggttatgtgagcactggtggagttgagactacaaaagaatttgtggacaagctggatctcaaacctggacataaggtgcttgatgttggatgtggaattgggggaggtgacttttatatggccgaaaaatatgatgctcatgttgttggtattgatctttccataaacatggtatcatttgcacttgagcgtgccattgggcgcagttgctcagtggagtttgaagttgctgattgcactacgaagacatacccagacaacacatttgatgtcatatacagccgtgatactatccttcacatacatgacaaaccctctttgttcaaaagttttttcaagtggctgaagcctgggggcaaggtccttatcagtgactactgcaggagtcctgggaaaccatcagaggaatttgcagcgtacattaagcagagaggttatgacctacatgctgtggaggcttatggacagatgttgaagagtgctggttttcgtgatgtcattgctgaggatcgaactgatcagttccttggtgttttagataaggagttagctgaatttgaaaagaacaaggacgatttcctgtctgacttcacccaggaggactacgatgatatcgtgaacggttggaaggcaaaactgcagaggagttctgctggtgaacagaggtgggggctgttcatcgccaccaaatgatgatgcagatgtgagatgtgcgtggacgtgaaaataaagcatccttttactataattgatgtcgcattagttattctgaacccaggtagcctgggtcagtacctactaccctgtttatcataggacgtggagagaactcgtccagttttacattcccgtcactgctttgccggagtgctgtggcaatccataaaatctaataaagtaacaataagctgtctgcaactgcaaagtatgtgcccatgtggtcttaattgctatggttgtgtgatg

SEQ ID NO: 77532 - DNA, 4045 bp, Zea Mays
cagtccacaagcgcgcgcagattccagcacgcgcgcgccagcaagctccaccaccaccagtccaccgccaccatggacgcgacggctagcagagccggcggcggcgacctgaacggcaaagaaaatgaggaggacaagaagggcgcagcgccggccaagaaggtgtcgctgctcggcatgttcaggtacgccgaccgcctggacctgctgctcatagcggtgggcacggtgggggccctgaccaacggcgtggcggaccccctcatgaccgtcctcttcggcaacgccatcgactccttcggcgacagcacctcgcaggacatcgtccgcagcgtgagaaaggtcgttatgaatttcgtatacttgggcatcggaacggctgttgtctcatttcttcaggtgtcgtgttggacgacggcaggagaacggcagtcggctcgtatccgttctttgtaccttaacgcggtcttgaggcaagacattgcctacttcgacacagagttgacaacaggccaagcggtttccaggatgtccagcgataccctcgtgattcaggatgctcttggcgagaaggcgggaaagcttatacagctctcgtcgacctttttcagtggttttataatagcgttcacaagaggctggctcctcaccctcgtcatgctaacatcgctaccgctaatcgcagtcgccggcatagtttcttctcacttcctaacaaacatttctagcaagaagctggcatcttacggagatgctggggacaccgttgaacagaccatcggagctataagaacggtagtttcctttaacggagagaacaaggccattgcagcgtacaagagcttgataaagaaggcctacaggactgacgttttggaaggcctgatcaacggtttcggcatgggatctgtcttctgcatcctgttctctagctatggcctagcgttctggtacggcgggaagctagtcgttgacaaaggatacactggtgggaagatcatcacggttctgttcgctgtgttgactggtgcaatgtctttaggcggcgcaacgccctccgtgtcttcaatcgctcagggtcaatctgcggcgtacagactgttcgaaacgattgggaggaagccggagatagattcgggtgacaccagcggtgtggttttagaagacatcaagggtgacgttgagctgaaagacgttcgctttcgctaccctgcgaggccggagcagctgatactagacgggttgacgttgcgagtaggcagtgggacaacaatggccatggtcggagagagtgggagtggcaagtcgaccgtcatcagccttgttgagcggttctacgatccacatggtggtgaggttctgatagatggcgtcaacatcaagaacctaaggcttagttggatcagagagaagatcagcctggtcagtcaggaaccactgctcttcatgacctccattaaagacaacataatgtatggtaagggagacgcgacagtagaagaggtcaggagggcagccgagcttgcaaacgcagcgaacttcatcgacaagttgccggatggctatgatactatggttgggcagcgtggcacgcagctctctggaggacagaagcaaaggatcgcgattgcaagagccatccttaaagaccccaagatactcctgctcgacgaagcgacgagcgcgttggacgtggagtctgagcgggtagttcaggaggcgctgaacaggataatggtggaaaggaccacgcttgtcgttgcccatcgcctgagcaccgtaaggaacgttgactgcatcacagtactccgtcaagggaaaatagttgaacaaggccctcacgacgtattggtgaaggatcccaacggggcatactctcagctcatcaggctacaagaaacgcgtgctgacgaaaggcgcaagacagcagactctgggtctggggtcccagatcactccagatcaaagagcaccagcctgtcgcagtcgctcgccaggcggtcactactgaacaaagactccttcggtagcagcagcagcaacagatactccttcaagaaccccctaggattagcggtcgatttacacgaggacaggagtaccataggcggggagaaaacggaggagctctccgacgttgtggtggtaccaaagaaagcacccatcggacggctcttgaagctcagcgtgccagaagcgccggtccttctgctaggctccgtggcagcgtcggtgcatggcgtcgtcttcccgctgtttggtttgctcatgtcgggcatcataaaatcgtttttcgagccgccggataagctgcgagaggacagcagcttctgggcgctgatagccgtcgctctgggcgtcacgtgcttggtcgtggtcccagcgcagtacttcctgttcgcggtcgccgggggcaagctgatcgagcgcatccgtgccctgtcgttccagagcatcgtgcgccaggagatctcttggttcgacaacgcctccaattccagtggagcgcttggtacgaggctctcggtcgacgcgctaaacgtccggcgcctagcaggagacaacctggcccttataatgcagtccatagctacactggtaactgggtttgccatagctttcgcggcagactggagacttgccctgatcatcacgtgcgtgattcctctggtgggtgcgcagggttacgcccaggtgaagttcttgaagggattcagcgaagatgctaaggagatgtacgaggatgcaagccaagtggcgactgatgctgtcggcagtatcagaaccgtggcgtcgttctgcgcagagaaaagagtggtcgcagcgtacagcgacaagtgtgaggctctgaggaagcagggcatccgaagcggagtcgtcggagggcttggttacggcttctcgttcttgatgttgttcttcacgtatggcctttgcttctacgtcggtgcgcagtttgtgcgccaggggaaaactacctttccagatgttttcaaggttttcttcgcgttagttctggcagctattggagtctcgcaagcgagtgcgctggcttctgatgcgaccaaagcaagggactctgctatttccatcttcagcgttctggacagggagtccaaaattgactcgagcagcggcgacgggatgacgctggaggttgtcagtggcaacatcgatttcagcaacgtcagcttcaagtacccactgcgtcctgacgtccagatattcagcgacttcaccttgcgcattccatctggaaagacagtggcgcttgtcggagagagtggcagcggcaagtcgacgataatcgctttgctggagcgtttctacgacccagattccggtagaatatccctggacggcgttgagatcaagagcctaagagtgagctggctaagggaccagatggggctggtagggcaggagccggtgctgttcaacgacacgatccgcgccaacataacgtacgggaagcacggcggcgccacagaggaagaggtggtggcggtagccaaggcggccaacgcgcacgagttcatatcgggcctgccccaagggtacgacaccatggtgggcgagaaagggatccagctgtccggcgggcagaaacagcgggtggcgatcgccagggccatagtgaaggacccgaggatactgctcctcgacgaggcgaccagcgccctcgacgccgagtcggagcgcgtcgtccaggacgcgctggaccgcgtcatggtcagccggaccaccctcgtggtggcgcaccgcctctccacgatcaagggggccgacgtgattgctgtgctcagggaaggcaagattgtggagagaggaaggcatgaagccctcatgcgcatcagcggcggagcctatgcttcccttgttgagctccgctccaagactgaatagcactggtgtatctttatagagtacagtttgtgcatttatttatacaagtatactgtttttccgcaacccaattgttcgtaacttttacaagttgaaatgaaaattacgcggtaggtgaagggaccgtattcaaatgcgt

SEQ ID NO: 77533 - DNA, 914 bp, Zea Mays
cactttagtgccaccaaatgtgttaaacagtgctaaaagtagtctctaacctactttccaccgaatacccctttctctcacctcacccttggccacctacccccaaatcgtgttctccatctacacgccctcgtcaaacctcttttcgatagtcatcgctatgcccgggatcccgtccagatcccatcaccaccggatctcgtccagaccgcgccgcctctagaccccgtctagccaccgggcctagagctcgtgaagctgcctttcctctgatcgacggagatgaccatggagacgacaggtggagggatttgttctctcagccggatccactcccccacgacgccatcaatttcttgtcgcattcttattctcctagtgtccatggaacccatgcgggtttggatttgaactcttaggttgaagacttccctaatctttccctttaacatgcatgggaaccgtggtggatgcactgtaggtgtgtgagtgccgcgtggtggcggtcgtcggtccaaacgtggcaaaccaatgtctactggtgctggcctggaggatccaatgtcgtggaagttaggactagtcgtggtcttacatcgcccgtacaaaggactgaatgccacaacaattttagatcattgcccgtgggagctgctgacttcttcggtcttggtgggtctcgcccaaacgcaccatccacactaagaaatttatgtcactattaggttatgtaagaatggctgctattggtgtatgaactatttagttgttatgcttgggacatcaagaacattagttgtgaactatatgtgccattttagaaatatttatgcttgttgacgggatgaaatctgtttatgccaaaaacaatgctattttttatgctgaaaataatgctaactgtttatgaagat

SEQ ID NO: 77534 - DNA, 795 bp, Zea Mays
ccacaactatatatacagttggatcataatccaacagattatggtgtttgcttacacgcttgcacatagggcctaattgcatattagtcgttgctgacgtttagaggaatcggagtggcgggtggcttgcggccttgcgggaggcagccgagaaagccgcaagggactgtatatacgtaggactggatatcaagtcaacttggctcgactcatattaattaatgtggccactgtagatcatagtgccagagtgttatcacgttatttttatgatagcatgtacattggtatcttggtaccatgaccaacgacgttggtactataggttatgacactactgttttagtttcatcgcatgtctagatgtgatttttttttaaaaaaaatagaattaaaaaatgaatctctatatgacgaagtgaggatctaggtcgtgcattgggtcacgtaggcaggtttttattgcccatctcttcctcaagctgaattacatggagcgctaagactatttcgatcccaacaatattgacatacagatgtggataatgaattgtccttggctgcacgcgagtgcgtaaaaattgagcgtgtccagcagaccatgattgtggatgcatatcgtcatctccacaaatgagagggaactgcgtgatcgagcgtccgaacgcttattttgcacgactaaattcctgatctactgaaaagatgaatagtagaatatcctagcgcaaaatacggatcctccgctggatacgcaagctgacgggagagcataatcacgaaagaaaacaaaag

SEQ ID NO: 77535 - DNA, 3934 bp, Zea Mays
aaggaaggtggcagcccaatttggaacacccttgcccgcatacagatacatccaacctagccctagccgttagcggaatatactaaccaggacacgcataattgcatacgttcattcatgacataataactagataacacatgacgcatagcttaaccgatagaacaaacataacggagcacaagacaagcgaataaatctaacgagtctcgtctccagaactctagattaggactgtagctaatgaaagttcgtcaaggctacccactgttccaacaacagcaccagtgctcaggacatcatgtcattgtcatgacgtaacattcttaagaaggcaatgacagaaagtatctctcagctccttcctcgacacgtacaaaaaacgagtaagcgtgacccgagtgcagcttcaggcttctgcttctgctgccttcgaagagttctcgggcgcctttagcggctcgtccggtgctttgcttgccctgtgaaactccaccgcgtccttgaattcctccctggtggctgtgtccttgaacttgagagcaaacgtggcaaggctgctcggcgactccccaatgctgttcatacaggcaaacgtcacgcccttcttgtccatgtccttgagcgacatgtcgttgtagaggctcgcgttcaggaccagacggtagttgccctttgcccgcatgacgagccgggctctctcgccgccggaggaggatacagggacgttcagcttcagttcaccttttcctctttctttccagccaccatctaggtactcatacaaggcagaatcggcagtaaatacagccttctcgttttcttcgccggtttcgacagggccttctgccatagcaaatttcttgggtgtttctgctgaggtagcaagcactgtggcggaactcccgttgctggcagcaccaagactaaaggaagggaacgaagaaccatcagctttcagcccgaacaggggaccagtacttgggccatctttagaggctgagccaaacgagaatgacgtgcttgaaaatccagttccagtcagactggtgaaagcattttggccacttgacagattcgtaaacgagaaaagggatgttgctgatgatgtctgccctttgttatcagcgtctttctgatgtgattcacctccatctttctgctcagatttatccttgctaattttgccagcatctctctgctcctcagacaagcaatccttggtctccgattcacctccacctttcttctcagtatcatccttgctaactgtaccattatttccagcttcatctgccccttccttttcttcagcatctccctctttcgttttgccctgaacttcagatgacatgcagctaccttcgttgggttttccagctaccactttgtctccaccagattcagcctctgtgccttctgccttgtcactggttccaacaggttgaggtggtgcttcagttgtggcaccggagtcagtatttacaccagagcctgcattcttgtctggcacagacaaagtatttttcccagtaccattgcatccctcgtcacctttaacatctgaaggctggacctgtgggacaggggcgcatgtttgaacactagaatcagtgggggcaaatctaattgcagagaaaggattagaaggagctgatgatgtttgctggcgccgaacctttacaatgatccgggttgccataacttcctcagtagctttcttaaatgtacccatctcttgctctggttcgtcatcatcaggctcaggattatccttattgatttgggtacctgcaaccctcttcctagagcctggggtttgttcctcatcggccatcttccaagttgatagcccctaaaacaaacttagaaacagtaaaaagaaagacccatgagccacaaaaatagtactccctccgttcataaatatatgacaccgttaacttttaaaaaaaactttggccactcgtattatcaaaaaaataatgaattaacattttttctgatttattttatcacttaaggtagtttgtgcttgacttaaaattttacatttttgactaaaaatattttgaataagacgagtggtcaaagttttcaaaaaaagtcaacggtgtcatatatttgtgaacggaggtagtaacaggtagggtgccacaattcagaaatgaaaatgtagagttaaacctaaagataaggtttatattagagtgatagctcaatcagcttcataaacagacaaaaagtagtccaggaatttacatgttaacatgataacttggcaatctatcaaactaccaacaaagaaaaagaaacctcacaaggccttcctatatacagagaggcaaaggccatgggcgtccgccgatttggagcagcacacacggtggttgagggcaacaaccccaatctttgggcagagcatcgatctggcagtgctcgtcggtgggctggcactcagtggggagatcatcagtgaggaggcactcccggcggggaggcagccagcaggtggggcagcacttatgacggatagaacgctcaatgggagaaactcgtcacagcagaggcaagctactaggaggcactcaaggacggcgagaaaaggccaagacaagctcctcagaagctgcttaatgaggaaaccagctcatatttgttttgcagggaagtttcgcgtttggttgctccactgttttttttcctggtgaaaacctgctccaaaagcagttccaaaccgaaccatactacataatgcaacccagccaaaggatcatgtttaaaatcccattcgcgtaaacaatatactggcataatgattcccctgatttgacttctattccacttgctatatgtaatgacataacaacatgagtagcaattagactgaaaaggtacttttaatgacaacaaatatgatgtggtaagtgatggaagaaaaaacaattgctactctgtaaatagtttgatggattccttttcggtagataatttgatggattgtcaacatagcatgttaacatgtaaatgcgtaaatttcctttttgctgtatatgtgtcgctaagaagcagtttgagctattgctacaattcccttttaatccattttccatcatccctcatataaagtttcaaacttgcatgaaaataaggagtgcaatataacaaaggtccatgtagtcaatcgtccattaagatgataaattccagttaaccatctctcactcaaaatttcatcaatatctttcataaaggtggttcagagaacaaaaatggcagctctaagcctctaacccatataagccatcagtaactgtggacagaaagagtaatagagcattaacagactgttctagttctagttcgttcaaaattcaccaatttgcaagttgtatcagtttatttggagctgccatgtgatgtgttgttttccaaaatgttaggttattacagggtactaaacaagagcaaatggctacaaccgaaccagttcatccacattacagcaaatgagtaaactgcttagaaaactcaactttacatgggagaacctacagtcacatgtcacataggcttgcaaatgcaacttccctatttcaattggcaatattcctcaatcatcccacctatgcccctggcttaataaaatcagtatccccagttccccacctccacacaccgaataaaactttctctgtaatcacccaactgaacactacgcaatgatctccgtcaaatcgaactctggaacactcaaatccgacctaaacctgactttaaccctaatccaccccgaacctaattatagaacccgaatccactctaaaagctgggtcatttcacatgcaaatccagtagcacggagagagaagcaacattaatttggatcgataccttccggagggctgtggtgagctcgccgcgggtgaagttg

SEQ ID NO: 77536 - DNA, 3870 bp, Zea Mays
cactaatgtattcacctattttgataccacaataagttcgttaccgcgctgtgctccatcatattcatgaccacctgaaccatcagcaagggcagaagcacatgggaaaactatcattattaagtcaataccaatcttcacagcagttagagaaagtcagcgataccttctgggtcttcccacaaccaatcttgcgcacacactaatccttgaaccgttaaagggtccatagtactgagatactgatttggttcggtgtcaacgaggaatgggatgggatcaatcctgtgttgacctcgtcccttattttttgagggattgtatcatccactatttttaaagaatattccttgatcctgactctggacctccaaaccaaacataggtcaagttagaatgatctcactccatccctcttcatccttcctcattcatccatccaaacactatcttaatgtaccggcttcactgtccaaagggatgatggatacagcgatggctaaaatatcacgagccatttgcgcaagtacaggatacttgttggctgcaaaggacttccaccatccaaggacatcaaaattatcattatttccttctttttgagttagaacttggcgagcaggtcactgatttcaaataagatggacagacacctagttagaacgttcgaaacaaatacagaaatcgaaagagcaattggctacaaaacagaggcctaaggacataatgttactgctgtgatacaaaatattacagtatgttgctctgatttttgctctcagtttactcggcgcttcagttgttccctgagttgatttgtgcagtgtcatcagacagcttgtctgattcaaacttggcacctgatctagacagacacttccggcgaacctggtatcagtcttcctcgtgcttccttttagaactggagtgatgctccctccgatgcttgtgtgacctcctgtgttcctcatcagagtgttcctcgtcagagtagcggtgatcatctctatgcctatgccttgatttggaactccaacgttcatgctcatgctcatcttccgaagagctacaatggtgtctatgatgtctggattccctgtccttggagtgactcttgttcttatgtttgtgaacatccttgctctggtctcttgaatgctctgggcgatgcttcttccttgagtgcttatagctatcctcagattcatctttttcctcgtcggattcttggtgtttctttctatacttccgcactctgttctgttcatcatcagagtctttactatgttttgtcaagtttggcccctcatggtcaaacagaacagagctactaccttcacgttccttagccacagattgcagatcaagtccagaggcattcatatcaggaatggccttggcagcttcactagttgggttcgatgctgcagctaaatcattcatcttgttgtctccactcttaatgattgcagcaaacatcttcgcacggcgaagcctatcagctttcagcttctgttcctttgtcatggtagcttccaaagaacctgcctctttggaagctgctgcagcagcagcttttgcaatagtgtttgcaatccaatcatcatcaatgattccaaaaccttccctttggggctgtccactacttgtaagtgaagcatcaacatcactatttgaaatgtgtttggacagtgcatttcggtcctgtaaagatgagaaacttccaaagctggaagaaggatcattactaacatgggtgcgaacattgtccttggttcctttcatggtgttaagtgagtcatttgcagcacccagtcctcgagtagctgccattactatagcagcagcttcatctgcagtaactttccgagtcttgaccccacaaacaggatggaatatacccttcccttgtttgtcatacagctgcttctctgatggcccagatgagcttctatcagaagcactggattccatgctataattgatgtctttgcgctccattgagcaccttctgtcggcgcgttcacgagagcttctgtcagcgcgctcacaggagcttctgtcggcgcgctcacgagagtttctgcccctccggtcagaagaacctcttctgtccttgttattaggacttctaccatgtgaattggactgcaaaatcaataaaagaaatagaaacaaaccataattaaatttttccaatggatcgtaggaaaaaaggataacattgactaagtaaagaagctagtgtaatgcttagagcatgaagattctgatcaaacagtgggaattaaagtatttcttgtgaaatcctgcattgaaaaggtgggccaaagtctacaacacaacctttgtattcccagggtataaactaataaaagagaagcatcaacaattataaggttctgtttggatgtagttattgagggggaggaattgatgggctggaataccaaacactctgggtgtgcaggatatttttgatgagttagataacgtacaatatgagaaaatactaattaaaaaatgggcagtataagcttgaaaagcaaagcaaacaagagaagcatcaacaattataaggctctgtttggatgtagatattgagggggaggaattgatgggatggaataccaaacactgggtgtgcaggatattttttatgagttagatcagatacaatatgagaaaatactaattaaaaaacaggcagtataagcttgaaaagcaaagcaaacaagagatgcattcaggaaacaattgaaccaaggaaagtgattcaagttatcaaaacagacattagcaattcatgcccatgaagatgaagaacttttctaaatccaaaaataagaagaaaacattcaccatgtagtacttcaaattagtatagcagaatatcatcaaagtagatattatatttaaaagaaacagaaaagagatgcaaaaagccagtaagcaacaattcaaccaaagaaactgactcatgtgaacacgatacatccaccagaaaatcatgccataaagatgttagaccaaatgttttagttcctagtgcgtgttttagagagggaaaccctgcttttatagaaagaaaaaaggtatacaaagcttagaacagtcacaccacacccacgctgggaaaccagcttacaagattaggaccaacagaaaagtggtcaatgactgaataaaagaccccactacatgctactcaaagcagtgcatcagcgattaatgatttccacatgtgaacttacctgaagttcagagatcaagtgtaagacatcatatgcacttcagaacaaaaaaaaagagaagacggccagcaaaaagaatacaataagaatcaggaacagcagtacagcaacacttcagttttaaagatctcaaaatgttaagcaaccaggacccagaaaaaaaaagttacttagcatcgcaatgctggtttgcatgacttgaatgcacatcaagagtactcaagaatgatataaagcaactaagcctattagaaatcataattgtaacaataaggcaactacttaagaaaataaaagaagcttgatgaatgaagaacatagggccatcatttctccaattacaatatttccatcaattaggtgaacatctttagtagtagaaaggtcaatcaggtttgaatataaataatgaaataattttacaataaacaaatgcaaggtgtgcacacctgacaaatattaagtaaatagaaggatcactatcacaagatgagaatgaacgcatggaacatttgttgcaggacagcattttgagaaactaattttcttttggcttctccgaaatagaaaaaaggcacaataaacttcttttggcatctttgaaatattaacaaag

SEQ ID NO: 77537 - DNA, 3871 bp, Zea Mays
cactaatgtattcacctattttgataccacaataagttcgttaccgcgctgtgctccatcatattcatgaccacctgaaccatcagcaagggcagaagcacatgggaaaactatcattattaagtcaataccaatcttcacagcagttagagaaagtcagcgataccttctgggtcttcccacaaccaatcttgcgcacacactaatccttgaaccgttaaagggtccatagtactgagatactgatttggttcggtgtcaacgaggaatgggatgggatcaatcctgtgttgacctcgtcccttattttttgagggattgtatcatccactatttttaaagaatattccttgatcctgactctggacctccaaaccaaacataggtcaagttagaatgatctcactccatccctcttcatccttcctcattcatccatccaaacactatcttaatgtaccggcttcactgtccaaagggatgatggatacagcgatggctaaaatatcacgagccatttgcgcaagtacaggatacttgttggctgcaaaggacttccaccatccaaggacatcaaaattatcattatttccttctttttgaggttagaacttggcgagcaggtcactgatttcaaataagatggacagacacctagttagaacgttcgaaacaaatacagaaatcgaaagagcaattggctacaaaacagaggcctaaggacataatgttactgctgtgatacaaaatattacagtatgttgctctgatttttgctctcagtttactcggcgcttcagttgttccctgagttgatttgtgcagtgtcatcagacagcttgtctgattcaaacttggcacctgatctagacagacacttccggcgaacctggtatcagtcttcctcgtgcttccttttagaactggagtgatgctccctccgatgcttgtgtgacctcctgtgttcctcatcagagtgttcctcgtcagagtagcggtgatcatctctatgcctatgccttgatttggaactccaacgttcatgctcatgctcatcttccgaagagctacaatggtgtctatgatgtctggattccctgtccttggagtgactcttgttcttatgtttgtgaacatccttgctctggtctcttgaatgctctgggcgatgcttcttccttgagtgcttatagctatcctcagattcatctttttcctcgtcggattcttggtgtttctttctatacttccgcactctgttctgttcatcatcagagtctttactatgttttgtcaagtttggcccctcatggtcaaacagaacagagctactaccttcacgttccttagccacagattgcagatcaagtccagaggcattcatatcaggaatggccttggcagcttcactagttgggttcgatgctgcagctaaatcattcatcttgttgtctccactcttaatgattgcagcaaacatcttcgcacggcgaagcctatcagctttcagcttctgttcctttgtcatggtagcttccaaagaacctgcctctttggaagctgctgcagcagcagcttttgcaatagtgtttgcaatccaatcatcatcaatgattccaaaaccttccctttggggctgtccactacttgtaagtgaagcatcaacatcactatttgaaatgtgtttggacagtgcatttcggtcctgtaaagatgagaaacttccaaagctggaagaaggatcattactaacatgggtgcgaacattgtccttggttcctttcatggtgttaagtgagtcatttgcagcacccagtcctcgagtagctgccattactatagcagcagcttcatctgcagtaactttccgagtcttgaccccacaaacaggatggaatatacccttcccttgtttgtcatacagctgcttctctgatggcccagatgagcttctatcagaagcactggattccatgctataattgatgtctttgcgctccattgagcaccttctgtcggcgcgttcacgagagcttctgtcagcgcgctcacaggagcttctgtcggcgcgctcacgagagtttctgcccctccggtcagaagaacctcttctgtccttgttattaggacttctaccatgtgaattggactgcaaaatcaataaaagaaatagaaacaaaccataattaaatttttccaatggatcgtaggaaaaaaggataacattgactaagtaaagaagctagtgtaatgcttagagcatgaagattctgatcaaacagtgggaattaaagtatttcttgtgaaatcctgcattgaaaaggtgggccaaagtctacaacacaacctttgtattcccagggtataaactaataaaagagaagcatcaacaattataaggttctgtttggatgtagttattgagggggaggaattgatgggctggaataccaaacactctgggtgtgcaggatatttttgatgagttagataacgtacaatatgagaaaatactaattaaaaaatgggcagtataagcttgaaaagcaaagcaaacaagagaagcatcaacaattataaggctctgtttggatgtagatattgagggggaggaattgatgggatggaataccaaacactgggtgtgcaggatattttttatgagttagatcagatacaatatgagaaaatactaattaaaaaacaggcagtataagcttgaaaagcaaagcaaacaagagatgcattcaggaaacaattgaaccaaggaaagtgattcaagttatcaaaacagacattagcaattcatgcccatgaagatgaagaacttttctaaatccaaaaataagaagaaaacattcaccatgtagtacttcaaattagtatagcagaatatcatcaaagtagatattatatttaaaagaaacagaaaagagatgcaaaaagccagtaagcaacaattcaaccaaagaaactgactcatgtgaacacgatacatccaccagaaaatcatgccataaagatgttagaccaaatgttttagttcctagtgcgtgttttagagagggaaaccctgcttttatagaaagaaaaaaggtatacaaagcttagaacagtcacaccacacccacgctgggaaaccagcttacaagattaggaccaacagaaaagtggtcaatgactgaataaaagaccccactacatgctactcaaagcagtgcatcagcgattaatgatttccacatgtgaacttacctgaagttcagagatcaagtgtaagacatcatatgcacttcagaacaaaaaaaaagagaagacggccagcaaaaagaatacaataagaatcaggaacagcagtacagcaacacttcagttttaaagatctcaaaatgttaagcaaccaggacccagaaaaaaaaagttacttagcatcgcaatgctggtttgcatgacttgaatgcacatcaagagtactcaagaatgatataaagcaactaagcctattagaaatcataattgtaacaataaggcaactacttaagaaaataaaagaagcttgatgaatgaagaacatagggccatcatttctccaattacaatatttccatcaattaggtgaacatctttagtagtagaaaggtcaatcaggtttgaatataaataatgaaataattttacaataaacaaatgcaaggtgtgcacacctgacaaatattaagtaaatagaaggatcactatcacaagatgagaatgaacgcatggaacatttgttgcaggacagcattttgagaaactaattttcttttggcttctccgaaatagaaaaaaggcacaataaacttcttttggcatctttgaaatattaacaaag

SEQ ID NO: 77538 - DNA, 678 bp, Zea Mays
agaccttaagagccatcaatgtttgctttctcgatgttcttagcttttcacgactgtcctcctaaggctatggcgtgcaaactacagtttgaaaaaaaaggatgaaaacgagaagttgttggagatggccttacagataaacagactatttcggacctatttggtggcttactgattttgtaatctctggccggtgatctctagagaccaacccggtgatctctacgccggggtgggcatgtctggagaagttgggaatgaagcgtcttggtccgggagcgtatacatacagtagtagttttttttttcgagtaacatttacatttatacaccagatacaattattttttcagtggttagtattgaccagggccgtagctaggcaaattctttccgcggcgaactgtcagttcagctgcagctgcaagcgtgagaccattcagaaaccagaacacgtttgctctttgcttgtcatgtgaatgtccccgtggtattctttacgcgctccagtccagactccagcggcatatgaagcgaccagcgagctgttggccgtgctcgctgacggtagcgtgccgccgtgggcgcacggacgaggactgcgcctgcgcgtttcagcagttagcacgtctgcacatgtactggaatagattagaacacgaaacagttgactaatct

SEQ ID NO: 77539 - DNA, 828 bp, Zea Mays
tgcccctgcgctctctgtctctccctctgtccactctcggactctcaaagcctgccagctccggcagtccggcctacagttactactagtacgttggcgtctgctcccttcccttgcgtttgggagacacggaaatggccctcccggtcccttgcccacctctcgcttccccgcgccccagcaaactgccgtgctcgccccagccggtgaaaggccgtcgaggaccagcagcagcaagcaagatggcctcgtatggggcccgcgaacctgcacccaggggcgccatggccgcctggagaccacgcgggctggacgcggacgcggacgcggagggaggaggccggtgatctctagagaccaacccggtgatctctacgccggggtgggcatgtctggagaagttgggaatgaagcgtcttggtccgggagcgtatacatacagtagtagttttttttttcgagtaacatttacatttatacaccagatacaattattttttcagtggttagtattgaccagggccgtagctaggcaaattctttccgcggcgaactgtcagttcagctgcagctgcaagcgtgagaccattcagaaaccagaacacgtttgctctttgcttgtcatgtgaatgtccccgtggtattctttacgcgctccagtccagactccagcggcatatgaagcgaccagcgagctgttggccgtgctcgctgacggtagcgtgccgccgtgggcgcacggacgaggactgcgcctgcgcgtttcagcagttagcacgtctgcacatgtactggaatagattagaacacgaaacagttgactaatct

SEQ ID NO: 77540 - DNA, 2862 bp, Zea Mays
atgaagggaaagcagaagcttcttttccccttcctccaaaaaaggcatcaaaattctttgctaaaaaaggcttcaaaattctccgcttagggaaaaaaacttgattaggagcaatccatcgtttctttactcctcgatcgagagccccattcgttaggggttagggtcgtagcgagggctctgaaattggaatcccaacagaggaattacacccgctttgggacttcggagaagggaatgtcggcaaccatcgaccggctcgcgacaccgagtcatgagggtcgtgcacacagtgacgaaaagcgagagtgcaattctgatgaagagaactcagaaggagaaagaaagcccaaaaaggattccttcaagaagagagcagttactacagggtatagatttaggcattccttaaggagaaagagtaaaacaaagaatgataaccatatagcctcaatagaagacataagagatgttcaagagctggagattgttgaaaggtttcgccagtgtttacttgatgatggtctgttgccagaacatcacgatgattatcacacgatgttgaggttcctgaaagcaagaaaatttaatattgacaaagcaaaacatatgtggtcagagatgcttagatggaggaaggaatttggtgctgacaatatagaggaatttgactacactgaattagatgaagttgtgaagtactatccgcagttttaccatggtgtggacaaagatggaagacccgtttacatagaactaattgggaaagttgataccaacaaactagtgcagatcacaactattgaccgctatttaaaatatcatgtcaaggagttcgagagatgtctccagatgaggtttccagcttgttctattgctgcgaaaaggcacatagactcgtctactacgatattggatgtgaaaggcgtgagcctaaagaacttcacaaaagatgcaagagagctaattatgcggttgcagaagatcaacaatgacaactatccagagaccttatatcaactgtacatcataaatgctggccaaggattcaagatattatggggtacaataaaatcatttcttgatccagaaaccgcttcaaaaattcatgtccttggaaacaagtaccaaactaaattacttgaaataatcgatggcagtgaactcccagaatttcttggtggcaagtgcaggtgtgaagaatatggaggttgtccaaaatcagacaaaggcccttggaaggaccctgaaattttcaagagggttatcaatggtgaggcaaactatggtcgacaagttcttgctgtatcaagcataaatcagaaggaagttggttgtactgaacacacaactgagcaggaaaaaggcaatgatgcctctgctaaatctatttctcaggtggaagatgtttcttcttcaacggctttagtggatcccatcataagccctaatttgacccatgtggatgagttaaaatttcaaggacatgcttcctcatctgatgctcctcccattataggggatagcatccctgctgctggcaaggtcatggatgcatgctccaatccaagaaacagctcgacaccttccagctcaggttctttctctttgagaaatataccggcaacattgggaggacttaaaactcgaattgttgcatggtcaacattcgtaatcctgaccttgtcagcattcctctgttctgtgctgagcatagtgaccaaaaggctctcaaaccaggccatcacatgtgaccactatagtgctgacttccatcaaggatatatgggaaatggcacccttacatccgtattgacacggcttggtgagctggaggagaaggtacaagcacttgaagcaaagccaccccaagtgccatttgaaaaggaggaattgttacatactgctgtttaccgcgtggatgtgttggaagctgaactaatttctatgaagaaggtactcttgttttttagatattggagcgaggcatctaccatccaaagatggtgttcttgctttcttaaagaaaaaaaagtagctgtaagctgatttaccaggttgaccctagttagatatcttaaatttgaaatatatgctgtggctttattgtgaggtaataatatttttctcagccatgttagttacatccaagaattgggctgtttactaagtttcttgtttttttgttgtaccagaagtgaaatcctagattaatacatggaggtcatgaaacaattaatagaaaatgctacttttttgtactaacatttgtttctcttgtgagcaggccttgtatgagacattgattcggcaggatgagctgcttgcatatattgaccaacaacagacagccaaattttgtcggcagaagttctgtttctaagtactggagtacctgccacctattttcgtctctttggagatcgcatgcagctattgtggacccagtatacttgcaaatgttttcatatttgttgcagtgtaaagaaatgcaatttttagaaatacataggattgaggagcatggtagcttgtcttgagatcgtgttttagcgacaaaaacagaaaagcttgataccttgtacgcattttcaaccagatgcaggcgtaatctttccccagtatttggtgcaaggctccagtatttggtttgcttgtattatactatctctattctcgaatatttgtcatctgctagtttatttttaaactaaaacacgacaaataaaaagaacggagggagtatatgtctttgtttggggatgtaaatagagtggaactgtattttagaaaagaaagtgtttgatgaggctgtgagcagacgaaaaaaaagttcgttacatgtatgagtgtattggaaaa

SEQ ID NO: 77541 - DNA, 2465 bp, Zea Mays
gtacctccgcctctgtcctctctccaccgatgaagggaaagcagaagcttcttttccccttcctccaaaaaaggcatcaaaattctttgctaaaaaaggcttcaaaattctccgcttagggaaaaaaacttgattaggagcaatccatcgtttctttactcctcgatcgagagccccattcgttaggggttagggtcgtagcgagggctctgaaattggaatcccaacagaggaattacacccgctttgggacttcggagaagggaatgtcggcaaccatcgaccggctcgcgacaccgagtcatgagggtcgtgcacacagtgacgaaaagcgagagtgcaattctgatgaagagaactcagaaggagaaagaaagcccaaaaaggattccttcaagaagagagcagttactacagggtatagatttaggcattccttaaggagaaagagtaaaacaaagaatgataaccatatagcctcaatagaagacataagagatgttcaagagctggagattgttgaaaggtttcgccagtgtttacttgatgatggtctgttgccagaacatcacgatgattatcacacgatgttgaggttcctgaaagcaagaaaatttaatattgacaaagcaaaacatatgtggtcagagatgcttagatggaggaaggaatttggtgctgacaatatagaggaatttgactacactgaattagatgaagttgtgaagtactatccgcagttttaccatggtgtggacaaagatggaagacccgtttacatagaactaattgggaaagttgataccaacaaactagtgcagatcacaactattgaccgctatttaaaatatcatgtcaaggagttcgagagatgtctccagatgaggtttccagcttgttctattgctgcgaaaaggcacatagactcgtctactacgatattggatgtgaaaggcgtgagcctaaagaacttcacaaaagatgcaagagagctaattatgcggttgcagaagatcaacaatgacaactatccagagaccttatatcaactgtacatcataaatgctggccaaggattcaagatattatggggtacaataaaatcatttcttgatccagaaaccgcttcaaaaattcattgaactcccagaatttcttggtggcaagtgcaggtgtgaagaatatggaggttgtccaaaatcagacaaaggcccttggaaggaccctgaaattttcaagagggttatcaatggtgaggcaaactatggtcgacaagttcttgctgtatcaagcataaatcagaaggaagttggttgtactgaacacacaactgtggaagatgtttcttcttcaacggctttagtggatcccatcataagccctaatttgacccatgtggatgagttaaaatttcaaggacatgcttcctcatctgatgctcctcccattataggggatagcatccctgctgctggcaaggtcatggatgcatgctccaatccaagaaacagctcgacaccttccagctcaggttctttctctttgagaaatataccggcaacattgggaggacttaaaactcgaattgttgcatggtcaacattcgtaatcctgaccttgtcagcattcctctgttctgtgctgagcatagtgaccaaaaggctctcaaaccaggccatcacatgtgaccactatagtgctgacttccatcaaggatatatgggaaatggcacccttacatccgtattgacacggcttggtgagctggaggagaaggtacaagcacttgaagcaaagccaccccaagtgccatttgaaaaggaggaattgttacatactgctgtttaccgcgtggatgtgttggaagctgaactaatttctatgaagaaggccttgtatgagacattgattcggcaggatgagctgcttgcatatattgaccaacaacagacagccaaattttgtcggcagaagttctgtttctaagtactggagtacctgccacctattttcgtctctttggagatcgcatgcagctattgtggacccagtatacttgcaaatgttttcatatttgttgcagtgtaaagaaatgcaatttttagaaatacataggattgaggagcatggtagcttgtcttgagatcgtgttttagcgacaaaaacagaaaagcttgataccttgtacgcattttcaaccagatgcaggcgtaatctttccccagtatttggtgcaaggctccagtatttggtttgcttgtattatactatctctattctcgaatatttgtcatctgctagtttatttttaaactaaaacacgacaaataaaaagaacggagggagtatatgtctttgtttggggatgtaaatagagtggaactgtattttagaaaagaaagtgtttgatgaggctgtgagcagacgaaaaaaaagttcgttacatgtatgagtgtattggaaaa

SEQ ID NO: 77542 - DNA, 2476 bp, Zea Mays
cgggaaccgtgtacctccgcctctgtcctctctccaccgatgaagggaaagcagaagcttcttttccccttcctccaaaaaaggcatcaaaattctttgctaaaaaaggcttcaaaattctccgcttagggaaaaaaacttgattaggagcaatccatcgtttctttactcctcgatcgagagccccattcgttaggggttagggtcgtagcgagggctctgaaattggaatcccaacagaggaattacacccgctttgggacttcggagaagggaatgtcggcaaccatcgaccggctcgcgacaccgagtcatgagggtcgtgcacacagtgacgaaaagcgagagtgcaattctgatgaagagaactcagaaggagaaagaaagcccaaaaaggattccttcaagaagagagcagttactacagggtatagatttaggcattccttaaggagaaagagtaaaacaaagaatgataaccatatagcctcaatagaagacataagagatgttcaagagctggagattgttgaaaggtttcgccagtgtttacttgatgatggtctgttgccagaacatcacgatgattatcacacgatgttgaggttcctgaaagcaagaaaatttaatattgacaaagcaaaacatatgtggtcagagatgcttagatggaggaaggaatttggtgctgacaatatagaggaatttgactacactgaattagatgaagttgtgaagtactatccgcagttttaccatggtgtggacaaagatggaagacccgtttacatagaactaattgggaaagttgataccaacaaactagtgcagatcacaactattgaccgctatttaaaatatcatgtcaaggagttcgagagatgtctccagatgaggtttccagcttgttctattgctgcgaaaaggcacatagactcgtctactacgatattggatgtgaaaggcgtgagcctaaagaacttcacaaaagatgcaagagagctaattatgcggttgcagaagatcaacaatgacaactatccagagaccttatatcaactgtacatcataaatgctggccaaggattcaagatattatggggtacaataaaatcatttcttgatccagaaaccgcttcaaaaattcatgtccttggaaacaagtaccaaactaaattacttgaaataatcgatggcagtgaactcccagaatttcttggtggcaagtgcaggtgtgaagaatatggaggttgtccaaaatcagacaaaggcccttggaaggaccctgaaattttcaagagggttatcaatggtgaggcaaactatggtcgacaagttcttgctgtatcaagcataaatcagaaggaagttggttgtactgaacacacaactgtggaagatgtttcttcttcaacggctttagtggatcccatcataagccctaatttgacccatgtggatgaggggatagcatccctgctgctggcaaggtcatggatgcatgctccaatccaagaaacagctcgacaccttccagctcaggttctttctctttgagaaatataccggcaacattgggaggacttaaaactcgaattgttgcatggtcaacattcgtaatcctgaccttgtcagcattcctctgttctgtgctgagcatagtgaccaaaaggctctcaaaccaggccatcacatgtgaccactatagtgctgacttccatcaaggatatatgggaaatggcacccttacatccgtattgacacggcttggtgagctggaggagaaggtacaagcacttgaagcaaagccaccccaagtgccatttgaaaaggaggaattgttacatactgctgtttaccgcgtggatgtgttggaagctgaactaatttctatgaagaaggccttgtatgagacattgattcggcaggatgagctgcttgcatatattgaccaacaacagacagccaaattttgtcggcagaagttctgtttctaagtactggagtacctgccacctattttcgtctctttggagatcgcatgcagctattgtggacccagtatacttgcaaatgttttcatatttgttgcagtgtaaagaaatgcaatttttagaaatacataggattgaggagcatggtagcttgtcttgagatcgtgttttagcgacaaaaacagaaaagcttgataccttgtacgcattttcaaccagatgcaggcgtaatctttccccagtatttggtgcaaggctccagtatttggtttgcttgtattatactatctctattctcgaatatttgtcatctgctagtttatttttaaactaaaacacgacaaataaaaagaacggagggagtatatgtctttgtttggggatgtaaatagagtggaactgtattttagaaaagaaagtgtttgatgaggctgtgagcagacgaaaaaaaagttcgttacatgtatgagtgtattggaaaa

SEQ ID NO: 77543 - DNA, 2526 bp, Zea Mays
ccgggaaccgtgtacctccgcctctgtcctctctccaccgatgaagggaaagcagaagcttcttttccccttcctccaaaaaaggcatcaaaattctttgctaaaaaaggcttcaaaattctccgcttagggaaaaaaacttgattaggagcaatccatcgtttctttactcctcgatcgagagccccattcgttaggggttagggtcgtagcgagggctctgaaattggaatcccaacagaggaattacacccgctttgggacttcggagaagggaatgtcggcaaccatcgaccggctcgcgacaccgagtcatgagggtcgtgcacacagtgacgaaaagcgagagtgcaattctgatgaagagaactcagaaggagaaagaaagcccaaaaaggattccttcaagaagagagcagttactacagggtatagatttaggcattccttaaggagaaagagtaaaacaaagaatgataaccatatagcctcaatagaagacataagagatgttcaagagctggagattgttgaaaggtttcgccagtgtttacttgatgatggtctgttgccagaacatcacgatgattatcacacgatgttgaggttcctgaaagcaagaaaatttaatattgacaaagcaaaacatatgtggtcagagatgcttagatggaggaaggaatttggtgctgacaatatagaggaatttgactacactgaattagatgaagttgtgaagtactatccgcagttttaccatggtgtggacaaagatggaagacccgtttacatagaactaattgggaaagttgataccaacaaactagtgcagatcacaactattgaccgctatttaaaatatcatgtcaaggagttcgagagatgtctccagatgaggtttccagcttgttctattgctgcgaaaaggcacatagactcgtctactacgatattggatgtgaaaggcgtgagcctaaagaacttcacaaaagatgcaagagagctaattatgcggttgcagaagatcaacaatgacaactatccagagaccttatatcaactgtacatcataaatgctggccaaggattcaagatattatggggtacaataaaatcatttcttgatccagaaaccgcttcaaaaattcatgtccttggaaacaagtaccaaactaaattacttgaaataatcgatggcagtgaactcccagaatttcttggtggcaagtgcaggtgtgaagaatatggaggttgtccaaaatcagacaaaggcccttggaaggaccctgaaattttcaagagggttatcaatggtgaggcaaactatggtcgacaagttcttgctgtatcaagcataaatcagaaggaagttggttgtactgaacacacaactgtggaagatgtttcttcttcaacggctttagtggatcccatcataagccctaatttgacccatgtggatgagttaaaatttcaaggacatgcttcctcatctgatgctcctcccattataggggatagcatccctgctgctggcaaggtcatggatgcatgctccaatccaagaaacagctcgacaccttccagctcaggttctttctctttgagaaatataccggcaacattgggaggacttaaaactcgaattgttgcatggtcaacattcgtaatcctgaccttgtcagcattcctctgttctgtgctgagcatagtgaccaaaaggctctcaaaccaggccatcacatgtgaccactatagtgctgacttccatcaaggatatatgggaaatggcacccttacatccgtattgacacggcttggtgagctggaggagaaggtacaagcacttgaagcaaagccaccccaagtgccatttgaaaaggaggaattgttacatactgctgtttaccgcgtggatgtgttggaagctgaactaatttctatgaagaaggccttgtatgagacattgattcggcaggatgagctgcttgcatatattgaccaacaacagacagccaaattttgtcggcagaagttctgtttctaagtactggagtacctgccacctattttcgtctctttggagatcgcatgcagctattgtggacccagtatacttgcaaatgttttcatatttgttgcagtgtaaagaaatgcaatttttagaaatacataggattgaggagcatggtagcttgtcttgagatcgtgttttagcgacaaaaacagaaaagcttgataccttgtacgcattttcaaccagatgcaggcgtaatctttccccagtatttggtgcaaggctccagtatttggtttgcttgtattatactatctctattctcgaatatttgtcatctgctagtttatttttaaactaaaacacgacaaataaaaagaacggagggagtatatgtctttgtttggggatgtaaatagagtggaactgtattttagaaaagaaagtgtttgatgaggctgtgagcagacgaaaaaaaagttcgttacatgtatgagtgtattggaaaa

SEQ ID NO: 77544 - DNA, 395 bp, Zea Mays
gagaaactcggctacacctgcaaaatggatatggcaatggcttccttcgtcgccgctacgcaccaccacggcagtcacctggccgccggcttcccctactccgcgcgagcaggcaggagcgttggccgcagcggcgtcaccatctccattagagcccagaccaaagaagatgacatgttgcgttacaagttggatcgtatccctttcttagaagagaaggtgagaaagaacaggcatgaatatgggttaaagaagcctatactgcatgttctcagtgatcgcatgaatgaatctgggttttctcggcctgagggttacctttatccttatcctatcaagcctggcccttatttcattaaagaggaaggaaactgagtaaatcacatgctacttgg

SEQ ID NO: 77545 - DNA, 364 bp, Zea Mays
cctcttacgtttttaccataatctaacttatataatacagaagaaaagtaaacaagttttgttcgattattttaattttatgtggattggaatgaattgacatgaattttgacttgcgataaatttaaaatgacttaataccacataatatacatagactaagggtgaaacgcggttcatgggaccgtgagaaactcggctacacctgcaaaatggatatggcaatggcttccttcgtcgccgctacgcaccaccacggcagtcacctggccgccggcttcccctactccgcgcgagcaggcaggagcgttggccgcagcggcgtcaccatctccattagagcccagaagaagagtaatagcga

SEQ ID NO: 77546 - DNA, 1118 bp, Zea Mays
aactaccaattttctcgctcagacatacagaattacagagtcgaagtgcgctgtggcctgtggactctcccctccccaactccggcgaagggagcagaaacgttggcgtgttggttgggtggcgtcggcatggacgaggcaacgaagaagaatgtggaggctacggtgctggagatcctccggggctccgatatggagtccgtgacggagtacaaggtccgcgccgctgccagcgaccgcctcggcatcgacctctccatacccgaccgcaagctcttcgtccgcggcgtcgttgaggaatacctactttcactctcctccaaggaggaggcgaaggcggaggaggagggcgtcactggcagggagagcaagggcaaggaacacgaagaggaggacgaagaggatgacgatgaggaggaggatgaaggtaagggtggcgggaagagagagtacgatgaccaaggtgaccttatcctgtgccgcgtatcagtatgactttggagcagtgggaagcattttgcaatgctgtacctgcaatagaggatgccatcaaaaagcttgaagattcagactgaactggttttaagagcctcttcttatgcccgtgtcaaatgaaaaagcctgggaagcatttcgcaatgctgtatctgcaatagatgatgcatgaaaaagcttgaagattcagacagaactggtttaggagcctcttattttgcctgtatcaaataaaaaagcctatttctgacccttaacgagggccatatatgtgtcttgcaagagctaagttctgtaaaagatttctacatgtaccatgtgtaggagttaggatagagtgatagacgtactgctgcatacagttcggaatatttgctagtaacaagtaatctaccattaggtggcctggagttcacatgctatgctatgtgatgatcggggatgtgtcctagcaatagcaagctcatgaagttgtttctcccccctttttttttctgtgtattagggttagtttgacaacctcatttcctcagggatttctattttctcaaggagattttttttttaaaaaaatagagttgccaaactagcctttacatgtttatgtgatagcgatttttttt

SEQ ID NO: 77547 - DNA, 1751 bp, Zea Mays
aactaccaattttctcgctcagacatacagaattacagagtcgaagtgcgctgtggcctgtggactctcccctccccaactccggcgaagggagcagaaacgttggcgtgttggttgggtggcgtcggcatggacgaggcaacgaagaagaatgtggaggctacggtgctggagatcctccggggctccgatatggagtccgtgacggagtacaaggtccgcgccgctgccagcgaccgcctcggcatcgacctctccatacccgaccgcaagctcttcgtccgcggcgtcgttgaggaatacctactttcactctcctccaaggaggaggcgaaggcggaggaggagggcgtcactggcagggagagcaagggcaaggaacacgaagaggaggacgaagaggatgacgatgaggaggaggatgaaggtaagggtggcgggaagagagagtacgatgaccaaggtgaccttatcctgtgccgcctttcgagcaagaggagggtgactttatcggagtttaagggcaggtcgttggtgtccatccgcgagttctacgtgaaggacggcaaggagatgccctccgccaaaggtgactccaccatggcaccatggattactgctcgaatgttagatgtgatgtccactcgaatggatcttcatctgcaatgtcagcttgatattgccggaccttgaggcttgacccttttattacactcttatagtaatgaatgtctcagttttccagaaaccgaattcaccaattcgcagaacttagaactgagcagcgataatgatgtgatgttgttgttccagtgttatctgtctgtcatttacctatggctatctttttagacaaaacgtggctattatgtatccacgctttcgtaaatgttggacttctttatatagaaacactgcaaataccagttagttttttcaatctgtcactgcgtacggtatatttcattctcctgcactagcaatatctagaatctgttatggtctcagtgtgatttgatcatatcaacttatttttaggctatgccagtcctgtattttcatgcatcttcagaagtctttttagcgcagttattgtcttaccactggtgtctagctgtatcagtatgactttggagcagtgggaagcattttgcaatgctgtacctgcaatagaggatgccatcaaaaagcttgaagattcagactgaactggttttaagagcctcttcttatgcccgtgtcaaatgaaaaagcctgggaagcatttcgcaatgctgtatctgcaatagatgatgcatgaaaaagcttgaagattcagacagaactggtttaggagcctcttattttgcctgtatcaaataaaaaagcctatttctgacccttaacgagggccatatatgtgtcttgcaagagctaagttctgtaaaagatttctacatgtaccatgtgtaggagttaggatagagtgatagacgtactgctgcatacagttcggaatatttgctagtaacaagtaatctaccattaggtggcctggagttcacatgctatgctatgtgatgatcggggatgtgtcctagcaatagcaagctcatgaagttgtttctcccccctttttttttctgtgtattagggttagtttgacaacctcatttcctcagggatttctattttctcaaggagattttttttttaaaaaaatagagttgccaaactagcctttacatgtttatgtgatagcgatttttttt

SEQ ID NO: 77548 - DNA, 1413 bp, Zea Mays
aactaccaattttctcgctcagacatacagaattacagagtcgaagtgcgctgtggcctgtggactctcccctccccaactccggcgaagggagcagaaacgttggcgtgttggttgggtggcgtcggcatggacgaggcaacgaagaagaatgtggaggctacggtgctggagatcctccggggctccgatatggagtccgtgacggagtacaaggtccgcgccgctgccagcgaccgcctcggcatcgacctctccatacccgaccgcaagctcttcgtccgcggcgtcgttgaggaatacctactttcactctcctccaaggaggaggcgaaggcggaggaggagggcgtcactggcagggagagcaagggcaaggaacacgaagaggaggacgaagaggatgacgatgaggaggaggatgaaggtaagggtggcgggaagagagagtacgatgaccaaggtgaccttatcctgtgccgcctttcgagcaagaggagggtgactttatcggagtttaagggcaggtcgttggtgtccatccgcgagttctacgtgaaggacggcaaggagatgccctccgccaaaggctatgccagtcctgtattttcatgcatcttcagaagtctttttagcgcagttattgtcttaccactggtgtctagctcattacgttcagtatacccctgttgaatcagcacccctgcctaccgaaatttggattgatttaaagaaaaatctgaggaaatcatttcaacaggctagctgatctgcaaaagtatcagtatgactttggagcagtgggaagcattttgcaatgctgtacctgcaatagaggatgccatcaaaaagcttgaagattcagactgaactggttttaagagcctcttcttatgcccgtgtcaaatgaaaaagcctgggaagcatttcgcaatgctgtatctgcaatagatgatgcatgaaaaagcttgaagattcagacagaactggtttaggagcctcttattttgcctgtatcaaataaaaaagcctatttctgacccttaacgagggccatatatgtgtcttgcaagagctaagttctgtaaaagatttctacatgtaccatgtgtaggagttaggatagagtgatagacgtactgctgcatacagttcggaatatttgctagtaacaagtaatctaccattaggtggcctggagttcacatgctatgctatgtgatgatcggggatgtgtcctagcaatagcaagctcatgaagttgtttctcccccctttttttttctgtgtattagggttagtttgacaacctcatttcctcagggatttctattttctcaaggagattttttttttaaaaaaatagagttgccaaactagcctttacatgtttatgtgatagcgatttttttt

SEQ ID NO: 77549 - DNA, 2216 bp, Zea Mays
ctctcctccacctccggccctccgccattcccattcacaaagcacgctccgctttccttttgtttatttactcttcctccctccgcatcctcctcgcgtcgcattcccccgtttccgcccatgcgtgtccgcctcctcgcatccgccgtcgtctcgcacctcccccgcgccccaatctggtccgggcggagttagggatgaggacacaaggggaggggcatgtggaggaggccacggggttcgaggtgggcatcgtggtgcccaggctctcccgcgccgccgcggcgggggccaccgacaactgcgtggcgcgtctggtgcgggagctcgagggcgccgggctgctcgtcgagcgcgtccgcggcgtctccgctgagttcatcaaggtccgtgacccagcaccggcgtgccgctgctgttttttattattattttatctccttgtctttttaattctgtatctgggctacgcacaaagtttgagcggacgcaagcaacaaaccggcgatacagaagagcgcgagccctctattatctgcctcgttcggaaattgtgcagcgcgtgctgcttgtttttttttctctctctcgttctaatgcttgtggccctgctgtttgaatttagctagccgcaccaatggggaccctggggagagctgctgctgagatgcatatgaagaagctaacctacatcgggatggagcttcagtttcaatcggaccaggttgcagcattcgttaggcagacagacggttccctgttcagctggagagaacgctattcctgcttccgctacttgatatatggcattgtaagttcatggcagtcggccagtcgccacgtatatctattgatgtgattaaaacacattgtagttatgcacgcttatttatcactaatgcttctacaatgtacatgcggatgtatttttaatgttcgcttctttggtctgcactataagactaccaatgacatgtgtacttcgtttctgtgctgatccagattttgtcagatcaatgcactcccattcaatgtttctttgcttgatttatgcatgacaagtgaagtgtataactaatccaccaactgtttggctcttttctaatttggatatccaatatgatagcaagttggaattgataaatccaggtgaacaagacaaactctgaagtagtccttaaatttgatgataaggagttccattggaagcaaaatgaaattaaaaggaagcaactcctgagaaattgggcgcttaattggcttgacttcacatggcagcctatcgatgagatttactcctattttggaacaaagattgcaacatactttgcgttcctaggaatgtatgcgcgatggcttttcttcccagctgtttttggactggcaactcaactcatagattttggatcattgcagtggttggttcttcctggtttctttatctttgttatttcttgggctgtcctctttctgcaattttggaaacggaagaattcagcacttcttgcaagatggggtattcattgttcactatctgaatacaaaaacctggacaacgtcagcttcttgagtgattctcttactgttgaggaaaaggagtttggtgttgtgtctgtggttgtggagaaaagaaagtttcaaaggaacgaatggttcggtgtcctccttagaataaggaacaatgctatcattgtgctggctatcatttgtcttcagctgccatttgagttggcctatgctcatctatatgaaattgcagaaactgaggttatgaggtatttgttaactgcagtatatcttgttgcaattcaatattacaccagaattggtggcaaggtgtctgttaatttgataaagtatgaaaacaaccaaggagaagagtctagttccgctagtttagtttataaggtattagaaaatctaattgagaattccattccttacctcaagtacagttacaaaaagtacatagctgttcacaagaaaaagcgtgggaaagaatcgacagtgggtaggtcagtccggttatcaacaagagtggagaaagagtatttaaaaccctcttatactgcaagcattggagcagaactcgaagatggtttatttgatgactttctggagctgactcttcagtttggaatgatcatgatgtttgcctgtgcatttccattgattttctgctttgcagctctggtttgtgctctttcaaaaaatca

SEQ ID NO: 77550 - DNA, 1812 bp, Zea Mays
ccccgctccctctcctccacctccggccctccgccattcccattcacaaagcacgctccgctttccttttgtttatttactcttcctccctccgcatcctcctcgcgtcgcattcccccgtttccgcccatgcgtgtccgcctcctcgcatccgccgtcgtctcgcacctcccccgcgccccaatctggtccgggcggagttagggatgaggacacaaggggaggggcatgtggaggaggccacggggttcgaggtgggcatcgtggtgcccaggctctcccgcgccgccgcggcgggggccaccgacaactgcgtggcgcgtctggtgcgggagctcgagggcgccgggctgctcgtcgagcgcgtccgcggcgtctccgctgagttcatcaagctagccgcaccaatggggaccctggggagagctgctgctgagatgcatatgaagaagctaacctacatcgggatggagcttcagtttcaatcggaccaggttgcagcattcgttaggcagacagacggttccctgttcagctggagagaacgctattcctgcttccgctacttgatatatggcattgtgaacaagacaaactctgaagtagtccttaaatttgatgataaggagttccattggaagcaaagtgagtccttattaacaaggctggaagctgaaggagttgtaaagctagtattccctttgcatggaagcaactcctgagaaattgggcgcttaattggcttgacttcacatggcagcctatcgatgagatttactcctattttggaacaaagattgcaacatactttgcgttcctaggaatgtatgcgcgatggcttttcttcccagctgtttttggactggcaactcaactcatagattttggatcattgcagtggttggttcttcctggtttctttatctttgttatttcttgggctgtcctctttctgcaattttggaaacggaagaattcagcacttcttgcaagatggggtattcattgttcactatctgaatacaaaaacctggacaacgtcagcttcttgagtgattctcttactgttgaggaaaaggagtttggtgttgtgtctgtggttgtggagaaaagaaagtttcaaaggaacgaatggttcggtgtcctccttagaataaggaacaatgctatcattgtgctggctatcatttgtcttcagctgccatttgagttggcctatgctcatctatatgaaattgcagaaactgaggttatgaggtatttgttaactgcagtatatcttgttgcaattcaatattacaccagaattggtggcaaggtgtctgttaatttgataaagtatgaaaacaaccaaggagaagagtctagttccgctagtttagtttataaggcctttggcctttactttatgcagtcatatattgggttattttaccatgcttctttgcatcgtgatatactggccctccggcgagtcctcatccagcgtctcattgtgtaccaggtattagaaaatctaattgagaattccattccttacctcaagtacagttacaaaaagtacatagctgttcacaagaaaaagcgtgggaaagaatcgacagtgggtaggtcagtccggttatcaacaagagtggagaaagagtatttaaaaccctcttatactgcaagcattggagcagaactcgaagatggtttatttgatgactttctggagctgactcttcagtttggaatgatcatgatgtttgcctgtgcatttccattgattttctgctttgcagctctggtttgtgctctttcaaaaaatca

SEQ ID NO: 77551 - DNA, 1808 bp, Zea Mays
gttcctcccccgctccctctcctccacctccggccctccgccattcccattcacaaagcacgctccgctttccttttgtttatttactcttcctccctccgcatcctcctcgcgtcgcattcccccgtttccgcccatgcgtgtccgcctcctcgcatccgccgtcgtctcgcacctcccccgcgccccaatctggtccgggcggagttagggatgaggacacaaggggaggggcatgtggaggaggccacggggttcgaggtgggcatcgtggtgcccaggctctcccgcgccgccgcggcgggggccaccgacaactgcgtggcgcgtctggtgcgggagctcgagggcgccgggctgctcgtcgagcgcgtccgcggcgtctccgctgagttcatcaagctagccgcaccaatggggaccctggggagagctgctgctgagatgcatatgaagaagctaacctacatcgggatggagcttcagtttcaatcggaccaggttgcagcattcgttaggcagacagacggttccctgttcagctggagagaacgctattcctgcttccgctacttgatatatggcattgtgaacaagacaaactctgaagtagtccttaaatttgatgataaggagttccattggaagcaaagtgagtccttattaacaaggctggaagctgaaggagttgtaaagctagtattccctttgcatgatgaaattaaaaggaagcaactcctgagaaattgggcgcttaattggcttgacttcacatggcagcctatcgatgagatttactcctattttggaacaaagattgcaacatactttgcgttcctaggaatgtatgcgcgatggcttttcttcccagctgtttttggactggcaactcaactcatagattttggatcattgcagtggttggttcttcctggtttctttatctttgttatttcttgggctgtcctctttctgcaattttggaaacggaagaattcagcacttcttgcaagatggggtattcattgttcactatctgaatacaaaaacctggacaacgtcagcttcttgagtgattctcttactgttgaggaaaaggagtttggtgttgtgtctgtggttgtggagaaaagaaagtttcaaaggaacgaatggttcggtgtcctccttagaataaggaacaatgctatcattgtgctggctatcatttgtcttcagctgccatttgagttggcctatgctcatctatatgaaattgcagaaactgaggttatgaggtatttgttaactgcagtatatcttgttgcaattcaatattacaccagaattggtggcaaggtgtctgttaatttgataaagtatgaaaacaaccaaggagaagagtctagttccgctagtttagtttataagtcatatattgggttattttaccatgcttctttgcatcgtgatatactggccctccggcgagtcctcatccagcgtctcattgtgtaccaggtattagaaaatctaattgagaattccattccttacctcaagtacagttacaaaaagtacatagctgttcacaagaaaaagcgtgggaaagaatcgacagtgggtaggtcagtccggttatcaacaagagtggagaaagagtatttaaaaccctcttatactgcaagcattggagcagaactcgaagatggtttatttgatgactttctggagctgactcttcagtttggaatgatcatgatgtttgcctgtgcatttccattgattttctgctttgcagctctggtttgtgctctttcaaaaaatca

SEQ ID NO: 77552 - DNA, 2093 bp, Zea Mays
cagtccgttcctcccccgctccctctcctccacctccggccctccgccattcccattcacaaagcacgctccgctttccttttgtttatttactcttcctccctccgcatcctcctcgcgtcgcattcccccgtttccgcccatgcgtgtccgcctcctcgcatccgccgtcgtctcgcacctcccccgcgccccaatctggtccgggcggagttagggatgaggacacaaggggaggggcatgtggaggaggccacggggttcgaggtgggcatcgtggtgcccaggctctcccgcgccgccgcggcgggggccaccgacaactgcgtggcgcgtctggtgcgggagctcgagggcgccgggctgctcgtcgagcgcgtccgcggcgtctccgctgagttcatcaagctagccgcaccaatggggaccctggggagagctgctgctgagatgcatatgaagaagctaacctacatcggtagctggactgctgtatctacggagcatttgaattttgaaatgtggttggtggtgggtgacgtgtttcatgttgctcctaatttcggtctcagggatggagcttcagtttcaatcggaccaggttgcagcattcgttaggcagacagacggttccctgttcagctggagagaacgctattcctgcttccgctacttgatatatggcattgtaagttcatggcagtcggccagtcgccacgtatatctattgatgtgattaaaacacattgtagttatgcacgcttatttatcactaatgcttctacaatgtacatgcggatgtatttttaatgttcgcttctttggtctgcactataagactaccaatgacatgtgtacttcgtttctgtgctgatccagattttgtcagatcaatgcactcccattcaatgtttctttgcttgatttatgcatgacaagtgaagtgtataactaatccaccaactgtttggctcttttctaatttggatatccaatatgatagcaagttggaattgataaatccaggtgaacaagacaaactctgaagtagtccttaaatttgatgataaggagttccattggaagcaaaatgaaattaaaaggaagcaactcctgagaaattgggcgcttaattggcttgacttcacatggcagcctatcgatgagatttactcctattttggaacaaagattgcaacatactttgcgttcctaggaatgtatgcgcgatggcttttcttcccagctgtttttggactggcaactcaactcatagattttggatcattgcagtggttggttcttcctggtttctttatctttgttatttcttgggctgtcctctttctgcaattttggaaacggaagaattcagcacttcttgcaagatggggtattcattgttcactatctgaatacaaaaacctggacaacgtcagcttcttgagtgattctcttactgttgaggaaaaggagtttggtgttgtgtctgtggttgtggagaaaagaaagtttcaaaggaacgaatggttcggtgtcctccttagaataaggaacaatgctatcattgtgctggctatcatttgtcttcagctgccatttgagttggcctatgctcatctatatgaaattgcagaaactgaggttatgaggtatttgttaactgcagtatatcttgttgcaattcaatattacaccagaattggtggcaaggtgtctgttaatttgataaagtatgaaaacaaccaaggagaagagtctagttccgctagtttagtttataaggtattagaaaatctaattgagaattccattccttacctcaagtacagttacaaaaagtacatagctgttcacaagaaaaagcgtgggaaagaatcgacagtgggtaggtcagtccggttatcaacaagagtggagaaagagtatttaaaaccctcttatactgcaagcattggagcagaactcgaagatggtttatttgatgactttctggagctgactcttcagtttggaatgatcatgatgtttgcctgtgcatttccattgattttctgctttgcagctctggtttgtgctctttcaaaaaatca

SEQ ID NO: 77553 - DNA, 1728 bp, Zea Mays
atcacagtccgttcctcccccgctccctctcctccacctccggccctccgccattcccattcacaaagcacgctccgctttccttttgtttatttactcttcctccctccgcatcctcctcgcgtcgcattcccccgtttccgcccatgcgtgtccgcctcctcgcatccgccgtcgtctcgcacctcccccgcgccccaatctggtccgggcggagttagggatgaggacacaaggggaggggcatgtggaggaggccacggggttcgaggtgggcatcgtggtgcccaggctctcccgcgccgccgcggcgggggccaccgacaactgcgtggcgcgtctggtgcgggagctcgagggcgccgggctgctcgtcgagcgcgtccgcggcgtctccgctgagttcatcaagctagccgcaccaatggggaccctggggagagctgctgctgagatgcatatgaagaagctaacctacatcgggatggagcttcagtttcaatcggaccaggttgcagcattcgttaggcagacagacggttccctgttcagctggagagaacgctattcctgcttccgctacttgatatatggcattgtgaacaagacaaactctgaagtagtccttaaatttgatgataaggagttccattggaagcaaagtgagtccttattaacaaggctggaagctgaaggagttgtaaagctagtattccctttgcatgatgaaattaaaaggaagcaactcctgagaaattgggcgcttaattggcttgacttcacatggcagcctatcgatgagatttactcctattttggaacaaagattgcaacatactttgcgttcctaggaatgtatgcgcgatggcttttcttcccagctgtttttggactggcaactcaactcatagattttggatcattgcagtggttggttcttcctggtttctttatctttgttatttcttgggctgtcctctttctgcaattttggaaacggaagaattcagcacttcttgcaagatggggtattcattgttcactatctgaatacaaaaacctggacaacgtcagcttcttgagtgattctcttactgttgaggaaaaggagtttggtgttgtgtctgtggttgtggagaaaagaaagtttcaaaggaacgaatggttcggtgtcctccttagaataaggaacaatgctatcattgtgctggctatcatttgtcttcagctgccatttgagttggcctatgctcatctatatgaaattgcagaaactgaggttatgaggtatttgttaactgcagtatatcttgttgcaattcaatattacaccagaattggtggcaaggtgtctgttaatttgataaagtatgaaaacaaccaaggagaagagtctagttccgctagtttagtttataaggtattagaaaatctaattgagaattccattccttacctcaagtacagttacaaaaagtacatagctgttcacaagaaaaagcgtgggaaagaatcgacagtgggtaggtcagtccggttatcaacaagagtggagaaagagtatttaaaaccctcttatactgcaagcattggagcagaactcgaagatggtttatttgatgactttctggagctgactcttcagtttggaatgatcatgatgtttgcctgtgcatttccattgattttctgctttgcagctctggtttgtgctctttcaaaaaatca

SEQ ID NO: 77554 - DNA, 1743 bp, Zea Mays
gtcctcatcacagtccgttcctcccccgctccctctcctccacctccggccctccgccattcccattcacaaagcacgctccgctttccttttgtttatttactcttcctccctccgcatcctcctcgcgtcgcattcccccgtttccgcccatgcgtgtccgcctcctcgcatccgccgtcgtctcgcacctcccccgcgccccaatctggtccgggcggagttagggatgaggacacaaggggaggggcatgtggaggaggccacggggttcgaggtgggcatcgtggtgcccaggctctcccgcgccgccgcggcgggggccaccgacaactgcgtggcgcgtctggtgcgggagctcgagggcgccgggctgctcgtcgagcgcgtccgcggcgtctccgctgagttcatcaagctagccgcaccaatggggaccctggggagagctgctgctgagatgcatatgaagaagctaacctacatcgggatggagcttcagtttcaatcggaccaggttgcagcattcgttaggcagacagacggttccctgttcagctggagagaacgctattcctgcttccgctacttgatatatggcattgtgaacaagacaaactctgaagtagtccttaaatttgatgataaggagttccattggaagcaaagtgagtccttattaacaaggctggaagctgaaggagttgtaaagctagtattccctttgcatgatgaaattaaaaggaagcaactcctgagaaattgggcgcttaattggcttgacttcacatggcagcctatcgatgagatttactcctattttggaacaaagattgcaacatactttgcgttcctaggaatgtatgcgcgatggcttttcttcccagctgtttttggactggcaactcaactcatagattttggatggggtattcattgttcactatctgaatacaaaaacctggacaacgtcagcttcttgagtgattctcttactgttgaggaaaaggagtttggtgttgtgtctgtggttgtggagaaaagaaagtttcaaaggaacgaatggttcggtgtcctccttagaataaggaacaatgctatcattgtgctggctatcatttgtcttcagctgccatttgagttggcctatgctcatctatatgaaattgcagaaactgaggttatgaggtatttgttaactgcagtatatcttgttgcaattcaatattacaccagaattggtggcaaggtgtctgttaatttgataaagtatgaaaacaaccaaggagaagagtctagttccgctagtttagtttataaggcctttggcctttactttatgcagtcatatattgggttattttaccatgcttctttgcatcgtgatatactggccctccggcgagtcctcatccagcgtctcattgtgtaccaggtattagaaaatctaattgagaattccattccttacctcaagtacagttacaaaaagtacatagctgttcacaagaaaaagcgtgggaaagaatcgacagtgggtaggtcagtccggttatcaacaagagtggagaaagagtatttaaaaccctcttatactgcaagcattggagcagaactcgaagatggtttatttgatgactttctggagctgactcttcagtttggaatgatcatgatgtttgcctgtgcatttccattgattttctgctttgcagctctggtttgtgctctttcaaaaaatca

SEQ ID NO: 77555 - DNA, 1751 bp, Zea Mays
caccggtcctcatcacagtccgttcctcccccgctccctctcctccacctccggccctccgccattcccattcacaaagcacgctccgctttccttttgtttatttactcttcctccctccgcatcctcctcgcgtcgcattcccccgtttccgcccatgcgtgtccgcctcctcgcatccgccgtcgtctcgcacctcccccgcgccccaatctggtccgggcggagttagggatgaggacacaaggggaggggcatgtggaggaggccacggggttcgaggtgggcatcgtggtgcccaggctctcccgcgccgccgcggcgggggccaccgacaactgcgtggcgcgtctggtgcgggagctcgagggcgccgggctgctcgtcgagcgcgtccgcggcgtctccgctgagttcatcaagctagccgcaccaatggggaccctggggagagctgctgctgagatgcatatgaagaagctaacctacatcgggatggagcttcagtttcaatcggaccaggttgcagcattcgttaggcagacagacggttccctgttcagctggagagaacgctattcctgcttccgctacttgatatatggcattgtgaacaagacaaactctgaagtagtccttaaatttgatgataaggagttccattggaagcaaagtgagtccttattaacaaggctggaagctgaaggagttgtaaagctagtattccctttgcatgatgaaattaaaaggaagcaactcctgagaaattgggcgcttaattggcttgacttcacatggcagcctatcgatgagatttactcctattttggaacaaagtggttggttcttcctggtttctttatctttgttatttcttgggctgtcctctttctgcaattttggaaacggaagaattcagcacttcttgcaagatggggtattcattgttcactatctgaatacaaaaacctggacaacgtcagcttcttgagtgattctcttactgttgaggaaaaggagtttggtgttgtgtctgtggttgtggagaaaagaaagtttcaaaggaacgaatggttcggtgtcctccttagaataaggaacaatgctatcattgtgctggctatcatttgtcttcagctgccatttgagttggcctatgctcatctatatgaaattgcagaaactgaggttatgaggtatttgttaactgcagtatatcttgttgcaattcaatattacaccagaattggtggcaaggtgtctgttaatttgataaagtatgaaaacaaccaaggagaagagtctagttccgctagtttagtttataaggcctttggcctttactttatgcagtcatatattgggttattttaccatgcttctttgcatcgtgatatactggccctccggcgagtcctcatccagcgtctcattgtgtaccaggtattagaaaatctaattgagaattccattccttacctcaagtacagttacaaaaagtacatagctgttcacaagaaaaagcgtgggaaagaatcgacagtgggtaggtcagtccggttatcaacaagagtggagaaagagtatttaaaaccctcttatactgcaagcattggagcagaactcgaagatggtttatttgatgactttctggagctgactcttcagtttggaatgatcatgatgtttgcctgtgcatttccattgattttctgctttgcagctctggtttgtgctctttcaaaaaatca

SEQ ID NO: 77556 - DNA, 2191 bp, Zea Mays
caccggtcctcatcacagtccgttcctcccccgctccctctcctccacctccggccctccgccattcccattcacaaagcacgctccgctttccttttgtttatttactcttcctccctccgcatcctcctcgcgtcgcattcccccgtttccgcccatgcgtgtccgcctcctcgcatccgccgtcgtctcgcacctcccccgcgccccaatctggtccgggcggagttagggatgaggacacaaggggaggggcatgtggaggaggccacggggttcgaggtgggcatcgtggtgcccaggctctcccgcgccgccgcggcgggggccaccgacaactgcgtggcgcgtctggtgcgggagctcgagggcgccgggctgctcgtcgagcgcgtccgcggcgtctccgctgagttcatcaagctagccgcaccaatggggaccctggggagagctgctgctgagatgcatatgaagaagctaacctacatcgggatggagcttcagtttcaatcggaccaggttgcagcattcgttaggcagacagacggttccctgttcagctggagagaacgctattcctgcttccgctacttgatatatggcattgtaagttcatggcagtcggccagtcgccacgtatatctattgatgtgattaaaacacattgtagttatgcacgcttatttatcactaatgcttctacaatgtacatgcggatgtatttttaatgttcgcttctttggtctgcactataagactaccaatgacatgtgtacttcgtttctgtgctgatccagattttgtcagatcaatgcactcccattcaatgtttctttgcttgatttatgcatgacaagtgaagtgtataactaatccaccaactgtttggctcttttctaatttggatatccaatatgatagcaagttggaattgataaatccaggtgaacaagacaaactctgaagtagtccttaaatttgatgataaggagttccattggaagcaaagtgagtccttattaacaaggctggaagctgaaggagttgtaaagctagtattccctttgcatgatgaaattaaaaggaagcaactcctgagaaattgggcgcttaattggcttgacttcacatggcagcctatcgatgagatttactcctattttggaacaaagattgcaacatactttgcgttcctaggaatgtatgcgcgatggcttttcttcccagctgtttttggactggcaactcaactcatagattttggatcattgcagtggttggttcttcctggtttctttatctttgttatttcttgggctgtcctctttctgcaattttggaaacggaagaattcagcacttcttgcaagatggggtattcattgttcactatctgaatacaaaaacctggacaacgtcagcttcttgagtgattctcttactgttgaggaaaaggagtttggtgttgtgtctgtggttgtggagaaaagaaagtttcaaaggaacgaatggttcggtgtcctccttagaataaggaacaatgctatcattgtgctggctatcatttgtcttcagctgccatttgagttggcctatgctcatctatatgaaattgcagaaactgaggttatgaggtatttgttaactgcagtatatcttgttgcaattcaatattacaccagaattggtggcaaggtgtctgttaatttgataaagtatgaaaacaaccaaggagaagagtctagttccgctagtttagtttataaggcctttggcctttactttatgcagtcatatattgggttattttaccatgcttctttgcatcgtgatatactggccctccggcgagtcctcatccagcgtctcattgtgtaccaggtattagaaaatctaattgagaattccattccttacctcaagtacagttacaaaaagtacatagctgttcacaagaaaaagcgtgggaaagaatcgacagtgggtaggtcagtccggttatcaacaagagtggagaaagagtatttaaaaccctcttatactgcaagcattggagcagaactcgaagatggtttatttgatgactttctggagctgactcttcagtttggaatgatcatgatgtttgcctgtgcatttccattgattttctgctttgcagctctggtttgtgctctttcaaaaaatca

SEQ ID NO: 77557 - DNA, 2262 bp, Zea Mays
caccggtcctcatcacagtccgttcctcccccgctccctctcctccacctccggccctccgccattcccattcacaaagcacgctccgctttccttttgtttatttactcttcctccctccgcatcctcctcgcgtcgcattcccccgtttccgcccatgcgtgtccgcctcctcgcatccgccgtcgtctcgcacctcccccgcgccccaatctggtccgggcggagttagggatgaggacacaaggggaggggcatgtggaggaggccacggggttcgaggtgggcatcgtggtgcccaggctctcccgcgccgccgcggcgggggccaccgacaactgcgtggcgcgtctggtgcgggagctcgagggcgccgggctgctcgtcgagcgcgtccgcggcgtctccgctgagttcatcaaggtccgtgacccagcaccggcgtgccgctgctgttttttattattattttatctccttgtctttttaattctgtatctgggctacgcacaaagtttgagcggacgcaagcaacaaaccggcgatacagaagagcgcgagccctctattatctgcctcgttcggaaattgtgcagcgcgtgctgcttgtttttttttctctctctcgttctaatgcttgtggccctgctgtttgaatttagctagccgcaccaatggggaccctggggagagctgctgctgagatgcatatgaagaagctaacctacatcgggatggagcttcagtttcaatcggaccaggttgcagcattcgttaggcagacagacggttccctgttcagctggagagaacgctattcctgcttccgctacttgatatatggcattgtaagttcatggcagtcggccagtcgccacgtatatctattgatgtgattaaaacacattgtagttatgcacgcttatttatcactaatgcttctacaatgtacatgcggatgtatttttaatgttcgcttctttggtctgcactataagactaccaatgacatgtgtacttcgtttctgtgctgatccagattttgtcagatcaatgcactcccattcaatgtttctttgcttgatttatgcatgacaagtgaagtgtataactaatccaccaactgtttggctcttttctaatttggatatccaatatgatagcaagttggaattgataaatccaggtgaacaagacaaactctgaagtagtccttaaatttgatgataaggagttccattggaagcaaaatgaaattaaaaggaagcaactcctgagaaattgggcgcttaattggcttgacttcacatggcagcctatcgatgagatttactcctattttggaacaaagattgcaacatactttgcgttcctaggaatgtatgcgcgatggcttttcttcccagctgtttttggactggcaactcaactcatagattttggatggggtattcattgttcactatctgaatacaaaaacctggacaacgtcagcttcttgagtgattctcttactgttgaggaaaaggagtttggtgttgtgtctgtggttgtggagaaaagaaagtttcaaaggaacgaatggttcggtgtcctccttagaataaggaacaatgctatcattgtgctggctatcatttgtcttcagctgccatttgagttggcctatgctcatctatatgaaattgcagaaactgaggttatgaggtatttgttaactgcagtatatcttgttgcaattcaatattacaccagaattggtggcaaggtgtctgttaatttgataaagtatgaaaacaaccaaggagaagagtctagttccgctagtttagtttataaggcctttggcctttactttatgcagtcatatattgggttattttaccatgcttctttgcatcgtgatatactggccctccggcgagtcctcatccagcgtctcattgtgtaccaggtattagaaaatctaattgagaattccattccttacctcaagtacagttacaaaaagtacatagctgttcacaagaaaaagcgtgggaaagaatcgacagtgggtaggtcagtccggttatcaacaagagtggagaaagagtatttaaaaccctcttatactgcaagcattggagcagaactcgaagatggtttatttgatgactttctggagctgactcttcagtttggaatgatcatgatgtttgcctgtgcatttccattgattttctgctttgcagctctggtttgtgctctttcaaaaaatca

SEQ ID NO: 77558 - DNA, 2461 bp, Zea Mays
cagcagcacgtggtctgaaatccagcgcggcgggggcgctgcccagcccagggcacgttggtcacgtgcgccgacgatgatgccacggcccggagacaaggaacggatcgaaggcagcgcaacgaacaggaccatatacacagacgacgcagcgcagacgttgcgcgcggcgcggacgccacccccgccacaatcccgccccctcccccagtgcccgtccggcctcttgtccgtcgccgatggccgcgcccgcgccgaggccagcgcgcgcagccaccctcgccctgctcgccctcgtcgccgcgtggctcggggcctccgcgggcgcgggcagcgacgacgtgctgcgccgggcgcagcgcgatgagttcgcggcgtggatggccggcgtccggcgggccatccacgagcggcccgagctggcgttcgaggagcacgagacgagcgcgctggtccggagggagctcgacgccatgggcgtcgcgtacaggcacccggtcgccgggacgggcgtcgtcgcggccgtcggcaccgggggtccgccgttcgtcgcgctgcgcgccgacatggacgcgctcccgctgcaggaggaagtggagtgggaccacaagagcaaggagacccggaagatgcacgcctgcggccacgacgcccacaccgcgatgctgctcggcgccgccaggatcctccatgagcgccgccacgacctgcagggcacagtagtcctccttttccagccgggagaggaggtcggcattggcgccaagaagatggtggaggcgggcgccgtggagaacgtcgaggccatattcgggttccacgtcaccgtaatgctccctaccggcgtggtgggctctagggccggcccgttgctggccgggtgcgggttcttcgaggcggtgatcaccggggccggtggccacgccgccaccccccacaacatcgtcgaccccgtggtggcagcctccagcgtcgtcctcagcttgcagagcctcgtctcgcgggaggcggacccgctggactcgcaggtggtaacagtgacgaggttccagggcggcggcgcgttcaacgtgatcccggactccgtggcgatcggcggcacgtttcggtgcttctccagcgatggcttcatgcggctgaagcgtcgcatcgaggaggtgatcgtttcgcaatccgcggtgcaccgatgcgccgcgtccgtggacttcggcgccggtgggagccccctgctgcccccgaccgtgaacgccgcctcgctgcacgcgcacttcgaggccgtcgccgccgagacggtgggcgcgagcgccgtccgggccgccatggcgccgtgcatgggtagcgaggactttgcgtccttctcggaggccgtcccagcctcgcacttctactttgttgggatacggaacgaggggatcggggccgtgcacgccgcacactccccgcacttcctcgtcgacgacgacgcgcttccgtacggcgccgcaatgcacgccaacctcgccatcgggtacctgcggaaccgcgcggcagccaacgacgggcccgtcgtcgccccccacgacgagctttaggttcactgcagctttttcacgagcgacctacgattgtgcggcggcttgcagtcacacacgtcgggatcccatcgttggactgatcttgccgtccaatgcgcataacgattgcgtggctgagtggctctgatcacgaaacaagtgaaactgcacgcatttaattctaaggggcataacaaaatcaaataattataattagagtccgtttggcacaactttagctcctgattctagacgaggattcggaggagccgtgccaaacggatgtttctgtgaactgatgctcacatagaacaggaatgatcgagagtcgtctttatatagaaacgtgggagctgaaaaatcttgcttcaccctccttaaaacagctcctcaaccaaatatgaatctcacgttaacttttaattgaaattacccgcaattgccattcaacaaaaacacccgctatccctccactatcgtcctgactcctgagcccaaccgacccaaaacttgtgccgcccctacctccatcttctcccacgctgcccttagggcattcctcgccatccatacgtgtgtctcccccgcccatacatgcgtctcccccggtctcatcatcgtggtgttttttttttccaccagatgatcgccgcccccaactagaactgcgtggagaaggtgcgtatcctctgatgctgcttgctacccaaggaaacttgaataaacaattgtgttagaacttggctatgcaacatggaatagaatttgcatcgaatagtatttgttgtatggaatagtattttattttcttcctttgtcctttgatttgcaggatggaatagtatttgttctagattttatttttttatagcaccataggtgatagtgctgattacaacgaagagaac

SEQ ID NO: 77559 - DNA, 872 bp, Zea Mays
attattgtccgtcgtatagcagctacaatgtcgcctctccatcgttcactgcatccccttcctcctctcccctcccgttttcgaggccccgttttcttctctctcacactagatggaggggctctatgcgcagacgcctgttgcctggcatcccccgcccccgctccagctgctctccggaagattccaaagtcactgttggcttcctcgctacgctggtcttggcgatgacagaggcagcgtccgcccacttttcccctcgcgcggccacgacggatggtagtcggatccgattgatcgacctggaagaatctccaccgtcctgctttaccgagcgagatgctcggatcctgcagcgaagggagagagtgcatcgccgccgccatccgtgtccgccagtgcttcatctccgaagcgtcgtctgaaggggatacatcgatgatcgatcgacacccagatctctcatacactgtctgcttctttggacctacaagttttgaggtgtttgtattttatggttcacacaacatgcaaagtggattggactaaggttctgaggatgcaactatggttgagcaaaaaactcgtaatccaaactcggaatacccaaatttcgtttggtaatttcgggtagcaacttataaagtacgaacttaatttagatggctcgatggcgactggagctcagtgatcatctacatgatttgttggtgacccgactcggtgattgtacgcggtcgtgagggatccagcgcgccggagagacaaaggatcatctcatagtgagcacttggttcttgcgaggacaaggggagcgatacccttgcgcgggtgctccaacgaggattagtggagagtgttgactcttcgat

SEQ ID NO: 77560 - DNA, 1755 bp, Zea Mays
attattgtccgtcgtatagcagctacaatgtcgcctctccatcgttcactgcatccccttcctcctctcccctcccgttttcgaggccccgttttcttctctctcacactagatggaggggctctatgcgcagacgcctgttgcctggcatcccccgcccccgctccagctgctctccggaagattccaaagtcactgttggcttcctcgctacgctggtcttggcgatgacagaggcagcgtccgcccacttttcccctcgcgcggccacgacggatggtagtcggatccgattgatcgacctggaagaatctccaccgtcctgctttaccgagcgagatgctcggatcctgcagcgaagggagagagtgcatcgccgccgccatccgtgtccgccagtgcttcatctccgaagcgtcgtctgaaggggatacatcgatgatcgatcgacacccagatctctcatacactgtctgcttctttggacctacaagttttgaggtgtttgtattttatggttcacacaacatgcaaagtggattggactaaggttctgaggatgcaactatggttgagcaaaaaactcgtaatccaaactcggaatacccaaatttcgtttggtaatttcgggtagcaacttataaagtacgaacttaatttagcaaggagttattccctaaggatattactcaagatgagcagccaagactccaaagtgctacaagccttgctccttaatctaggatcctcaatggataatgttgcaagtaaatttagaagtttggtagaagaagctgaaagcatctaggccctagttggttttagtgattaatgagaacgtaggattacttgtgactaacgtgtgttttgcagagcaaatggtaagttaggtcacaatgcaggaaggtgcgcttcaaccataaaataatccctcaaatgagaacttgaaacgacgactgaaaggcgaatcaatagatgaatgtcttcatatcctacatgtcgaaagagttgtgggacacttggtatagagttaggacttctatttttattttattcgtactataaagatggtttgtggatgattagtttgaccaagagataactaatgtattgtcgatgcatgttcacactcaaaactagtgctagatgtcactcatgatctcactcacatgttagaatcgaaatcagtttagaaaaacccaagaggagacagaagtgttgctgccttaggggcaccagattgtccggtggtgccttgggcagctggccagagaacacctgagagcaaaccctaagagcaccaacaacccgagagcaagcagttcaagtgagccgatttttagccaggcaccggactgtcctgtgtgcaccagacaaccattgtgctatgtccagtgcgactttgagcaacgactagttattagaactagccgttgggagcgcaccgttggtgcaccgaactgtccggtgcgcctatgcgcagcagaacacaataacaattagtttttggtgattgctatttataccccttccaccagccatattgaaggtcttgttgccccaaccacctagaacttattggtagaggattgcaagtccacaaagccaagtgaggtgattagcaaaatcataatcacatgttaggacctaattagagcgcatgagagacacttagagcacacactgtttgcattaggcttctcttggtcaagtgaaggtttatggcttattactcttggtgttcgacatcaccta

SEQ ID NO: 77561 - DNA, 270 bp, Zea Mays
atgccggcatacaaattggataatgaatggatgaacatcagggtttgctgcactgcacgcctgcttttagattccttacatgtgcagatatcgattcacatttatattcaacagaccatcagcacagcttggaactgcagtgcaacaaatggcaagcacaaatcacaccccataagtatgctggaaataaagttacatgcctggtctacatttattttgtataattatcaccagcagctacaaaatggagctacaattgcacaaccttaa

SEQ ID NO: 77562 - DNA, 1316 bp, Zea Mays
gtgagtctcttgcttcgcctagttgctctgcttcgtctacttctcagcatcccccgaaaaactcgaccgcaagcgtgtgtacgcacggaccgcccgcccacgcacgggcatggcagcctccgcctccgcctccccctcatcctccacaaaccctaggtagcacgggagtccctcgccgccggatccccgagaccctgcaagccgcgccgattctgtgctgtgtgctccacggctagatttctgggtgtgaaagagcgcgtttttttaacagttcttagctagggagattttgggaagggagagtgctggaataatggagccgaggatcgggaacaagttccggcttgggcgcaagatcgggagcggctctttcggggagatctacctcggcaccaatatccagacgaacgaggaggttgcgattaagctggaaaatgtgaagacaaagcatcctcagttgctctacgaatcaaagatttataggattctgcaaggaggaactggaataccgaatgtcagatggtttggtgtagaaggagactacaatgtcttggttatggatttacttggaccaagccttgaggatctatttaatttctgcagcaggaaattatctctgaagaccgtgcttatgctcgcagatcagatggcacacaaatcatcatcaatcattatatataatgttttgtacttttgtggtggttcccacatcgagccctctccctcctgagcatctctgcttctctggttgaattattctgtgtgtatacattatccttttcccatctatcacagatgagcttcatgtaatctgccctccccacttgtagataaatcgagtagaatttgttcattccaagtcttttctgcatcgagatattaagccagataatttcctcatgggtcttggcagacgagctaatcaggtctacgttattgactttggccttgctaaaaaatacagggatacctcaacgcatcagcacatcccatacaggcatagaaaagaataatctaatcattcctgagttgtatatgctttgtgttcattcctgtagtaagcatgtttagtgttctaattagctcaagttacttcccatttatctcttgtaccttttctagggccaagctggaaattctaagcatgtctaactttttgttagcacaagttctatctggctactactataatataatgcttagtaattacaatacccacttttcagtcctcacatgatcgtggagggaagaaaaataaattcaataactaaaaatatgctacttgtagtaatttgatagttgtatattatggtaga

SEQ ID NO: 77563 - DNA, 670 bp, Zea Mays
tcttgcttcgcctagttgctctgcttcgtctacttctcagcatcccccgaaaaactcgaccgcaagcgtgtgtacgcacggaccgcccgcccacgcacgggcatggcagcctccgcctccgcctccccctcatcctccacaaaccctaggtagcacgggagtccctcgccgccggatccccgagaccctgcaagccgcgccgattctgtgctgtgtgctccacggctagatttctgggtgtgaaagagcgcgtttttttaacagttcttagctagggagattttgggaagggagagtgctggaataatggagccgaggatcgggaacaagttccggcttgggcgcaagatcgggagcggctctttcggggagatctacctcggcaccaatatccagacgaacgaggaggttgcgattaagctggaaaatgtgaagacaaagcatcctcagttgctctacgaatcaaagatttataggattctgcaaggaggaactggaataccgaatgtcagatggtttggtgtagaaggagactacaatgtcttggttatggatttacttggaccaagccttgaggatctatttaatttctgcagcaggaaattatctctgaagaccgtgcttatgctcgcagatcagatgatgagcttcatgtaatctgccctcccca

SEQ ID NO: 77564 - DNA, 2274 bp, Zea Mays
gagagctgacatattgttttgatagaagtaatttaagcttccattgctaccattacacctgtgcaggatcagctctaccacctgcgcatccacctgacgctcctgcatttagaaagcccaaggctttggcaccagcgcctagtcaatcgctgctacctccaccaacaaattcatactgcacggcaccctgctcagatcctctgaccaatagtcctccaggaatgacatgcctctgtgtgttgccaataaaagttgagcttcgctttggtatagcattgtacacgttctttacacttgttcctgaacttgcacaagatattgcatctggagtgttcatgaatcaaagtcaagttcgtgttatgggggcaaatgctgcacctgatgaccctgaaaagacaatcgtctttattgatcttgtgccactgggaccaaaatttgacaatgcgacagcatttttagtatttgaaaggttttgtaataagcaggtcatcataaaccctatggattttggaaagtatgacgtattgtatgttctttaccaaggtcctggttctgcaatgttggggaacaggctagaaagcagacctatttcggcatcaccatccttcagctcaagtttggtggcatataaaggaactgccaaaacgtttaatctggttgagatggagagagccacactaggatttgatgagtccagaattattggggagggtggttttgggcgtgtctatgaaggtattcttgaggatggagagcgggttgctatcaaggttttaaaacgggacgatcagcaaggtacccgggagtttttggctgaggttgagatgcttagccgattgcatcacaggaacttggttaagctgataggtatatgcacagaggggcatagccgatgtttggtatatgagcttgttccaaatggcagtgtggaatctcacttgcatggatcagataagggagccgctcggtttgactgggacgctaggctcaaaatcgcactaggtgcagcacgtggacttgcatatttgcatgaagattcaagcccacgtgtcatacaccgcgatttcaagtccagcaacatcttactggaacatgacttcaccccaaaggtgtcggacttcggcttagcaaggacagctctgggtgagggaaacgagcatatttcaactcgtgttatgggaacttttgggtacgttgcacctgaatatgcaatgactggccatcttctggtaaagagtgatgtttacagctacggcgtagttctccttgagctccttacagggatgaaaccggtggatatgttaaggcctcctgggcaggagaacttggtggcatgggctggttcgcttctgacaagcagggatggtctggaatcgatcgtagatccttcactcgggagcagcattccgttcgacagcatcgcaagagtagcagccattgcttctatgtgtgtccagcctgaggtggaccagcgcccgttcatgggcgaagtagtccaagctctaaagctggtgtgcgacgaaggcagcgagttcaacggatccacgagctttagccaagatctgcgtatccaggatgttgaggctatgagtagagcgagtggggatgtagacttcgttgacccaacgctatctgccgagctgttcacctcatcagcgcgttatgatgctatggatgcctctggttctttccgaagatactcgagttcaggtcctctgagagtagggagagctggactggacaaagagagggggctgtcaacaggcagctcaagtgagcacgttgggctacaaaggtttagaattgattcagaatagtcagcctgcatcctgcaagcagcttatcatgattgggagtgcagaactagacttcttcggaagcttaaactagacttcgcacagattttttgtacagttctagagatgtgtagatgcctttaggaaaaagaggtgtacacaagcgagtttttcagctttaatcccccacggtccgtaataggttttgccgttgcagcacgttcaaggcgctcgtgcacgcactgtcaccattttttgagttcaatgggggaaaaaaccctatcctgattggccgcaacctttgcatttatccgttgctttgcccgtacactgtcgctgatctgggcttgttattcgttaatgtcgggcaacgaaagatggttctgtggtcactacgaaaggggcagctgaatagttttggtgtacaggcaaggcattgttacaaacgaaatgagctcacaacacaagcataaaaaaa

SEQ ID NO: 77565 - DNA, 2520 bp, Zea Mays
gagagctgacatattgttttgatagaagtaatttaagcttccattgctaccattacacctgtgcaggatcagctctaccacctgcgcatccacctgacgctcctgcatttagaaagcccaaggctttggcaccagcgcctagtcaatcgctgctacctccaccaacaaattcatactgcacggcaccctgctcagatcctctgaccaatagtcctccaggaatgacatgcctctgtgtgttgccaataaaagttgagcttcgctttggtatagcattgtacacgttctttacacttgttcctgaacttgcacaagatattgcatctggagtgttcatgaatcaaagtcaagttcgtgttatgggggcaaatgctgcacctgatgaccctgaaaagacaatcgtctttattgatcttgtgccactgggaccaaaatttgacaatgcgacagcatttttagtatttgaaaggttttgtaataagcaggtcatcataaaccctatggattttggaaagtatgacgtattgtatgttctttaccaaggtctccctccgtcaccaccagcagcaagcatgaacaatggtcttagcaatgttaatgatccaagtttacatccgcttgctgccgatgtggtaaatcataaggaaagaaaaggcaggggcataattataattattattctatcaagtgcttttgcttttattttatgtgctggagctgcactggtggtttatttcaagcttagaaaccgcagccatttaactgaagcatcacctgtgccaacaaaacctgcaggtcctggttctgcaatgttggggaacaggctagaaagcagacctatttcggcatcaccatccttcagctcaagtttggtggcatataaaggaactgccaaaacgtttaatctggttgagatggagagagccacactaggatttgatgagtccagaattattggggagggtggttttgggcgtgtctatgaaggtattcttgaggatggagagcgggttgctatcaaggttttaaaacgggacgatcagcaaggtacccgggagtttttggctgaggttgagatgcttagccgattgcatcacaggaacttggttaagctgataggtatatgcacagaggggcatagccgatgtttggtatatgagcttgttccaaatggcagtgtggaatctcacttgcatgataagggagccgctcggtttgactgggacgctaggctcaaaatcgcactaggtgcagcacgtggacttgcatatttgcatgaagattcaagcccacgtgtcatacaccgcgatttcaagtccagcaacatcttactggaacatgacttcaccccaaaggtgtcggacttcggcttagcaaggacagctctgggtgagggaaacgagcatatttcaactcgtgttatgggaacttttgggtacgttgcacctgaatatgcaatgactggccatcttctggtaaagagtgatgtttacagctacggcgtagttctccttgagctccttacagggatgaaaccggtggatatgttaaggcctcctgggcaggagaacttggtggcatgggctggttcgcttctgacaagcagggatggtctggaatcgatcgtagatccttcactcgggagcagcattccgttcgacagcatcgcaagagtagcagccattgcttctatgtgtgtccagcctgaggtggaccagcgcccgttcatgggcgaagtagtccaagctctaaagctggtgtgcgacgaaggcagcgagttcaacggatccacgagctttagccaagatctgcgtatccaggatgttgaggctatgagtagagcgagtggggatgtagacttcgttgacccaacgctatctgccgagctgttcacctcatcagcgcgttatgatgctatggatgcctctggttctttccgaagatactcgagttcaggtcctctgagagtagggagagctggactggacaaagagagggggctgtcaacaggcagctcaagtgagcacgttgggctacaaaggtttagaattgattcagaatagtcagcctgcatcctgcaagcagcttatcatgattgggagtgcagaactagacttcttcggaagcttaaactagacttcgcacagattttttgtacagttctagagatgtgtagatgcctttaggaaaaagaggtgtacacaagcgagtttttcagctttaatcccccacggtccgtaataggttttgccgttgcagcacgttcaaggcgctcgtgcacgcactgtcaccattttttgagttcaatgggggaaaaaaccctatcctgattggccgcaacctttgcatttatccgttgctttgcccgtacactgtcgctgatctgggcttgttattcgttaatgtcgggcaacgaaagatggttctgtggtcactacgaaaggggcagctgaatagttttggtgtacaggcaaggcattgttacaaacgaaatgagctcacaacacaagcataaaaaaa

SEQ ID NO: 77566 - DNA, 2425 bp, Zea Mays
aaaatagattacatattgtttttttttcttgaacgcgcaggagagctgacatattgttttgatagaagtaatttaagcttccattgctaccattacacctgtgcaggatcagctctaccacctgcgcatccacctgacgctcctgcatttagaaagcccaaggctttggcaccagcgcctagtcaatcgctgctacctccaccaacaaattcatactgcacggcaccctgctcagatcctctgaccaatagtcctccaggaatgacatgcctctgtgtgttgccaataaaagttgagcttcgctttggtatagcattgtacacgttctttacacttgttcctgaacttgcacaagatattgcatctggagtgttcatgaatcaaagtcaagttcgtgttatgggggcaaatgctgcacctgatgaccctgaaaagacaatcgtctttattgatcttgtgccactgggaccaaaatttgacaatgcgacagcatttttagtatttgaaaggttttgtaataagcaggtcatcataaaccctatggattttggaaagtatgacgtattgtatgttctttaccaaggtctccctccgtcaccaccagcagcaagcatgaacaatggtcttagcaatgttaatgatccaagtttacatccgcttgctgccgatgtggtaaatcataaggaaagaaaaggtcctggttctgcaatgttggggaacaggctagaaagcagacctatttcggcatcaccatccttcagctcaagtttggtggcatataaaggaactgccaaaacgtttaatctggttgagatggagagagccacactaggatttgatgagtccagaattattggggagggtggttttgggcgtgtctatgaaggtattcttgaggatggagagcgggttgctatcaaggttttaaaacgggacgatcagcaaggtacccgggagtttttggctgaggttgagatgcttagccgattgcatcacaggaacttggttaagctgataggtatatgcacagaggggcatagccgatgtttggtatatgagcttgttccaaatggcagtgtggaatctcacttgcatggatcagataagggagccgctcggtttgactgggacgctaggctcaaaatcgcactaggtgcagcacgtggacttgcatatttgcatgaagattcaagcccacgtgtcatacaccgcgatttcaagtccagcaacatcttactggaacatgacttcaccccaaaggtgtcggacttcggcttagcaaggacagctctgggtgagggaaacgagcatatttcaactcgtgttatgggaacttttgggtacgttgcacctgaatatgcaatgactggccatcttctggtaaagagtgatgtttacagctacggcgtagttctccttgagctccttacagggatgaaaccggtggatatgttaaggcctcctgggcaggagaacttggtggcatgggctggttcgcttctgacaagcagggatggtctggaatcgatcgtagatccttcactcgggagcagcattccgttcgacagcatcgcaagagtagcagccattgcttctatgtgtgtccagcctgaggtggaccagcgcccgttcatgggcgaagtagtccaagctctaaagctggtgtgcgacgaaggcagcgagttcaacggatccacgagctttagccaagatctgcgtatccaggatgttgaggctatgagtagagcgagtggggatgtagacttcgttgacccaacgctatctgccgagctgttcacctcatcagcgcgttatgatgctatggatgcctctggttctttccgaagatactcgagttcaggtcctctgagagtagggagagctggactggacaaagagagggggctgtcaacaggcagctcaagtgagcacgttgggctacaaaggtttagaattgattcagaatagtcagcctgcatcctgcaagcagcttatcatgattgggagtgcagaactagacttcttcggaagcttaaactagacttcgcacagattttttgtacagttctagagatgtgtagatgcctttaggaaaaagaggtgtacacaagcgagtttttcagctttaatcccccacggtccgtaataggttttgccgttgcagcacgttcaaggcgctcgtgcacgcactgtcaccattttttgagttcaatgggggaaaaaaccctatcctgattggccgcaacctttgcatttatccgttgctttgcccgtacactgtcgctgatctgggcttgttattcgttaatgtcgggcaacgaaagatggttctgtggtcactacgaaaggggcagctgaatagttttggtgtacaggcaaggcattgttacaaacgaaatgagctcacaacacaagcataaaaaaa

SEQ ID NO: 77567 - DNA, 2558 bp, Zea Mays
atgaaagttatgagacatctcatgcgaatgaataggtggcagacatttgcagcaagagtcatgcacttgattcagatttagcatgtttgaagtattggtcacacatgcctcaaataagtttccaacctacataaaaatagattacatattgtttttttttcttgaacgcgcaggagagctgacatattgttttgatagaagtaatttaagcttccattgctaccattacacctgtgcaggatcagctctaccacctgcgcatccacctgacgctcctgcatttagaaagcccaaggctttggcaccagcgcctagtcaatcgctgctacctccaccaacaaattcatatattgcatctggagtgttcatgaatcaaagtcaagttcgtgttatgggggcaaatgctgcacctgatgaccctgaaaagacaatcgtctttattgatcttgtgccactgggaccaaaatttgacaatgcgacagcatttttagtatttgaaaggttttgtaataagcaggtcatcataaaccctatggattttggaaagtatgacgtattgtatgttctttaccaaggtctccctccgtcaccaccagcagcaagcatgaacaatggtcttagcaatgttaatgatccaagtttacatccgcttgctgccgatgtggtaaatcataaggaaagaaaaggcaggggcataattataattattattctatcaagtgcttttgcttttattttatgtgctggagctgcactggtggtttatttcaagcttagaaaccgcagccatttaactgaagcatcacctgtgccaacaaaacctgcaggtcctggttctgcaatgttggggaacaggctagaaagcagacctatttcggcatcaccatccttcagctcaagtttggtggcatataaaggaactgccaaaacgtttaatctggttgagatggagagagccacactaggatttgatgagtccagaattattggggagggtggttttgggcgtgtctatgaaggtattcttgaggatggagagcgggttgctatcaaggttttaaaacgggacgatcagcaaggtacccgggagtttttggctgaggttgagatgcttagccgattgcatcacaggaacttggttaagctgataggtatatgcacagaggggcatagccgatgtttggtatatgagcttgttccaaatggcagtgtggaatctcacttgcatggatcagataagggagccgctcggtttgactgggacgctaggctcaaaatcgcactaggtgcagcacgtggacttgcatatttgcatgaagattcaagcccacgtgtcatacaccgcgatttcaagtccagcaacatcttactggaacatgacttcaccccaaaggtgtcggacttcggcttagcaaggacagctctgggtgagggaaacgagcatatttcaactcgtgttatgggaacttttgggtacgttgcacctgaatatgcaatgactggccatcttctggtaaagagtgatgtttacagctacggcgtagttctccttgagctccttacagggatgaaaccggtggatatgttaaggcctcctgggcaggagaacttggtggcatgggctggttcgcttctgacaagcagggatggtctggaatcgatcgtagatccttcactcgggagcagcattccgttcgacagcatcgcaagagtagcagccattgcttctatgtgtgtccagcctgaggtggaccagcgcccgttcatgggcgaagtagtccaagctctaaagctggtgtgcgacgaaggcagcgagttcaacggatccacgagctttagccaagatctgcgtatccaggatgttgaggctatgagtagagcgagtggggatgtagacttcgttgacccaacgctatctgccgagctgttcacctcatcagcgcgttatgatgctatggatgcctctggttctttccgaagatactcgagttcaggtcctctgagagtagggagagctggactggacaaagagagggggctgtcaacaggcagctcaagtgagcacgttgggctacaaaggtttagaattgattcagaatagtcagcctgcatcctgcaagcagcttatcatgattgggagtgcagaactagacttcttcggaagcttaaactagacttcgcacagattttttgtacagttctagagatgtgtagatgcctttaggaaaaagaggtgtacacaagcgagtttttcagctttaatcccccacggtccgtaataggttttgccgttgcagcacgttcaaggcgctcgtgcacgcactgtcaccattttttgagttcaatgggggaaaaaaccctatcctgattggccgcaacctttgcatttatccgttgctttgcccgtacactgtcgctgatctgggcttgttattcgttaatgtcgggcaacgaaagatggttctgtggtcactacgaaaggggcagctgaatagttttggtgtacaggcaaggcattgttacaaacgaaatgagctcacaacacaagcataaaaaaa

SEQ ID NO: 77568 - DNA, 1379 bp, Zea Mays
taaaatacctggcgcctgatcacggaaagggacggcaacaaatcgccgtgcgccagcggccagcgcacagccgagctccagagaggaggcggagctgcgggggacggggggagacggaggaggtcccggcgtcccgcgcctccccgattggacaacttaatgacccctagtccctagtagcaagtcggctttgtgcgcgcgtgctctgctgcccacccggccgccccatttgtttactgggtgtctgggtccagtccccgccccgaatcttttccctcctcccgcaccccaggccgcagcagcagcaccggcgcaccgccacccactcgccccgcctccgtgcccgcgcaactcgcgcctgcagcgtgtgggagatgtgatcggagcccggccgtcggttcgagtgttttcttctgcctctgggctgtggcgcggggaggaggcaagctggcggtgagatgggtcggtgcggaggaggaagcggagcaggagcaggagggggagctttgggcggctgtgctctcctcaccgccgccttggttatctcaacgctcgtgatccagggcgctggaggttcttctatccataacgaattggcacccacacaattacttggatgatgtacttcatccatcacaagtacaagatcaaaggctcgaacgtttaggccaagatgccccatcatttcatactggcaatgaacttccaaatcctcatctccgtcaagtacctgctgctttgccatctcttccagttcaaccatatgcgcctcatcctaaaatttctgctgacaatccaaccgctgcaccttcttttcaaaagataccctggttgtcattgacttcaccgcctttgcctgcaattgggcgacgaatgcaaagtccagcagcttctccagaaacagcagttcatccagctaaacatggcaaggatcatggaactccagtttcagcaccttcaaatgttagtcatcaccatgcgatgcctgcgaataatacacatggaaaaactcatggaactccagttttggcaccagaaaagagaaggcatcaccacttgcctgcaaataattcatatgtgaaaggacctgctgtttctccctcaaagtctcccatcatccacaggaaaggacatggtgttccagttgctgcacctccaaaagaacactggagctatttaccacctgcaaatcgtagacaccacaaaggttctcgtcctgctccacgtaaaagtaacaatacttctgcaccaagccatgtatatcctggtagtcctgcacctgcacctgaacgtttgctcatcaaaggaaagggcaaggaaatttctgctcatgctccacgccatcccaatcattaccattcgcatcataattctccaag

SEQ ID NO: 77569 - DNA, 1214 bp, Zea Mays
taaaatacctggcgcctgatcacggaaagggacggcaacaaatcgccgtgcgccagcggccagcgcacagccgagctccagagaggaggcggagctgcgggggacggggggagacggaggaggtcccggcgtcccgcgcctccccgattggacaacttaatgacccctagtccctagtagcaagtcggctttgtgcgcgcgtgctctgctgcccacccggccgccccatttgtttactgggtgtctgggtccagtccccgccccgaatcttttccctcctcccgcaccccaggccgcagcagcagcaccggcgcaccgccacccactcgccccgcctccgtgcccgcgcaactcgcgcctgcagcgtgtgggagatgtgatcggagcccggccgtcggttcgagtgttttcttctgcctctgggctgtggcgcggggaggaggcaagctggcggtgagatgggtcggtgcggaggaggaagcggagcaggagcaggagggggagctttgggcggctgtgctctcctcaccgccgccttggttatctcaacgctcgtgatccagggcgctggaggttcttctatccataacgaattggcacccacacaattacttggatgatgtacttcatccatcacaagtacaagatcaaaggctcgaacgtttagtgtcattgacttcaccgcctttgcctgcaattgggcgacgaatgcaaagtccagcagcttctccagaaacagcagttcatccagctaaacatggcaaggatcatggaactccagtttcagcaccttcaaatgttagtcatcaccatgcgatgcctgcgaataatacacatggaaaaactcatggaactccagttttggcaccagaaaagagaaggcatcaccacttgcctgcaaataattcatatgtgaaaggacctgctgtttctccctcaaagtctcccatcatccacaggaaaggacatggtgttccagttgctgcacctccaaaagaacactggagctatttaccacctgcaaatcgtagacaccacaaaggttctcgtcctgctccacgtaaaagtaacaatacttctgcaccaagccatgtatatcctggtagtcctgcacctgcacctgaacgtttgctcatcaaaggaaagggcaaggaaatttctgctcatgctccacgccatcccaatcattaccattcgcatcataattctccaag

SEQ ID NO: 77570 - DNA, 1409 bp, Zea Mays
taaaatacctggcgcctgatcacggaaagggacggcaacaaatcgccgtgcgccagcggccagcgcacagccgagctccagagaggaggcggagctgcgggggacggggggagacggaggaggtcccggcgtcccgcgcctccccgattggacaacttaatgacccctagtccctagtagcaagtcggctttgtgcgcgcgtgctctgctgcccacccggccgccccatttgtttactgggtgtctgggtccagtccccgccccgaatcttttccctcctcccgcaccccaggccgcagcagcagcaccggcgcaccgccacccactcgccccgcctccgtgcccgcgcaactcgcgcctgcagcgtgtgggagatgtgatcggagcccggccgtcggttcgagtgttttcttctgcctctgggctgtggcgcggggaggaggcaagctggcggtgagatgggtcggtgcggaggaggaagcggagcaggagcaggagggggagctttgggcggctgtgctctcctcaccgccgccttggttatctcaacgctcgtgatccagggcgctggagcaatctcatgcacctgctgttgctcgcaaggttcttctatccataacgaattggcacccacacaattacttggatgatgtacttcatccatcacaagtacaagatcaaaggctcgaacgtttaggccaagatgccccatcatttcatactggcaatgaacttccaaatcctcatctccgtcaagtacctgctgctttgccatctcttccagttcaaccatatgcgcctcatcctaaaatttctgctgacaatccaaccgctgcaccttcttttcaaaagataccctggttgtcattgacttcaccgcctttgcctgcaattgggcgacgaatgcaaagtccagcagcttctccagaaacagcagttcatccagctaaacatggcaaggatcatggaactccagtttcagcaccttcaaatgttagtcatcaccatgcgatgcctgcgaataatacacatggaaaaactcatggaactccagttttggcaccagaaaagagaaggcatcaccacttgcctgcaaataattcatatgtgaaaggacctgctgtttctccctcaaagtctcccatcatccacaggaaaggacatggtgttccagttgctgcacctccaaaagaacactggagctatttaccacctgcaaatcgtagacaccacaaaggttctcgtcctgctccacgtaaaagtaacaatacttctgcaccaagccatgtatatcctggtagtcctgcacctgcacctgaacgtttgctcatcaaaggaaagggcaaggaaatttctgctcatgctccacgccatcccaatcattaccattcgcatcataattctccaag

SEQ ID NO: 77571 - DNA, 1337 bp, Zea Mays
cccctctccccgctgcgtcccccgaacggcgaacgctgccatcccatcctgccgtttgccgccgcaaaactcatcgttttttttttaaaatacctggcgcctgatcacggaaagggacggcaacaaatcgccgtgcgccagcggccagcgcacagccgagctccagagaggaggcggagctgcgggggacggggggagacggaggaggtcccggcgtcccgcgcctccccgattggacaacttaatgacccctagtccctagtagcaagtcggctttgtgcgcgcgtgctctgctgcccacccggccgccccatttgtttactgggtgtctgggtccagtccccgccccgaatcttttccctcctcccgcaccccaggccgcagcagcagcaccggcgcaccgccacccactcgccccgcctccgtgcccgcgcaactcgcgcctgcagcgtgtgggagatgtgatcggagcccggccgtcggttcgagtgttttcttctgcctctgggctgtggcgcggggaggaggcaagctggcggtgagatgggtcggtgcggaggaggaagcggagcaggagcaggagggggagctttgggcggctgtgctctcctcaccgccgccttggttatctcaacgctcgtgatccagggcgctggaggatctaagcaatctcatgcacctgctgttgctcgcaaggttcttctatccataacgaattggcacccacacaattacttggatgatgtacttcatccatcacaagtacaagatcaaaggctcgaacgtttagtgtcattgacttcaccgcctttgcctgcaattgggcgacgaatgcaaagtccagcagcttctccagaaacagcagttcatccagctaaacatggcaaggatcatggaactccagtttcagcaccttcaaatgttagtcatcaccatgcgatgcctgcgaataatacacatggaaaaactcatggaactccagttttggcaccagaaaagagaaggcatcaccacttgcctgcaaataattcatatgtgaaaggacctgctgtttctccctcaaagtctcccatcatccacaggaaaggacatggtgttccagttgctgcacctccaaaagaacactggagctatttaccacctgcaaatcgtagacaccacaaaggttctcgtcctgctccacgtaaaagtaacaatacttctgcaccaagccatgtatatcctggtagtcctgcacctgcacctgaacgtttgctcatcaaaggaaagggcaaggaaatttctgctcatgctccacgccatcccaatcattaccattcgcatcataattctccaag

SEQ ID NO: 77572 - DNA, 1541 bp, Zea Mays
cccaaaaccaaacaaccagaaacctccccttccgcctgacccctctccccgctgcgtcccccgaacggcgaacgctgccatcccatcctgccgtttgccgccgcaaaactcatcgttttttttttaaaatacctggcgcctgatcacggaaagggacggcaacaaatcgccgtgcgccagcggccagcgcacagccgagctccagagaggaggcggagctgcgggggacggggggagacggaggaggtcccggcgtcccgcgcctccccgattggacaacttaatgacccctagtccctagtagcaagtcggctttgtgcgcgcgtgctctgctgcccacccggccgccccatttgtttactgggtgtctgggtccagtccccgccccgaatcttttccctcctcccgcaccccaggccgcagcagcagcaccggcgcaccgccacccactcgccccgcctccgtgcccgcgcaactcgcgcctgcagcgtgtgggagatgtgatcggagcccggccgtcggttcgagtgttttcttctgcctctgggctgtggcgcggggaggaggcaagctggcggtgagatgggtcggtgcggaggaggaagcggagcaggagcaggagggggagctttgggcggctgtgctctcctcaccgccgccttggttatctcaacgctcgtgatccagggcgctggaggatctaagcaatctcatgcacctgctgttgctcgcaaggttcttctatccataacgaattggcacccacacaattacttggatgatgtacttcatccatcacaagtacaagatcaaaggctcgaacgtttaggccaagatgccccatcatttcatactggcaatgaacttccaaatcctcatctccgtcaagtacctgctgctttgccatctcttccagttcaaccatatgcgcctcatcctaaaatttctgctgacaatccaaccgctgcaccttcttttcaaaagataccctggttgtcattgacttcaccgcctttgcctgcaattgggcgacgaatgcaaagtccagcagcttctccagaaacagcagttcatccagctaaacatggcaaggatcatggaactccagtttcagcaccttcaaatgttagtcatcaccatgcgatgcctgcgaataatacacatggaaaaactcatggaactccagttttggcaccagaaaagagaaggcatcaccacttgcctgcaaataattcatatgtgaaaggacctgctgtttctccctcaaagtctcccatcatccacaggaaaggacatggtgttccagttgctgcacctccaaaagaacactggagctatttaccacctgcaaatcgtagacaccacaaaggttctcgtcctgctccacgtaaaagtaacaatacttctgcaccaagccatgtatatcctggtagtcctgcacctgcacctgaacgtttgctcatcaaaggaaagggcaaggaaatttctgctcatgctccacgccatcccaatcattaccattcgcatcataattctccaag

SEQ ID NO: 77573 - DNA, 2071 bp, Zea Mays
cccaaaaccaaacaaccagaaacctccccttccgcctgacccctctccccgctgcgtcccccgaacggcgaacgctgccatcccatcctgccgtttgccgccgcaaaactcatcgttttttttttaaaatacctggcgcctgatcacggaaagggacggcaacaaatcgccgtgcgccagcggccagcgcacagccgagctccagagaggaggcggagctgcgggggacggggggagacggaggaggtcccggcgtcccgcgcctccccgattggacaacttaatgacccctagtccctagtagcaagtcggctttgtgcgcgcgtgctctgctgcccacccggccgccccatttgtttactgggtgtctgggtccagtccccgccccgaatcttttccctcctcccgcaccccaggccgcagcagcagcaccggcgcaccgccacccactcgccccgcctccgtgcccgcgcaactcgcgcctgcagcgtgtgggagatgtgatcggagcccggccgtcggttcgagtgttttcttctgcctctgggctgtggcgcggggaggaggcaagctggcggtgagatgggtcggtgcggaggaggaagcggagcaggagcaggagggggagctttgggcggctgtgctctcctcaccgccgccttggttatctcaacgctcgtgatccagggcgctggaggatctaagcaatctcatgcacctgctgttgctcgcaaggttcttctatccataacgaattggcacccacacaattacttggatgatgtacttcatccatcacaagtacaagatcaaaggctcgaacgtttaggtctgtaaccacaaaactgaatacttaatgtcttgcagtgttcacttttattatatattgtgatgggtgtttctgaggtagacacaattgtctatattgtttctttgttaggattaaccgcaaaaaacacacctgcatgaactgctatttgttgtacatgttaatagatggtaggatactaggatcaatatgcaacccatcaatcaaccagacaaccatggagtaaaacatggatgacttttcctcttttttatctgcctggaatggctacacgcttctaatacgttacgcttctagtaagttgtcttccacagatgaacctgtttcaccacctacacaatcagtactgactgcagtggaacctggtgctcttgaccatttttatcaacaatcaaagagaaaaaaaagtcccaatctatgcagagcccagagctgattgtcgaggagtttattgagctctgtctgcatcttaacctttagaatcagtttggtatgagtatgatggtttcttatttttactttattcacaggccaagatgccccatcatttcatactggcaatgaacttccaaatcctcatctccgtcaagtacctgctgctttgccatctcttccagttcaaccatatgcgcctcatcctaaaatttctgctgacaatccaaccgctgcaccttcttttcaaaagataccctggttgtcattgacttcaccgcctttgcctgcaattgggcgacgaatgcaaagtccagcagcttctccagaaacagcagttcatccagctaaacatggcaaggatcatggaactccagtttcagcaccttcaaatgttagtcatcaccatgcgatgcctgcgaataatacacatggaaaaactcatggaactccagttttggcaccagaaaagagaaggcatcaccacttgcctgcaaataattcatatgtgaaaggacctgctgtttctccctcaaagtctcccatcatccacaggaaaggacatggtgttccagttgctgcacctccaaaagaacactggagctatttaccacctgcaaatcgtagacaccacaaaggttctcgtcctgctccacgtaaaagtaacaatacttctgcaccaagccatgtatatcctggtagtcctgcacctgcacctgaacgtttgctcatcaaaggaaagggcaaggaaatttctgctcatgctccacgccatcccaatcattaccattcgcatcataattctccaag

SEQ ID NO: 77574 - DNA, 520 bp, Zea Mays
gagcgctgcagtgccactatcttcctcctcacttttgctgtttggagtcgccgtacaaggtaggaggaggaacgggaggcgaggaaaaagatggtgaaggagttgtcagaaacgcatgtttggctagccagttctgttatgcttttgaatgaaaaatttagacccctctttctcgtttccttaatcgaaatgcttgaactctatgttccatttgtaatgtaataagaggcaaatgaattgcaccaacaacaatcaacttctgattgaaaaatatcgatgtgtcatgtgtggcctcaatgttgtgggattgcatctaatcctgtcgatttggcgaagtgaagattctgccatattactggagctatttgaaactgaggtgtggagagcctgtatggtcttttagcacttgcaacatactaattctgaaggagatgtgttgtaccatgagtccatgactctcatgagtagtttgtaaaaactattccctttcaactatatggatcggggagggaagtgagct

SEQ ID NO: 77575 - DNA, 1669 bp, Zea Mays
ataattgttcacaaaccttacatacatgtatcatataggatgatatattatctggaaacgttggtgatggtcttttaatttatggtacataggcaatacttggcaatataggtagtgtttggttggagagtattgtgggatagatccgttctgttccagtatgtgcgtccgttcctctccctctgactcttttcctccccaaccttctctgccgccgcatctctttcgcctccggccaccatctccccctggtgatgcgcctctgttccatccctctcccgtcgtcgcgcctgtggtctttctccttccgtgtcgcgcctccctccgcgacgcccgcgggccgcatccctcccgcagtgaaggtgcccacggtcagatccctgcggctggcgccgccatggatgccgagcaggccatcactgtatcaattgcaggttcttgttccttactgagcaaaccacagagagcaaatcgagccttcttttctttgccgagcagacaaccaggaaatgttgtgttttctcatggcagtagattttttcgtctttttatgatttgctaacaccacgagagcacacatcaatacgtattccttctccaattagctcatttaattaggattgtaaaattattcggttggaccagcactctgctcaattcttggtccttttctatgccacttttctcgtataatttctattttattatactaactaatgtctcatttttttacagcaaaattccattgaaagtattcaaagacaagaaaaagacttgacagcttaagcacatgatgttgggaacagaaccagctacctgattgcgggcacgggcaacctctgtttctgacacctgggatgcaagtcttctaaactccgccattattaaccgtgacaagtcttgcagggtgtcaggctgcaattgatttcacaaattgtaagaaacattgtagcaatcaatatctccgtcatatccatgcaacgttcagctgatggcatagatgaatggtcactagaaactttgatgtaactctgtgctgtgcaaatacaagtaattgtctgagtagtttattgttccatataatatattaactagacaatgactacattcagcctatgtgatggaagatatagtatttatgaatacccctcaccatttgaacaaggaagttcgcttcctagtgccaacaccagagatctgatctgggttgccatatactcaaacgtccaatatcaccagaaggcattcagaatcctgaatcctcactgcttgatcattaaaatgtaaccacagtccacaaatgttgcaaggggacacccacacctgatcagtgatcactatttcatccattcatcaatctaaatctaattttggaatgagagagccttcaaaagttgattttgatcaccatcttaactatatttcaattgctatataaagtcatcactatcttaaaggcatttcaaagatgaactatcgatgcaatacctatataaagacatgtctgtagcttgtgactaatcaatgatcaaatctcacaaagtttgacctttccaaatcaaaatatgtgttgcattaatgaatgagggagtactagatactaaattagtctttatagaattttagagcttacaaaaaaacaactcataatgagataaaaggaaaagac

SEQ ID NO: 77576 - DNA, 1824 bp, Zea Mays
cataacatgattcatctgacttatgtttctgtaggttgttcatctgacttatgatgacctatgatttatctgacttattgctttgcttgaaagaaattttaaaaatcatccgaaattcgcctcatgaaactgactcggctgaagtaccatgcacaggaagctttctcgtaccatcactgcaatcgtcgaccccacatggcagcgaaacggaaacggacgcgacacgctgcaacgttcgggagtaccagcgacgaacccaatcccaatccctatcttccgagatttgtctgcgcccctgcggcgcgcatggcgccacgactgaccgtggccttgggcggcgctcgggcatgagtacatggcgctcggtggcctcgcgtcgcgttactcacccaccggcaccgcgccacggccgcgttcgtctcaacaggagccgatggccactctcgcgccacggccacatatcctcctcggcttgacaaggccgcagcccatagcgcttcgtgcctgcgccgccttctcccgctcccgccacgcgccagtcccaccgcgggccgcgcagccgcggcgcgtcttcctcggccttggcgctgccttcatcgaccaggccacccgcatggcctccggcggcacctcgtcccgctctttcgttgccggagcgcggccgaggcaaggcgtttccccagtcgagcagattctcaagaatgtcgagtggccagatgagttccctttcaagcctgaggacttcagccgcttcgacgaatcatcagatactctgttctactcggttccacgttttgtcactcacattgatgaccaagcaatccaagctctcacagagtactattctgaagttcttcctccaagtaatactcctggggtggccattctggacatgtgcagcagctggccattatcctcccggttacagacaagagaagatcgtggggatgggtatgaatgaagatgaactgaaaaagaactcggtactgactcagtatgtcgtgcaagacctcaatgtgaacccaaagcttcctttcgaagataacacttttgatgttatcaccaatgtggttagtgtagattaccttacaaagccaatagatgtttttaaggagatgcgacgaatactcaagccaagcggccttgccataatgagctatatctatatggacctcaactggtgatgctgatcatgcatggatagttggtgcttacttccattatgttggaggttttgaacctccccaggcacttgatatatctcctaatccaggacgaactgacccaatgtatgttgtatgctcgagaaagaaaatagggtaactaaacaatatatttggcaagtgctatcaagaaacaaatagaaggaaaaatacaagaagcaagttgtttggccctgatcgcaggacctattggtgagctgatgtttccgtgagtaatgtaacgacagaaaaaagaagcaactactacataaactatttatagaagcggcagattcacttcataggttgtagcaactgtctttactaaaagtgtgtttggtttgaggaatgaagtgatccatcttcttctcactcctcacttttttatttggtttgtgtaatagaatgagttgatccatcaccactccattcctcgtaagataataattagtatatacatgaggggtgggttgattccaccaaaattgatagaatgaacttatgatgcatcacctcataaagcatagagtgactgcacaaaccaaacacaccataagggtatgtagaaatgatttattaaaataatggtatttattaaataatactacatccgtattttatc

SEQ ID NO: 77577 - DNA, 1788 bp, Zea Mays
attgccttgttcccatggtttatttggactcgaggtctctcactgatgatggatgtaggcagtgttcaacaatatcagggaagctttctcgtaccatcactgcaatcgtcgaccccacatggcagcgaaacggaaacggacgcgacacgctgcaacgttcgggagtaccagcgacgaacccaatcccaatccctatcttccgagatttgtctgcgcccctgcggcgcgcatggcgccacgactgaccgtggccttgggcggcgctcgggcatgagtacatggcgctcggtggcctcgcgtcgcgttactcacccaccggcaccgcgccacggccgcgttcgtctcaacaggagccgatggccactctcgcgccacggccacatatcctcctcggcttgacaaggccgcagcccatagcgcttcgtgcctgcgccgccttctcccgctcccgccacgcgccagtcccaccgcgggccgcgcagccgcggcgcgtcttcctcggccttggcgctgccttcatcgaccaggccacccgcatggcctccggcggcacctcgtcccgctctttcgttgccggagcgcggccgaggcaaggcgtttccccagtcgagcagattgtagattctcaagaatgtcgagtggccagatgagttccctttcaagcctgaggacttcagccgcttcgacgaatcatcagatactctgttctactcggttccacgttttgtcactcacattgatgaccaagcaatccaagctctcacagagtactattctgaagttcttcctccaagtaatactcctggggtggccattctggacatgtgcagcagctgggtcagccattatcctcccggttacagacaagagaagatcgtggggatgggtatgaatgaagatgaactgaaaaagaactcggtactgactcagtatgtcgtgcaagacctcaatgtgaacccaaagcttcctttcgaagataacacttttgatgttatcaccaatgtggttagtgtagattaccttacaaagccaatagatgtttttaaggagatgcgacgaatactcaagccaagcggccttgccataatgagcttttcaaaccggtgcttttggacaaaagctatatctatatggacctcaactggtgatgctgatcatgcatggatagttggtgcttacttccattatgttggaggttttgaacctccccaggcacttgatatatctcctaatccaggacgaactgacccaatgtatgttgtatgctcgagaaagaaaatagggtaactaaacaatatatttggcaagtgctatcaagaaacaaatagaaggaaaaatacaagaagcaagttgtttggccctgatcgcaggacctattggtgagctgatgtttccgtgagtaatgtaacgacagaaaaaagaagcaactactacataaactatttatagaagcggcagattcacttcataggttgtagcaactgtctttactaaaagtgtgtttggtttgaggaatgaagtgatccatcttcttctcactcctcacttttttatttggtttgtgtaatagaatgagttgatccatcaccactccattcctcgtaagataataattagtatatacatgaggggtgggttgattccaccaaaattgatagaatgaacttatgatgcatcacctcataaagcatagagtgactgcacaaaccaaacacaccataagggtatgtagaaatgatttattaaaataatggtatttattaaataatactacatccgtattttatc

SEQ ID NO: 77578 - DNA, 2063 bp, Zea Mays
aacttcccagtgtgtgttctattcttagtttctctgatcggctccaaattgccttgttcccatggtttatttggactcgaggtctctcactgatgatggatgtaggcagtgttcaacaatatcaggcaggtgttttttttcctttttttcataacatgattcatctgacttatgtttctgtaggttgttcatctgacttatgatgacctatgatttatctgacttattgctttgcttgaaagaaattttaaaaatcatccgaaattcgcctcatgaaactgactcggctgaagtaccatgcacaggaagctttctcgtaccatcactgcaatcgtcgaccccacatggcagcgaaacggaaacggacgcgacacgctgcaacgttcgggagtaccagcgacgaacccaatcccaatccctatcttccgagatttgtctgcgcccctgcggcgcgcatggcgccacgactgaccgtggccttgggcggcgctcgggcatgagtacatggcgctcggtggcctcgcgtcgcgttactcacccaccggcaccgcgccacggccgcgttcgtctcaacaggagccgatggccactctcgcgccacggccacatatcctcctcggcttgacaaggccgcagcccatagcgcttcgtgcctgcgccgccttctcccgctcccgccacgcgccagtcccaccgcgggccgcgcagccgcggcgcgtcttcctcggccttggcgctgccttcatcgaccaggccacccgcatggcctccggcggcacctcgtcccgctctttcgttgccggagcgcggccgaggcaaggcgtttccccagtcgagcaggttttcatgctctaccttttagaaaatatcgctgcaaagctgtagtgttttcttgtttttggacctggttaatggagaaagattgtagattctcaagaatgtcgagtggccagatgagttccctttcaagcctgaggacttcagccgcttcgacgaatcatcagatactctgttctactcggttccacgttttgtcactcacattgatgaccaagcaatccaagctctcacagagtactattctgaagttcttcctccaagtaatactcctggggtggccattctggacatgtgcagcagctgggtcagccattatcctcccggttacagacaagagaagatcgtggggatgggtactgactcagtatgtcgtgcaagacctcaatgtgaacccaaagcttcctttcgaagataacacttttgatgttatcaccaatgtggttagtgtagattaccttacaaagccaatagatgtttttaaggagatgcgacgaatactcaagccaagcggccttgccataatgagcttttcaaaccggtgcttttggacaaaagctatatctatatggacctcaactggtgatgctgatcatgcatggatagttggtgcttacttccattatgttggaggttttgaacctccccaggcacttgatatatctcctaatccaggacgaactgacccaatgtatgttgtatgctcgagaaagaaaatagggtaactaaacaatatatttggcaagtgctatcaagaaacaaatagaaggaaaaatacaagaagcaagttgtttggccctgatcgcaggacctattggtgagctgatgtttccgtgagtaatgtaacgacagaaaaaagaagcaactactacataaactatttatagaagcggcagattcacttcataggttgtagcaactgtctttactaaaagtgtgtttggtttgaggaatgaagtgatccatcttcttctcactcctcacttttttatttggtttgtgtaatagaatgagttgatccatcaccactccattcctcgtaagataataattagtatatacatgaggggtgggttgattccaccaaaattgatagaatgaacttatgatgcatcacctcataaagcatagagtgactgcacaaaccaaacacaccataagggtatgtagaaatgatttattaaaataatggtatttattaaataatactacatccgtattttatc

SEQ ID NO: 77579 - DNA, 2125 bp, Zea Mays
gaaaaattgatttcctaaactagccctaatatggtactcgctgctaatgcgaccacagggataacttcccagtgtgtgttctattcttagtttctctgatcggctccaaattgccttgttcccatggtttatttggactcgaggtctctcactgatgatggatgtaggcagtgttcaacaatatcaggaagctttctcgtaccatcactgcaatcgtcgaccccacatggcagcgaaacggaaacggacgcgacacgctgcaacgttcgggagtaccagcgacgaacccaatcccaatccctatcttccgagatttgtctgcgcccctgcggcgcgcatggcgccacgactgaccgtggccttgggcggcgctcgggcatgagtacatggcgctcggtggcctcgcgtcgcgttactcacccaccggcaccgcgccacggccgcgttcgtctcaacaggagccgatggccactctcgcgccacggccacatatcctcctcggcttgacaaggccgcagcccatagcgcttcgtgcctgcgccgccttctcccgctcccgccacgcgccagtcccaccgcgggccgcgcagccgcggcgcgtcttcctcggccttggcgctgccttcatcgaccaggccacccgcatggcctccggcggcacctcgtcccgctctttcgttgccggagcgcggccgaggcaaggcgtttccccagtcgagcaggttttcatgctctaccttttagaaaatatcgctgcaaagctgtagtgttttcttgtttttggacctggttaatggagaaagattgtagattctcaagaatgtcgagtggccagatgagttccctttcaagcctgaggacttcagccgcttcgacgaatcatcagatactctgttctactcggttccacgttttgtcactcacattgatgaccaagcaatccaagctctcacagagtactattctgaagttcttcctccaagtaatactcctggggtggccattctggacatgtgcagcagctgggtcagccattatcctcccggttacagacaagagaagatcgtggggatgggtatgaatgaagatgaactgaaaaagaactcggtattatgtactgactcagtatgtcgtgcaagacctcaatgtgaacccaaagcttcctttcgaagataacacttttgatgttatcaccaatgtggtactgtgtcctttgtattgtattcttgttaaaagaagagattatacgttgtactgcaaagtgttacttctttattagcatcgtgaattggagcgcaaagattgtttacattatctgatagtagcacttctttgctagtaggttagtgtagattaccttacaaagccaatagatgtttttaaggagatgcgacgaatactcaagccaagcggccttgccataatgagcttttcaaaccggtgcttttggacaaaagctatatctatatggacctcaactggtgatgctgatcatgcatggatagttggtgcttacttccattatgttggaggttttgaacctccccaggcacttgatatatctcctaatccaggacgaactgacccaatgtatgttgtatgctcgagaaagaaaatagggtaactaaacaatatatttggcaagtgctatcaagaaacaaatagaaggaaaaatacaagaagcaagttgtttggccctgatcgcaggacctattggtgagctgatgtttccgtgagtaatgtaacgacagaaaaaagaagcaactactacataaactatttatagaagcggcagattcacttcataggttgtagcaactgtctttactaaaagtgtgtttggtttgaggaatgaagtgatccatcttcttctcactcctcacttttttatttggtttgtgtaatagaatgagttgatccatcaccactccattcctcgtaagataataattagtatatacatgaggggtgggttgattccaccaaaattgatagaatgaacttatgatgcatcacctcataaagcatagagtgactgcacaaaccaaacacaccataagggtatgtagaaatgatttattaaaataatggtatttattaaataatactacatccgtattttatc

SEQ ID NO: 77580 - DNA, 2197 bp, Zea Mays
ataaatgtagtatcgggataataaacaaatatattacatatataaatatattaacttaattagttttgtctaaattatacttattataatgaaattcaattccaacaaaataaacggggctaaggaaattagttcatttttcttttaataaaataggaattctttggaaaaattgatttcctaaactagccctaatatggtactcgctgctaatgcgaccacagggataacttcccagtgtgtgttctattcttagtttctctgatcggctccaaattgccttgttcccatggtttatttggactcgaggtctctcactgatgatggatgtaggcagtgttcaacaatatcaggcaggtgttttttttcctttttttcataacatgattcatctgacttatgtttctgtaggttgttcatctgacttatgatgacctatgatttatctgacttattgctttgcttgaaagaaattttaaaaatcatccgaaattcgcctcatgaaactgactcggctgaagtaccatgcacaggaagctttctcgtaccatcactgcaatcgtcgaccccacatggcagcgaaacggaaacggacgcgacacgctgcaacgttcgggagtaccagcgacgaacccaatcccaatccctatcttccgagatttgtctgcgcccctgcggcgcgcatggcgccacgactgaccgtggccttgggcggcgctcgggcatgagtacatggcgctcggtggcctcgcgtcgcgttactcacccaccggcaccgcgccacggccgcgttcgtctcaacaggagccgatggccactctcgcgccacggccacatatcctcctcggcttgacaaggccgcagcccatagcgcttcgtgcctgcgccgccttctcccgctcccgccacgcgccagtcccaccgcgggccgcgcagccgcggcgcgtcttcctcggccttggcgctgccttcatcgaccaggccacccgcatggcctccggcggcacctcgtcccgctctttcgttgccggagcgcggccgaggcaaggcgtttccccagtcgagcagaatgtcgagtggccagatgagttccctttcaagcctgaggacttcagccgcttcgacgaatcatcagatactctgttctactcggttccacgttttgtcactcacattgatgaccaagcaatccaagctctcacagagtactattctgaagttcttcctccaagtaatactcctggggtggccattctggacatgtgcagcagctgggtcagccattatcctcccggttacagacaagagaagatcgtggggatgggtatgaatgaagatgaactgaaaaagaactcggtactgactcagtatgtcgtgcaagacctcaatgtgaacccaaagcttcctttcgaagataacacttttgatgttatcaccaatgtggttagtgtagattaccttacaaagccaatagatgtttttaaggagatgcgacgaatactcaagccaagcggccttgccataatgagctatatctatatggacctcaactggtgatgctgatcatgcatggatagttggtgcttacttccattatgttggaggttttgaacctccccaggcacttgatatatctcctaatccaggacgaactgacccaatgtatgttgtatgctcgagaaagaaaatagggtaactaaacaatatatttggcaagtgctatcaagaaacaaatagaaggaaaaatacaagaagcaagttgtttggccctgatcgcaggacctattggtgagctgatgtttccgtgagtaatgtaacgacagaaaaaagaagcaactactacataaactatttatagaagcggcagattcacttcataggttgtagcaactgtctttactaaaagtgtgtttggtttgaggaatgaagtgatccatcttcttctcactcctcacttttttatttggtttgtgtaatagaatgagttgatccatcaccactccattcctcgtaagataataattagtatatacatgaggggtgggttgattccaccaaaattgatagaatgaacttatgatgcatcacctcataaagcatagagtgactgcacaaaccaaacacaccataagggtatgtagaaatgatttattaaaataatggtatttattaaataatactacatccgtattttatc

SEQ ID NO: 77581 - DNA, 2119 bp, Zea Mays
attcgttctgctacatttctaatgtacaatttataacacattcttatacttccttctttatagcataaatgtagtatcgggataataaacaaatatattacatatataaatatattaacttaattagttttgtctaaattatacttattataatgaaattcaattccaacaaaataaacggggctaaggaaattagttcatttttcttttaataaaataggaattctttggaaaaattgatttcctaaactagccctaatatggtactcgctgctaatgcgaccacagggataacttcccagtgtgtgttctattcttagtttctctgatcggctccaaattgccttgttcccatggtttatttggactcgaggtctctcactgatgatggatgtaggcagtgttcaacaatatcaggaagctttctcgtaccatcactgcaatcgtcgaccccacatggcagcgaaacggaaacggacgcgacacgctgcaacgttcgggagtaccagcgacgaacccaatcccaatccctatcttccgagatttgtctgcgcccctgcggcgcgcatggcgccacgactgaccgtggccttgggcggcgctcgggcatgagtacatggcgctcggtggcctcgcgtcgcgttactcacccaccggcaccgcgccacggccgcgttcgtctcaacaggagccgatggccactctcgcgccacggccacatatcctcctcggcttgacaaggccgcagcccatagcgcttcgtgcctgcgccgccttctcccgctcccgccacgcgccagtcccaccgcgggccgcgcagccgcggcgcgtcttcctcggccttggcgctgccttcatcgaccaggccacccgcatggcctccggcggcacctcgtcccgctctttcgttgccggagcgcggccgaggcaaggcgtttccccagtcgagcagattctcaagaatgtcgagtggccagatgagttccctttcaagcctgaggacttcagccgcttcgacgaatcatcagatactctgttctactcggttccacgttttgtcactcacattgatgaccaagcaatccaagctctcacagagtactattctgaagttcttcctccaagtaatactcctggggtggccattctggacatgtgcagcagctgggtcagccattatcctcccggttacagacaagagaagatcgtggggatgggtatgaatgaagatgaactgaaaaagaactcggtactgactcagtatgtcgtgcaagacctcaatgtgaacccaaagcttcctttcgaagataacacttttgatgttatcaccaatgtggttagtgtagattaccttacaaagccaatagatgtttttaaggagatgcgacgaatactcaagccaagcggccttgccataatgagcttttcaaaccggtgcttttggacaaaagctatatctatatggacctcaactggtgatgctgatcatgcatggatagttggtgcttacttccattatgttggaggttttgaacctccccaggcacttgatatatctcctaatccaggacgaactgacccaatgtatgttgtatgctcgagaaagaaaatagggtaactaaacaatatatttggcaagtgctatcaagaaacaaatagaaggaaaaatacaagaagcaagttgtttggccctgatcgcaggacctattggtgagctgatgtttccgtgagtaatgtaacgacagaaaaaagaagcaactactacataaactatttatagaagcggcagattcacttcataggttgtagcaactgtctttactaaaagtgtgtttggtttgaggaatgaagtgatccatcttcttctcactcctcacttttttatttggtttgtgtaatagaatgagttgatccatcaccactccattcctcgtaagataataattagtatatacatgaggggtgggttgattccaccaaaattgatagaatgaacttatgatgcatcacctcataaagcatagagtgactgcacaaaccaaacacaccataagggtatgtagaaatgatttattaaaataatggtatttattaaataatactacatccgtattttatc

SEQ ID NO: 77582 - DNA, 1071 bp, Zea Mays
caaaaaccaatagtttcacaatggaaggaatctatgtgcgatgctctatctgtatgtgcaaccaatttcattaagttaccttctaacacatataatcagattattaacttgcccacatgattgcaaagcagacaatcactctactgctttgtactactgttcatgccaaaatacactgatatttgtgtcacccatcagcagtaaaagaaatggaactgccaaaagcataatttctgctaatttgcacatggctcccacatcttctgatccttccaataacgcagcagaaaactccaatcttctttatgaaagagacctcacactatcaaatttgtttatatcaaacatggagaagtagcaggttgtatcagtagacctactgcattttgctgagacgaaaggttccatggccactgagagccaagaaacactaagctctatgagccctcatcactcatcagtaccagatggtggccaggccaagtgcagcccagcataatactggcccatggcatatagcatatcagttacttgtatgttacaggtagtatggttcggtcacttggatttcccggcaagttagtttcagtgccgtgatcaataattcacgcttgtacagcctattcctaccagttatgggctgcagcacacccatgaaaatgcacacatgtacactgacaactccaaccaataatgttacatacactcttttttttaataatgtttcactacaaggccatatacatggtgtcatggtgacaacttgtaacattgtgccatttatgatgcacacgatcgacgaactgcaaaatcggctgagatgccatatcatcactacgaaatcagcaaatgagcaaccaaaactatgcccctccgcgacccactttcctcatcctctacatttaatgccatcatctacagcttacgtgtccaatggatgacacacatacggatataccatggtgatcaaacacacaccggtacaccaaatcgcgcaaattgatcgtggaatccagactaaacctgcaagcgattgcttgtaaacaacgatccactgatcaaacagcgatg

SEQ ID NO: 77583 - DNA, 347 bp, Zea Mays
ggtaatgctaatgcacaggatgtctttcgtttatgtacctgcacacacattcacagggtgcaggacaggaaacaccagagcctgcctcctcgtcagtcgtcacagcgttgcatctgatgtaacgctcagttcagttttgcagagttacccttttacacataaacaacacgcgtacccaatcatatactactaaacatacaaaatgaggacgccatttatttggatgtacagcaatggcgtcaaccaggggatctctgagttccacgcaggggatgatggttttgaccgcggcagtttttctgcccggatctcacatctgaggcccggattttgggtagggaaacgag

SEQ ID NO: 77584 - DNA, 983 bp, Zea Mays
atttcaaacacaaaaataggtgatttctcttaagccaatgaggacattaagagagatacgcactgatgtgtgccctgccctcagtatacaacagctagagcgaatagttagtatgtactgggatgatgtgaatggtacaaacactatttcagcagagtttacatcaagcttgaaatctgccatacgtgatgaatccaatatggccacaaatttctctatactgctagatgatgattccagtatacctttttcacttgatgatattacaaagacattgccggtcattgagctggctgatgacgactttctgccatttgtccatgaaaacccaagctttgcgtttttattgcaaagaggggagtagtcttttttttttgtcaccattgtgacttcacctacctgtggataagtcaggattcctgctaggatgtacagtacgcgtgattctttttgtaccaggtagcaaggcatcaaagattagatgctaggtgagcttataggcttctggtttctattgatttgtttgttggttgtatatttgtattcaggttttccttgccattttttctacttgtagccgttttttgggcttgtatactaggtggtaagggcagaagaccctgccctgtaagcatagttacacaaggtcttgctgtaggtatggaagctgtacatgtgttgtaacggattataaaagggggaaagtagtgcgtagtgatggctttgtggttggtgtgttgcttacctttgatcaatgatcatgtattggttcgtcatatattgtttattgtactgcacaccattccattgtagataacatacacgctcaagacttgttctgggatgtcaaatgagtaatctgttacggtacagaaatgtcatgcttacttccagatcttctgtaatgaacacaaataattatcattttcatttatttttgttcttagatcctgctgcggcttttatagggtaattatcgagag

SEQ ID NO: 77585 - DNA, 1955 bp, Zea Mays
atggaatcggactctgccgatcgtggggaggcatcccgccaccgctcaaagagggagcgaccgcccgacccagagggtgatgcctgccccgacgtcggcaggcgaagggtggccgccgggcccggagtggacgccggtgctaatgttcctgacttgggcgaccaaaaggagtttgaacatggagaaaaactgcaaagaataccaaaacagaaatatcaggttcaaaatgacatgagaacattggcgtattggttgtccaacttatctacattaacagttttccttcaacggtcattcaaaactactaggaccacaatctcaactccacaaaggagaagattttcgtccgagaggatgtttggaaatcaaacttcaaatgctgggcttgcttatctcagtggtcaatcagttggatctgctggattgctccaagttgaagcaaagtatcctgctttgctattcaaacagcagctcgtggatttaattgaaaaggtttatggcatgataagtgacagcgtgaagaaggaactaaaccctttgcttgaattgtgtatacaggatccacaaacttctcagtcaagtattgcaaaaggtaatcttaatggcatgggtcaacagaaccaactcacacattggctgggcatagtgaaaatcctcactagctacttggatgtactaagggaaaatcacgttccctcaattctggtgcataaacttttcactcaaatgttctcacttattgatgttcaattatttaaccgattacttttgcggcgtgagtgctgttcttttagtaacggggaatatatcagagctggactagctgaactaaaacattggtccgacaatgctacaagagaggttgattacatatctgttttgtgatggttttcccccaaatgacattggcttatatgttatatgtttcacgcagtttgcaggttcagcgtgggaggcattgaggcatattagacaagctgttgatttcctggtgatttctcttaagccaatgaggacattaagagagatacgcactgatgtgtgccctgccctcagtatacaacagctagagcgaatagttagtatgtactgggatgatgtgaatggtacaaacactatttcagcagagtttacatcaagcttgaaatctgccatacgtgatgaatccaatatggccacaaatttctctatactgctagatgatgattccagtatacctttttcacttgatgatattacaaagacattgccggtcattgagctggctgatgacgactttctgccatttgtccatgaaaacccaagctttgcgtttttattgcaaagaggggagtagtcttttttttttgtcaccattgtgacttcacctacctgtggataagtcaggattcctgctaggatgtacagtacgcgtgattctttttgtaccaggtagcaaggcatcaaagattagatgctaggtgagcttataggcttctggtttctattgatttgtttgttggttgtatatttgtattcaggttttccttgccattttttctacttgtagccgttttttgggcttgtatactaggtggtaagggcagaagaccctgccctgtaagcatagttacacaaggtcttgctgtaggtatggaagctgtacatgtgttgtaacggattataaaagggggaaagtagtgcgtagtgatggctttgtggttggtgtgttgcttacctttgatcaatgatcatgtattggttcgtcatatattgtttattgtactgcacaccattccattgtagataacatacacgctcaagacttgttctgggatgtcaaatgagtaatctgttacggtacagaaatgtcatgcttacttccagatcttctgtaatgaacacaaataattatcattttcatttatttttgttcttagatcctgctgcggcttttatagggtaattatcgagag

SEQ ID NO: 77586 - DNA, 3259 bp, Zea Mays
gacaatctagtctcctggtcctccaagcggcaaaacactgtttcccgctcaagtgcagaagccgaataccgcgctgtcgccaatgcagttgctgaggctgcctagatacgtcacctcctgaatgagttgcactcccccctgcccaagaccaccctgatatgtacacagtttgtccctcattcaatatataacaatcattcttcctcaatactgcttacttacatttacgacttagtaagacttgaacaagatgtctctgccaaagaggtcttattgcttacagaaaagcaggcacacgaggcaacaaggaagactctcactgaagttcaggaaaaaagtgaagaacttctgaagaaaattcatgataatgataaacatattcttcagcttcagtttactatacagaggcttgaggaaaccacagttgcaaatgagaatttgctgttgagggagagggagcagaatgacacaacaacaaaagcgcacaatgaaagtcaagaaaaatatgaagaattactaaagaaatttattgatgttgacaggaaaatcgaccttcttcaaggtaccatagaaaggcttggagaaaatacaacagcaaaggattctctgttgctatcagagagacatgaaaaggctgctattaagaaagcacttactgaggctgaagagaaaaatgaagagttactgatgaaagttgaagatgctaatgaaaaaataggacaccttcaaactaagataaatatgcttgaagataatgtagccgcaaaagatgtttctttagaagctgcaatcaaggaaaatgacgcaaccaggaaatctcttactgaagctcaagagagaaatggtgaattactcaagaaaatcagtgacagtgactacaggatccatttacttcaagacacggtacaaaagcttcaagtagatgcaatatcaaggttgtcgtcttttgtaatggaaaaacaagaaagtgatattgcaaagagagccgttactgaagctcatgaaagaaatgaagatttactaaagagaaatgaggacctcctcaagaggaatgatgatttgattaagaaaattgaagactctagtaaaattgtcactcaacttcaggaagctctacaaagacttgaaggaaaagcatccaacttagaggttgagaaccaagttcttcgtcaacatgcaacttcaactccaccgtctactgctaaatctccagcttcacgctcaaagatctcaaggatccatagaagtccagagaatggccatattttgaatggtgacattaggcaaactgaaatgaagccctcaactggcacatcagcagcaattacctcagtagctaatgttcctgacttgggcgaccaaaaggagtttgaacatggagaaaaactgcaaagaataccaaaacagaaatatcagcagccccaagacgatcagcagtggctagtcacttgtatttcacaatatcttggattttctgggagcaaacctgttgcagctctccttatataccaatgtcttctccattggaaatcatttgaagccatgaagacgggtgtctttgatagcattttgcatgctataaactcagccacagaggttcaaaatgacatgagaacattggcgtattggttgtccaacttatctacattaacagttttccttcaacggtcattcaaaactactaggaccacaatctcaactccacaaaggagaagattttcgtccgagaggatgtttggaaatcaaacttcaaatgctgggcttgcttatctcagtggtcaatcagttggatctgctggattgctccaagttgaagcaaagtatcctgctttgctattcaaacagcagctcgtggatttaattgaaaaggtttatggcatgataagtgacagcgtgaagaaggaactaaaccctttgcttgaattgtgtatacaggatccacaaacttctcagtcaagtattgcaaaaggtaatcttaatggcatgggtcaacagaaccaactcacacattggctgggcatagtgaaaatcctcactagctacttggatgtactaagggaaaatcacgttccctcaattctggtgcataaacttttcactcaaatgttctcacttattgatgttcaattatttaaccgattacttttgcggcgtgagtgctgttcttttagtaacggggaatatatcagagctggactagctgaactaaaacattggtccgacaatgctacaagagagtttgcaggttcagcgtgggaggcattgaggcatattagacaagctgttgatttcctggtgatttctcttaagccaatgaggacattaagagagatacgcactgatgtgtgccctgccctcagtatacaacagctagagcgaatagttagtatgtactgggatgatgtgaatggtacaaacactatttcagcagagtttacatcaagcttgaaatctgccatacgtgatgaatccaatatggccacaaatttctctatactgctagatgatgattccagtatacctttttcacttgatgatattacaaagacattgccggtcattgagctggctgatgacgactttctgccatttgtccatgaaaacccaagctttgcgtttttattgcaaagaggggagtagtcttttttttttgtcaccattgtgacttcacctacctgtggataagtcaggattcctgctaggatgtacagtacgcgtgattctttttgtaccaggtagcaaggcatcaaagattagatgctaggtgagcttataggcttctggtttctattgatttgtttgttggttgtatatttgtattcaggttttccttgccattttttctacttgtagccgttttttgggcttgtatactaggtggtaagggcagaagaccctgccctgtaagcatagttacacaaggtcttgctgtaggtatggaagctgtacatgtgttgtaacggattataaaagggggaaagtagtgcgtagtgatggctttgtggttggtgtgttgcttacctttgatcaatgatcatgtattggttcgtcatatattgtttattgtactgcacaccattccattgtagataacatacacgctcaagacttgttctgggatgtcaaatgagtaatctgttacggtacagaaatgtcatgcttacttccagatcttctgtaatgaacacaaataattatcattttcatttatttttgttcttagatcctgctgcggcttttatagggtaattatcgagag

SEQ ID NO: 77587 - DNA, 3267 bp, Zea Mays
gacaatctagtctcctggtcctccaagcggcaaaacactgtttcccgctcaagtgcagaagccgaataccgcgctgtcgccaatgcagttgctgaggctgcctagatacgtcacctcctgaatgagttgcactcccccctgcccaagaccaccctgatatgtacacagtttgtccctcattcaatatataacaatcattcttcctcaatactgcttacttacatttacgacttagtaagacttgaacaagatgtctctgccaaagaggtcttattgcttacagaaaagcaggcacacgaggcaacaaggaagactctcactgaagttcaggaaaaaagtgaagaacttctgaagaaaattcatgataatgataaacatattcttcagcttcagtttactatacagaggcttgaggaaaccacagttgcaaatgagaatttgctgttgagggagagggagcagaatgacacaacaacaaaagcgcacaatgaaagtcaagaaaaatatgaagaattactaaagaaatttattgatgttgacaggaaaatcgaccttcttcaaggtaccatagaaaggcttggagaaaatacaacagcaaaggattctctgttgctatcagagagacatgaaaaggctgctattaagaaagcacttactgaggctgaagagaaaaatgaagagttactgatgaaagttgaagatgctaatgaaaaaataggacaccttcaaactaagataaatatgcttgaagataatgtagccgcaaaagatgtttctttagaagctgcaatcaaggaaaatgacgcaaccaggaaatctcttactgaagctcaagagagaaatggtgaattactcaagaaaatcagtgacagtgactacaggatccatttacttcaagacacggtacaaaagcttcaagtagatgcaatatcaaggttgtcgtcttttgtaatggaaaaacaagaaagtgatattgcaaagagagccgttactgaagctcatgaaagaaatgaagatttactaaagagaaatgaggacctcctcaagaggaatgatgatttgattaagaaaattgaagactctagtaaaattgtcactcaacttcaggaagctctacaaagacttgaaggaaaagcatccaacttagaggttgagaaccaagttcttcgtcaacatgcaacttcaactccaccgtctactgctaaatctccagcttcacgctcaaagatctcaaggatccatagaagtccagagaatggccatattttgaatggtgacattaggcaaactgaaatgaagccctcaactggcacatcagcagcaattacctcagtagctaatgttcctgacttgggcgaccaaaaggagtttgaacatggagaaaaactgcaaagaataccaaaacagaaatatcagccttcccataaccagcagccccaagacgatcagcagtggctagtcacttgtatttcacaatatcttggattttctgggagcaaacctgttgcagctctccttatataccaatgtcttctccattggaaatcatttgaagccatgaagacgggtgtctttgatagcattttgcatgctataaactcagccacagaggttcaaaatgacatgagaacattggcgtattggttgtccaacttatctacattaacagttttccttcaacggtcattcaaaactactaggaccacaatctcaactccacaaaggagaagattttcgtccgagaggatgtttggaaatcaaacttcaaatgctgggcttgcttatctcagtggtcaatcagttggatctgctggattgctccaagttgaagcaaagtatcctgctttgctattcaaacagcagctcgtggatttaattgaaaaggtttatggcatgataagtgacagcgtgaagaaggaactaaaccctttgcttgaattgtgtatacaggatccacaaacttctcagtcaagtattgcaaaaggtaatcttaatggcatgggtcaacagaaccaactcacacattggctgggcatagtgaaaatcctcactagctacttggatgtactaagggaaaatcacgttccctcaattctggtgcataaacttttcactcaaatgttctcacttattgatgttcaattatttaaccgattacttttgcggcgtgagtgctgttcttttagtaacggggaatatatcagagctggactagctgaactaaaacattggtccgacaatgctacaagagaggttcagcgtgggaggcattgaggcatattagacaagctgttgatttcctggtgatttctcttaagccaatgaggacattaagagagatacgcactgatgtgtgccctgccctcagtatacaacagctagagcgaatagttagtatgtactgggatgatgtgaatggtacaaacactatttcagcagagtttacatcaagcttgaaatctgccatacgtgatgaatccaatatggccacaaatttctctatactgctagatgatgattccagtatacctttttcacttgatgatattacaaagacattgccggtcattgagctggctgatgacgactttctgccatttgtccatgaaaacccaagctttgcgtttttattgcaaagaggggagtagtcttttttttttgtcaccattgtgacttcacctacctgtggataagtcaggattcctgctaggatgtacagtacgcgtgattctttttgtaccaggtagcaaggcatcaaagattagatgctaggtgagcttataggcttctggtttctattgatttgtttgttggttgtatatttgtattcaggttttccttgccattttttctacttgtagccgttttttgggcttgtatactaggtggtaagggcagaagaccctgccctgtaagcatagttacacaaggtcttgctgtaggtatggaagctgtacatgtgttgtaacggattataaaagggggaaagtagtgcgtagtgatggctttgtggttggtgtgttgcttacctttgatcaatgatcatgtattggttcgtcatatattgtttattgtactgcacaccattccattgtagataacatacacgctcaagacttgttctgggatgtcaaatgagtaatctgttacggtacagaaatgtcatgcttacttccagatcttctgtaatgaacacaaataattatcattttcatttatttttgttcttagatcctgctgcggcttttatagggtaattatcgagag

SEQ ID NO: 77588 - DNA, 3326 bp, Zea Mays
tggctgtccggatactcgcagatctacgtctggatatgccgtctttcttggtgacaatctagtctcctggtcctccaagcggcaaaacactgtttcccgctcaagtgcagaagccgaataccgcgctgtcgccaatgcagttgctgaggctgcctagatacgtcacctcctgaatgagttgcactcccccctgcccaagaccaccctgatatgtacacagtttgtccctcattcaatatataacaatcattcttcctcaatactgcttacttacatttacgacttagtaagacttgaacaagatgtctctgccaaagaggtcttattgcttacagaaaagcaggcacacgaggcaacaaggaagactctcactgaagttcaggaaaaaagtgaagaacttctgaagaaaattcatgataatgataaacatattcttcagcttcagtttactatacagaggcttgaggaaaccacagttgcaaatgagaatttgctgttgagggagagggagcagaatgacacaacaacaaaagcgcacaatgaaagtcaagaaaaatatgaagaattactaaagaaatttattgatgttgacaggaaaatcgaccttcttcaaggtaccatagaaaggcttggagaaaatacaacagcaaaggattctctgttgctatcagagagacatgaaaaggctgctattaagaaagcacttactgaggctgaagagaaaaatgaagagttactgatgaaagttgaagatgctaatgaaaaaataggacaccttcaaactaagataaatatgcttgaagataatgtagccgcaaaagatgtttctttagaagctgcaatcaaggaaaatgacgcaaccaggaaatctcttactgaagctcaagagagaaatggtgaattactcaagaaaatcagtgacagtgactacaggatccatttacttcaagacacggtacaaaagcttcaagtagatgcaatatcaaggttgtcgtcttttgtaatggaaaaacaagaaagtgatattgcaaagagagccgttactgaagctcatgaaagaaatgaagatttactaaagagaaatgaggacctcctcaagaggaatgatgatttgattaagaaaattgaagactctagtaaaattgtcactcaacttcaggaagctctacaaagacttgaaggaaaagcatccaacttagaggttgagaaccaagttcttcgtcaacatgcaacttcaactccaccgtctactgctaaatctccagcttcacgctcaaagatctcaaggatccatagaagtccagagaatggccatattttgaatggtgacattaggcaaactgaaatgaagccctcaactggcacatcagcagcaattacctcagtagctaatgttcctgacttgggcgaccaaaaggagtttgaacatggagaaaaactgcaaagaataccaaaacagaaatatcagccttcccataaccagcagccccaagacgatcagcagtggctagtcacttgtatttcacaatatcttggattttctgggagcaaacctgttgcagctctccttatataccaatgtcttctccattggaaatcatttgaagccatgaagacgggtgtctttgatagcattttgcatgctataaactcagccacagaggttcaaaatgacatgagaacattggcgtattggttgtccaacttatctacattaacagttttccttcaacggtcattcaaaactactaggaccacaatctcaactccacaaaggagaagattttcgtccgagaggatgtttggaaatcaaacttcaaatgctgggcttgcttatctcagtggtcaatcagttggatctgctggattgctccaagttgaagcaaagtatcctgctttgctattcaaacagcagctcgtggatttaattgaaaaggtttatggcatgataagtgacagcgtgaagaaggaactaaaccctttgcttgaattgtgtatacaggatccacaaacttctcagtcaagtattgcaaaaggtaatcttaatggcatgggtcaacagaaccaactcacacattggctgggcatagtgaaaatcctcactagctacttggatgtactaagggaaaatcacgttccctcaattctggtgcataaacttttcactcaaatgttctcacttattgatgttcaattatttaaccgattacttttgcggcgtgagtgctgttcttttagtaacggggaatatatcagagctggactagctgaactaaaacattggtccgacaatgctacaagagagtttgcaggttcagcgtgggaggcattgaggcatattagacaagctgttgatttcctggtgatttctcttaagccaatgaggacattaagagagatacgcactgatgtgtgccctgccctcagtatacaacagctagagcgaatagttagtatgtactgggatgatgtgaatggtacaaacactatttcagcagagtttacatcaagcttgaaatctgccatacgtgatgaatccaatatggccacaaatttctctatactgctagatgatgattccagtatacctttttcacttgatgatattacaaagacattgccggtcattgagctggctgatgacgactttctgccatttgtccatgaaaacccaagctttgcgtttttattgcaaagaggggagtagtcttttttttttgtcaccattgtgacttcacctacctgtggataagtcaggattcctgctaggatgtacagtacgcgtgattctttttgtaccaggtagcaaggcatcaaagattagatgctaggtgagcttataggcttctggtttctattgatttgtttgttggttgtatatttgtattcaggttttccttgccattttttctacttgtagccgttttttgggcttgtatactaggtggtaagggcagaagaccctgccctgtaagcatagttacacaaggtcttgctgtaggtatggaagctgtacatgtgttgtaacggattataaaagggggaaagtagtgcgtagtgatggctttgtggttggtgtgttgcttacctttgatcaatgatcatgtattggttcgtcatatattgtttattgtactgcacaccattccattgtagataacatacacgctcaagacttgttctgggatgtcaaatgagtaatctgttacggtacagaaatgtcatgcttacttccagatcttctgtaatgaacacaaataattatcattttcatttatttttgttcttagatcctgctgcggcttttatagggtaattatcgagag

SEQ ID NO: 77589 - DNA, 4001 bp, Zea Mays
aggtttgttgctttatttcctgacttagagcaatttcttgacccttatgcagagctggtccacatggattcaagattcagggaatgttggttcctcctgcttaggcaattcgggctgcaagttttggcaccgcaatcatctaatataaatttcatggaatggtggcatgaagcaaatgaagctattcagggtcccttcagagatggcctaaactctcttattgtgctaggtgcttgggccttatggaatcatagaaaaacacatgcatctttgatggttttgctccggaagttgtcacaatttctggatccgataggtggtaaatttctgcattttaggcattactctgataattcaaagtctccttttctgtatcggtgcagactagaagggactgtaagtgaatatgaggcccttttgctaacagaaagacaacaaaatgaagcagctaatgctgcagttgctgaatctcaagcaagaagtgaagcattggtaagcaagctcgaagatgctgtgaaacaaaatgatctcctccatgaagctgctcaaagatttgaagaagctacaaaaaatttggaatcttcactaacatttgagaagcaacggcatcaggcaaatttgatagaattagatgaagcgcgagaaaagattgaagaacttcaaagagaagttggggacactgatgaaaaatccaccctgcttcagactagtatacaaagccttgaagaaaggttaggagagaaggatgctctattgacaacagaaaggctagaaagtgaagcaactaagaaatcgctcaatgaatctgaggatagaaacaaggacttactaatgaaaattgaagttgctgagaaagacattgctcacttccaagaaactgtccaaagaaatgaagaaaatatggcagcactggaaacttcgttgagatctgaaaggcagcaaaaggatgcaatcatgaaacaactagctgaatctcagggtgaaataggagagctgcaaaggaagcttgaagatgctgatgccagaaatgggcttcttcaagattctttgcagagacttgaacaagatgtctctgccaaagaggtcttattgcttacagaaaagcaggcacacgaggcaacaaggaagactctcactgaagttcaggaaaaaagtgaagaacttctgaagaaaattcatgataatgataaacatattcttcagcttcagtttactatacagaggcttgaggaaaccacagttgcaaatgagaatttgctgttgagggagagggagcagaatgacacaacaacaaaagcgcacaatgaaagtcaagaaaaatatgaagaattactaaagaaatttattgatgttgacaggaaaatcgaccttcttcaaggtaccatagaaaggcttggagaaaatacaacagcaaaggattctctgttgctatcagagagacatgaaaaggctgctattaagaaagcacttactgaggctgaagagaaaaatgaagagttactgatgaaagttgaagatgctaatgaaaaaataggacaccttcaaactaagataaatatgcttgaagataatgtagccgcaaaagatgtttctttagaagctgcaatcaaggaaaatgacgcaaccaggaaatctcttactgaagctcaagagagaaatggtgaattactcaagaaaatcagtgacagtgactacaggatccatttacttcaagacacggtacaaaagcttcaagtagatgcaatatcaaggttgtcgtcttttgtaatggaaaaacaagaaagtgatattgcaaagagagccgttactgaagctcatgaaagaaatgaagatttactaaagagaaatgaggacctcctcaagaggaatgatgatttgattaagaaaattgaagactctagtaaaattgtcactcaacttcaggaagctctacaaagacttgaaggaaaagcatccaacttagaggttgagaaccaagttcttcgtcaacatgcaacttcaactccaccgtctactgctaaatctccagcttcacgctcaaagatctcaaggatccatagaagtccagagaatggccatattttgaatggtgacattaggcaaactgaaatgaagccctcaactggcacatcagcagcaattacctcagtagctaatgttcctgacttgggcgaccaaaaggagtttgaacatggagaaaaactgcaaagaataccaaaacagaaatatcagccttcccataaccagcagccccaagacgatcagcagtggctagtcacttgtatttcacaatatcttggattttctgggagcaaacctgttgcagctctccttatataccaatgtcttctccattggaaatcatttgaagccatgaagacgggtgtctttgatagcattttgcatgctataaactcagccacagaggaccacaatctcaactccacaaaggagaagattttcgtccgagaggatgtttggaaatcaaacttcaaatgctgggcttgcttatctcagtggtcaatcagttggatctgctggattgctccaagttgaagcaaagtatcctgctttgctattcaaacagcagctcgtggatttaattgaaaaggtttatggcatgataagtgacagcgtgaagaaggaactaaaccctttgcttgaattgtgtatacaggatccacaaacttctcagtcaagtattgcaaaaggtaatcttaatggcatgggtcaacagaaccaactcacacattggctgggcatagtgaaaatcctcactagctacttggatgtactaagggaaaatcacgttccctcaattctggtgcataaacttttcactcaaatgttctcacttattgatgttcaattatttaaccgattacttttgcggcgtgagtgctgttcttttagtaacggggaatatatcagagctggactagctgaactaaaacattggtccgacaatgctacaagagagtttgcaggttcagcgtgggaggcattgaggcatattagacaagctgttgatttcctggtgatttctcttaagccaatgaggacattaagagagatacgcactgatgtgtgccctgccctcagtatacaacagctagagcgaatagttagtatgtactgggatgatgtgaatggtacaaacactatttcagcagagtttacatcaagcttgaaatctgccatacgtgatgaatccaatatggccacaaatttctctatactgctagatgatgattccagtatacctttttcacttgatgatattacaaagacattgccggtcattgagctggctgatgacgactttctgccatttgtccatgaaaacccaagctttgcgtttttattgcaaagaggggagtagtcttttttttttgtcaccattgtgacttcacctacctgtggataagtcaggattcctgctaggatgtacagtacgcgtgattctttttgtaccaggtagcaaggcatcaaagattagatgctaggtgagcttataggcttctggtttctattgatttgtttgttggttgtatatttgtattcaggttttccttgccattttttctacttgtagccgttttttgggcttgtatactaggtggtaagggcagaagaccctgccctgtaagcatagttacacaaggtcttgctgtaggtatggaagctgtacatgtgttgtaacggattataaaagggggaaagtagtgcgtagtgatggctttgtggttggtgtgttgcttacctttgatcaatgatcatgtattggttcgtcatatattgtttattgtactgcacaccattccattgtagataacatacacgctcaagacttgttctgggatgtcaaatgagtaatctgttacggtacagaaatgtcatgcttacttccagatcttctgtaatgaacacaaataattatcattttcatttatttttgttcttagatcctgctgcggcttttatagggtaattatcgagag

SEQ ID NO: 77590 - DNA, 4231 bp, Zea Mays
aggtttgttgctttatttcctgacttagagcaatttcttgacccttatgcagagctggtccacatggattcaagattcagggaatgttggttcctcctgcttaggcaattcgggctgcaagttttggcaccgcaatcatctaatataaatttcatggaatggtggcatgaagcaaatgaagctattcagggtcccttcagagatggcctaaactctcttattgtgctaggtgcttgggccttatggaatcatagaaaaacacatgcatctttgatggttttgctccggaagttgtcacaatttctggatccgataggtggtaaatttctgcattttaggcattactctgataattcaaagtctccttttctgtatcggtgcagactagaagggactgtaagtgaatatgaggcccttttgctaacagaaagacaacaaaatgaagcagctaatgctgcagttgctgaatctcaagcaagaagtgaagcattggtaagcaagctcgaagatgctgtgaaacaaaatgatctcctccatgaagctgctcaaagatttgaagaagctacaaaaaatttggaatcttcactaacatttgagaagcaacggcatcaggcaaatttgatagaattagatgaagcgcgagaaaagattgaagaacttcaaagagaagttggggacactgatgaaaaatccaccctgcttcagactagtatacaaagccttgaagaaaggttaggagagaaggatgctctattgacaacagaaaggctagaaagtgaagcaactaagaaatcgctcaatgaatctgaggatagaaacaaggacttactaatgaaaattgaagttgctgagaaagacattgctcacttccaagaaactgtccaaagaaatgaagaaaatatggcagcactggaaacttcgttgagatctgaaaggcagcaaaaggatgcaatcatgaaacaactagctgaatctcagggtgaaataggagagctgcaaaggaagcttgaagatgctgatgccagaaatgggcttcttcaagattctttgcagagactcgaagaaagtacagcagataaagattctttattggctacagaaagacatgaaaacagtgaaaccaagaaggaattagctggttctcagaaaaagattgcggaattgctaactgaagtgcaagataccggtgcatatattgcagaacttgagggctcggttaggagactcgaaggaaacttgacagtaactgaagcttcattgctaactgaaaaggaacagaatgcttccaccttaaaattacttacagaagcacaattgagaatcgaagaattaataaaaaagcttgaaggttcaaatagaaaatctgatagtcttctggatacaataacaagacttgaacaagatgtctctgccaaagaggtcttattgcttacagaaaagcaggcacacgaggcaacaaggaagactctcactgaagttcaggaaaaaagtgaagaacttctgaagaaaattcatgataatgataaacatattcttcagcttcagtttactatacagaggcttgaggaaaccacagttgcaaatgagaatttgctgttgagggagagggagcagaatgacacaacaacaaaagcgcacaatgaaagtcaagaaaaatatgaagaattactaaagaaatttattgatgttgacaggaaaatcgaccttcttcaaggtaccatagaaaggcttggagaaaatacaacagcaaaggattctctgttgctatcagagagacatgaaaaggctgctattaagaaagcacttactgaggctgaagagaaaaatgaagagttactgatgaaagttgaagatgctaatgaaaaaataggacaccttcaaactaagataaatatgcttgaagataatgtagccgcaaaagatgtttctttagaagctgcaatcaaggaaaatgacgcaaccaggaaatctcttactgaagctcaagagagaaatggtgaattactcaagaaaatcagtgacagtgactacaggatccatttacttcaagacacggtacaaaagcttcaagtagatgcaatatcaaggttgtcgtcttttgtaatggaaaaacaagaaagtgatattgcaaagagagccgttactgaagctcatgaaagaaatgaagatttactaaagagaaatgaggacctcctcaagaggaatgatgatttgattaagaaaattgaagactctagtaaaattgtcactcaacttcaggaagctctacaaagacttgaaggaaaagcatccaacttagaggttgagaaccaagttcttcgtcaacatgcaacttcaactccaccgtctactgctaaatctccagcttcacgctcaaagatctcaaggatccatagaagtccagagaatggccatattttgaatggtgacattaggcaaactgaaatgaagccctcaactggcacatcagcagcaattacctcagtagctaatgttcctgacttgggcgaccaaaaggagtttgaacatggagaaaaactgcaaagaataccaaaacagaaatatcaggttcaaaatgacatgagaacattggcgtattggttgtccaacttatctacattaacagttttccttcaacggtcattcaaaactactaggaccacaatctcaactccacaaaggagaagattttcgtccgagaggatgtttggaaatcaaacttcaaatgctgggcttgcttatctcagtggtcaatcagttggatctgctggattgctccaagttgaagcaaagtatcctgctttgctattcaaacagcagctcgtggatttaattgaaaaggtttatggcatgataagtgacagcgtgaagaaggaactaaaccctttgcttgaattgtgtatacaggatccacaaacttctcagtcaagtattgcaaaaggtaatcttaatggcatgggtcaacagaaccaactcacacattggctgggcatagtgaaaatcctcactagctacttggatgtactaagggaaaatcacgttccctcaattctggtgcataaacttttcactcaaatgttctcacttattgatgttcaattatttaaccgattacttttgcggcgtgagtgctgttcttttagtaacggggaatatatcagagctggactagctgaactaaaacattggtccgacaatgctacaagagagtttgcaggttcagcgtgggaggcattgaggcatattagacaagctgttgatttcctggtgatttctcttaagccaatgaggacattaagagagatacgcactgatgtgtgccctgccctcagtatacaacagctagagcgaatagttagtatgtactgggatgatgtgaatggtacaaacactatttcagcagagtttacatcaagcttgaaatctgccatacgtgatgaatccaatatggccacaaatttctctatactgctagatgatgattccagtatacctttttcacttgatgatattacaaagacattgccggtcattgagctggctgatgacgactttctgccatttgtccatgaaaacccaagctttgcgtttttattgcaaagaggggagtagtcttttttttttgtcaccattgtgacttcacctacctgtggataagtcaggattcctgctaggatgtacagtacgcgtgattctttttgtaccaggtagcaaggcatcaaagattagatgctaggtgagcttataggcttctggtttctattgatttgtttgttggttgtatatttgtattcaggttttccttgccattttttctacttgtagccgttttttgggcttgtatactaggtggtaagggcagaagaccctgccctgtaagcatagttacacaaggtcttgctgtaggtatggaagctgtacatgtgttgtaacggattataaaagggggaaagtagtgcgtagtgatggctttgtggttggtgtgttgcttacctttgatcaatgatcatgtattggttcgtcatatattgtttattgtactgcacaccattccattgtagataacatacacgctcaagacttgttctgggatgtcaaatgagtaatctgttacggtacagaaatgtcatgcttacttccagatcttctgtaatgaacacaaataattatcattttcatttatttttgttcttagatcctgctgcggcttttatagggtaattatcgagag

SEQ ID NO: 77591 - DNA, 4419 bp, Zea Mays
aggtttgttgctttatttcctgacttagagcaatttcttgacccttatgcagagctggtccacatggattcaagattcagggaatgttggttcctcctgcttaggcaattcgggctgcaagttttggcaccgcaatcatctaatataaatttcatggaatggtggcatgaagcaaatgaagctattcagggtcccttcagagatggcctaaactctcttattgtgctaggtgcttgggccttatggaatcatagaaaaacacatgcatctttgatggttttgctccggaagttgtcacaatttctggatccgataggtggtaaatttctgcattttaggcattactctgataattcaaagtctccttttctgtatcggtgcagactagaagggactgtaagtgaatatgaggcccttttgctaacagaaagacaacaaaatgaagcagctaatgctgcagttgctgaatctcaagcaagaagtgaagcattggtaagcaagctcgaagatgctgtgaaacaaaatgatctcctccatgaagctgctcaaagatttgaagaagctacaaaaaatttggaatcttcactaacatttgagaagcaacggcatcaggcaaatttgatagaattagatgaagcgcgagaaaagattgaagaacttcaaagagaagttggggacactgatgaaaaatccaccctgcttcagactagtatacaaagccttgaagaaaggttaggagagaaggatgctctattgacaacagaaaggctagaaagtgaagcaactaagaaatcgctcaatgaatctgaggatagaaacaaggacttactaatgaaaattgaagttgctgagaaagacattgctcacttccaagaaactgtccaaagaaatgaagaaaatatggcagcactggaaacttcgttgagatctgaaaggcagcaaaaggatgcaatcatgaaacaactagctgaatctcagggtgaaataggagagctgcaaaggaagcttgaagatgctgatgccagaaatgggcttcttcaagattctttgcagagactcgaagaaagtacagcagataaagattctttattggctacagaaagacatgaaaacagtgaaaccaagaaggaattagctggttctcagaaaaagattgcggaattgctaactgaagtgcaagataccggtgcatatattgcagaacttgagggctcggttaggagactcgaaggaaacttgacagtaactgaagcttcattgctaactgaaaaggaacagaatgcttccaccttaaaattacttacagaagcacaattgagaatcgaagaattaataaaaaagcttgaaggttcaaatagaaaatctgatagtcttctggatacaataacaagacttgaacaagatgtctctgccaaagaggtcttattgcttacagaaaagcaggcacacgaggcaacaaggaagactctcactgaagttcaggaaaaaagtgaagaacttctgaagaaaattcatgataatgataaacatattcttcagcttcagtttactatacagaggcttgaggaaaccacagttgcaaatgagaatttgctgttgagggagagggagcagaatgacacaacaacaaaagcgcacaatgaaagtcaagaaaaatatgaagaattactaaagaaatttattgatgttgacaggaaaatcgaccttcttcaaggtaccatagaaaggcttggagaaaatacaacagcaaaggattctctgttgctatcagagagacatgaaaaggctgctattaagaaagcacttactgaggctgaagagaaaaatgaagagttactgatgaaagttgaagatgctaatgaaaaaataggacaccttcaaactaagataaatatgcttgaagataatgtagccgcaaaagatgtttctttagaagctgcaatcaaggaaaatgacgcaaccaggaaatctcttactgaagctcaagagagaaatggtgaattactcaagaaaatcagtgacagtgactacaggatccatttacttcaagacacggtacaaaagcttcaagtagatgcaatatcaaggttgtcgtcttttgtaatggaaaaacaagaaagtgatattgcaaagagagccgttactgaagctcatgaaagaaatgaagatttactaaagagaaatgaggacctcctcaagaggaatgatgatttgattaagaaaattgaagactctagtaaaattgtcactcaacttcaggaagctctacaaagacttgaaggaaaagcatccaacttagaggttgagaaccaagttcttcgtcaacatgcaacttcaactccaccgtctactgctaaatctccagcttcacgctcaaagatctcaaggatccatagaagtccagagaatggccatattttgaatggtgacattaggcaaactgaaatgaagccctcaactggcacatcagcagcaattacctcagtagctaatgttcctgacttgggcgaccaaaaggagtttgaacatggagaaaaactgcaaagaataccaaaacagaaatatcagccttcccataaccagcagccccaagacgatcagcagtggctagtcacttgtatttcacaatatcttggattttctgggagcaaacctgttgcagctctccttatataccaatgtcttctccattggaaatcatttgaagccatgaagacgggtgtctttgatagcattttgcatgctataaactcagccacagaggttcaaaatgacatgagaacattggcgtattggttgtccaacttatctacattaacagttttccttcaacggtcattcaaaactactaggaccacaatctcaactccacaaaggagaagattttcgtccgagaggatgtttggaaatcaaacttcaaatgctgggcttgcttatctcagtggtcaatcagttggatctgctggattgctccaagttgaagcaaagtatcctgctttgctattcaaacagcagctcgtggatttaattgaaaaggtttatggcatgataagtgacagcgtgaagaaggaactaaaccctttgcttgaattgtgtatacaggatccacaaacttctcagtcaagtattgcaaaaggtaatcttaatggcatgggtcaacagaaccaactcacacattggctgggcatagtgaaaatcctcactagctacttggatgtactaagggaaaatcacgttccctcaattctggtgcataaacttttcactcaaatgttctcacttattgatgttcaattatttaaccgattacttttgcggcgtgagtgctgttcttttagtaacggggaatatatcagagctggactagctgaactaaaacattggtccgacaatgctacaagagaggttcagcgtgggaggcattgaggcatattagacaagctgttgatttcctggtgatttctcttaagccaatgaggacattaagagagatacgcactgatgtgtgccctgccctcagtatacaacagctagagcgaatagttagtatgtactgggatgatgtgaatggtacaaacactatttcagcagagtttacatcaagcttgaaatctgccatacgtgatgaatccaatatggccacaaatttctctatactgctagatgatgattccagtatacctttttcacttgatgatattacaaagacattgccggtcattgagctggctgatgacgactttctgccatttgtccatgaaaacccaagctttgcgtttttattgcaaagaggggagtagtcttttttttttgtcaccattgtgacttcacctacctgtggataagtcaggattcctgctaggatgtacagtacgcgtgattctttttgtaccaggtagcaaggcatcaaagattagatgctaggtgagcttataggcttctggtttctattgatttgtttgttggttgtatatttgtattcaggttttccttgccattttttctacttgtagccgttttttgggcttgtatactaggtggtaagggcagaagaccctgccctgtaagcatagttacacaaggtcttgctgtaggtatggaagctgtacatgtgttgtaacggattataaaagggggaaagtagtgcgtagtgatggctttgtggttggtgtgttgcttacctttgatcaatgatcatgtattggttcgtcatatattgtttattgtactgcacaccattccattgtagataacatacacgctcaagacttgttctgggatgtcaaatgagtaatctgttacggtacagaaatgtcatgcttacttccagatcttctgtaatgaacacaaataattatcattttcatttatttttgttcttagatcctgctgcggcttttatagggtaattatcgagag

SEQ ID NO: 77592 - DNA, 4408 bp, Zea Mays
aggtttgttgctttatttcctgacttagagcaatttcttgacccttatgcagagctggtccacatggattcaagattcagggaatgttggttcctcctgcttaggcaattcgggctgcaagttttggcaccgcaatcatctaatataaatttcatggaatggtggcatgaagcaaatgaagctattcagggtcccttcagagatggcctaaactctcttattgtgctaggtgcttgggccttatggaatcatagaaaaacacatgcatctttgatggttttgctccggaagttgtcacaatttctggatccgataggtggtaaatttctgcattttaggcattactctgataattcaaagtctccttttctgtatcggtgcagactagaagggactgtaagtgaatatgaggcccttttgctaacagaaagacaacaaaatgaagcagctaatgctgcagttgctgaatctcaagcaagaagtgaagcattggtaagcaagctcgaagatgctgtgaaacaaaatgatctcctccatgaagctgctcaaagatttgaagaagctacaaaaaatttggaatcttcactaacatttgagaagcaacggcatcaggcaaatttgatagaattagatgaagcgcgagaaaagattgaagaacttcaaagagaagttggggacactgatgaaaaatccaccctgcttcagactagtatacaaagccttgaagaaaggttaggagagaaggatgctctattgacaacagaaaggctagaaagtgaagcaactaagaaatcgctcaatgaatctgaggatagaaacaaggacttactaatgaaaattgaagttgctgagaaagacattgctcacttccaagaaactgtccaaagaaatgaagaaaatatggcagcactggaaacttcgttgagatctgaaaggcagcaaaaggatgcaatcatgaaacaactagctgaatctcagggtgaaataggagagctgcaaaggaagcttgaagatgctgatgccagaaatgggcttcttcaagattctttgcagagactcgaagaaagtacagcagataaagattctttattggctacagaaagacatgaaaacagtgaaaccaagaaggaattagctggttctcagaaaaagattgcggaattgctaactgaagtgcaagataccggtgcatatattgcagaacttgagggctcggttaggagactcgaaggaaacttgacagtaactgaagcttcattgctaactgaaaaggaacagaatgcttccaccttaaaattacttacagaagcacaattgagaatcgaagaattaataaaaaagcttgaaggttcaaatagaaaatctgatagtcttctggatacaataacaagacttgaacaagatgtctctgccaaagaggtcttattgcttacagaaaagcaggcacacgaggcaacaaggaagactctcactgaagttcaggaaaaaagtgaagaacttctgaagaaaattcatgataatgataaacatattcttcagcttcagtttactatacagaggcttgaggaaaccacagttgcaaatgagaatttgctgttgagggagagggagcagaatgacacaacaacaaaagcgcacaatgaaagtcaagaaaaatatgaagaattactaaagaaatttattgatgttgacaggaaaatcgaccttcttcaaggtaccatagaaaggcttggagaaaatacaacagcaaaggattctctgttgctatcagagagacatgaaaaggctgctattaagaaagcacttactgaggctgaagagaaaaatgaagagttactgatgaaagttgaagatgctaatgaaaaaataggacaccttcaaactaagataaatatgcttgaagataatgtagccgcaaaagatgtttctttagaagctgcaatcaaggaaaatgacgcaaccaggaaatctcttactgaagctcaagagagaaatggtgaattactcaagaaaatcagtgacagtgactacaggatccatttacttcaagacacggtacaaaagcttcaagtagatgcaatatcaaggttgtcgtcttttgtaatggaaaaacaagaaagtgatattgcaaagagagccgttactgaagctcatgaaagaaatgaagatttactaaagagaaatgaggacctcctcaagaggaatgatgatttgattaagaaaattgaagactctagtaaaattgtcactcaacttcaggaagctctacaaagacttgaaggaaaagcatccaacttagaggttgagaaccaagttcttcgtcaacatgcaacttcaactccaccgtctactgctaaatctccagcttcacgctcaaagatctcaaggatccatagaagtccagagaatggccatattttgaatggtgacattaggcaaactgaaatgaagccctcaactggcacatcagcagcaattacctcagtagctaatgttcctgacttgggcgaccaaaaggagtttgaacatggagaaaaactgcaaagaataccaaaacagaaatatcagccccaagacgatcagcagtggctagtcacttgtatttcacaatatcttggattttctgggagcaaacctgttgcagctctccttatataccaatgtcttctccattggaaatcatttgaagccatgaagacgggtgtctttgatagcattttgcatgctataaactcagccacagaggttcaaaatgacatgagaacattggcgtattggttgtccaacttatctacattaacagttttccttcaacggtcattcaaaactactaggaccacaatctcaactccacaaaggagaagattttcgtccgagaggatgtttggaaatcaaacttcaaatgctgggcttgcttatctcagtggtcaatcagttggatctgctggattgctccaagttgaagcaaagtatcctgctttgctattcaaacagcagctcgtggatttaattgaaaaggtttatggcatgataagtgacagcgtgaagaaggaactaaaccctttgcttgaattgtgtatacaggatccacaaacttctcagtcaagtattgcaaaaggtaatcttaatggcatgggtcaacagaaccaactcacacattggctgggcatagtgaaaatcctcactagctacttggatgtactaagggaaaatcacgttccctcaattctggtgcataaacttttcactcaaatgttctcacttattgatgttcaattatttaaccgattacttttgcggcgtgagtgctgttcttttagtaacggggaatatatcagagctggactagctgaactaaaacattggtccgacaatgctacaagagagtttgcaggttcagcgtgggaggcattgaggcatattagacaagctgttgatttcctggtgatttctcttaagccaatgaggacattaagagagatacgcactgatgtgtgccctgccctcagtatacaacagctagagcgaatagttagtatgtactgggatgatgtgaatggtacaaacactatttcagcagagtttacatcaagcttgaaatctgccatacgtgatgaatccaatatggccacaaatttctctatactgctagatgatgattccagtatacctttttcacttgatgatattacaaagacattgccggtcattgagctggctgatgacgactttctgccatttgtccatgaaaacccaagctttgcgtttttattgcaaagaggggagtagtcttttttttttgtcaccattgtgacttcacctacctgtggataagtcaggattcctgctaggatgtacagtacgcgtgattctttttgtaccaggtagcaaggcatcaaagattagatgctaggtgagcttataggcttctggtttctattgatttgtttgttggttgtatatttgtattcaggttttccttgccattttttctacttgtagccgttttttgggcttgtatactaggtggtaagggcagaagaccctgccctgtaagcatagttacacaaggtcttgctgtaggtatggaagctgtacatgtgttgtaacggattataaaagggggaaagtagtgcgtagtgatggctttgtggttggtgtgttgcttacctttgatcaatgatcatgtattggttcgtcatatattgtttattgtactgcacaccattccattgtagataacatacacgctcaagacttgttctgggatgtcaaatgagtaatctgttacggtacagaaatgtcatgcttacttccagatcttctgtaatgaacacaaataattatcattttcatttatttttgttcttagatcctgctgcggcttttatagggtaattatcgagag

SEQ ID NO: 77593 - DNA, 3895 bp, Zea Mays
aggtttgttgctttatttcctgacttagagcaatttcttgacccttatgcagagctggtccacatggattcaagattcagggaatgttggttcctcctgcttaggcaattcgggctgcaagttttggcaccgcaatcatctaatataaatttcatggaatggtggcatgaagcaaatgaagctattcagggtcccttcagagatggcctaaactctcttattgtgctaggtgcttgggccttatggaatcatagaaaaacacatgcatctttgatggttttgctccggaagttgtcacaatttctggatccgataggtggtaaatttctgcattttaggcattactctgataattcaaagtctccttttctgtatcggtgcagactagaagggactgtaagtgaatatgaggcccttttgctaacagaaagacaacaaaatgaagcagctaatgctgcagttgctgaatctcaagcaagaagtgaagcattggtaagcaagctcgaagatgctgtgaaacaaaatgatctcctccatgaagctgctcaaagatttgaagaagctacaaaaaatttggaatcttcactaacatttgagaagcaacggcatcaggcaaatttgatagaattagatgaagcgcgagaaaagattgaagaacttcaaagagaagttggggacactgatgaaaaatccaccctgcttcagactagtatacaaagccttgaagaaaggttaggagagaaggatgctctattgacaacagaaaggctagaaagtgaagcaactaagaaatcgctcaatgaatctgaggatagaaacaaggacttactaatgaaaattgaagttgctgagaaagacattgctcacttccaagaaactgtccaaagaaatgaagaaaatatggcagcactggaaacttcgttgagatctgaaaggcagcaaaaggatgcaatcatgaaacaactagctgaatctcagggtgaaataggagagctgcaaaggaagcttgaagatgctgatgccagaaatgggcttcttcaagattctttgcagagacttgaacaagatgtctctgccaaagaggtcttattgcttacagaaaagcaggcacacgaggcaacaaggaagactctcactgaagttcaggaaaaaagtgaagaacttctgaagaaaattcatgataatgataaacatattcttcagcttcagtttactatacagaggcttgaggaaaccacagttgcaaatgagaatttgctgttgagggagagggagcagaatgacacaacaacaaaagcgcacaatgaaagtcaagaaaaatatgaagaattactaaagaaatttattgatgttgacaggaaaatcgaccttcttcaaggtaccatagaaaggcttggagaaaatacaacagcaaaggattctctgttgctatcagagagacatgaaaaggctgctattaagaaagcacttactgaggctgaagagaaaaatgaagagttactgatgaaagttgaagatgctaatgaaaaaataggacaccttcaaactaagataaatatgcttgaagataatgtagccgcaaaagatgtttctttagaagctgcaatcaaggaaaatgacgcaaccaggaaatctcttactgaagctcaagagagaaatggtgaattactcaagaaaatcagtgacagtgactacaggatccatttacttcaagacacggtacaaaagcttcaagtagatgcaatatcaaggttgtcgtcttttgtaatggaaaaacaagaaagtgatattgcaaagagagccgttactgaagctcatgaaagaaatgaagatttactaaagagaaatgaggacctcctcaagaggaatgatgatttgattaagaaaattgaagactctagtaaaattgtcactcaacttcaggaagctctacaaagacttgaaggaaaagcatccaacttagaggttgagaaccaagttcttcgtcaacatgcaacttcaactccaccgtctactgctaaatctccagcttcacgctcaaagatctcaaggatccatagaagtccagagaatggccatattttgaatggtgacattaggcaaactgaaatgaagccctcaactggcacatcagcagcaattacctcagtagctaatgttcctgacttgggcgaccaaaaggagtttgaacatggagaaaaactgcaaagaataccaaaacagaaatatcaggttcaaaatgacatgagaacattggcgtattggttgtccaacttatctacattaacagttttccttcaacggtcattcaaaactactaggaccacaatctcaactccacaaaggagaagattttcgtccgagaggatgtttggaaatcaaacttcaaatgctgggcttgcttatctcagtggtcaatcagttggatctgctggattgctccaagttgaagcaaagtatcctgctttgctattcaaacagcagctcgtggatttaattgaaaaggtttatggcatgataagtgacagcgtgaagaaggaactaaaccctttgcttgaattgtgtatacaggatccacaaacttctcagtcaagtattgcaaaaggtaatcttaatggcatgggtcaacagaaccaactcacacattggctgggcatagtgaaaatcctcactagctacttggatgtactaagggaaaatcacgttccctcaattctggtgcataaacttttcactcaaatgttctcacttattgatgttcaattatttaaccgattacttttgcggcgtgagtgctgttcttttagtaacggggaatatatcagagctggactagctgaactaaaacattggtccgacaatgctacaagagagtttgcaggttcagcgtgggaggcattgaggcatattagacaagctgttgatttcctggtgatttctcttaagccaatgaggacattaagagagatacgcactgatgtgtgccctgccctcagtatacaacagctagagcgaatagttagtatgtactgggatgatgtgaatggtacaaacactatttcagcagagtttacatcaagcttgaaatctgccatacgtgatgaatccaatatggccacaaatttctctatactgctagatgatgattccagtatacctttttcacttgatgatattacaaagacattgccggtcattgagctggctgatgacgactttctgccatttgtccatgaaaacccaagctttgcgtttttattgcaaagaggggagtagtcttttttttttgtcaccattgtgacttcacctacctgtggataagtcaggattcctgctaggatgtacagtacgcgtgattctttttgtaccaggtagcaaggcatcaaagattagatgctaggtgagcttataggcttctggtttctattgatttgtttgttggttgtatatttgtattcaggttttccttgccattttttctacttgtagccgttttttgggcttgtatactaggtggtaagggcagaagaccctgccctgtaagcatagttacacaaggtcttgctgtaggtatggaagctgtacatgtgttgtaacggattataaaagggggaaagtagtgcgtagtgatggctttgtggttggtgtgttgcttacctttgatcaatgatcatgtattggttcgtcatatattgtttattgtactgcacaccattccattgtagataacatacacgctcaagacttgttctgggatgtcaaatgagtaatctgttacggtacagaaatgtcatgcttacttccagatcttctgtaatgaacacaaataattatcattttcatttatttttgttcttagatcctgctgcggcttttatagggtaattatcgagag

SEQ ID NO: 77594 - DNA, 4411 bp, Zea Mays
aggtttgttgctttatttcctgacttagagcaatttcttgacccttatgcagagctggtccacatggattcaagattcagggaatgttggttcctcctgcttaggcaattcgggctgcaagttttggcaccgcaatcatctaatataaatttcatggaatggtggcatgaagcaaatgaagctattcagggtcccttcagagatggcctaaactctcttattgtgctaggtgcttgggccttatggaatcatagaaaaacacatgcatctttgatggttttgctccggaagttgtcacaatttctggatccgataggtggtaaatttctgcattttaggcattactctgataattcaaagtctccttttctgtatcggtgcagactagaagggactgtaagtgaatatgaggcccttttgctaacagaaagacaacaaaatgaagcagctaatgctgcagttgctgaatctcaagcaagaagtgaagcattggtaagcaagctcgaagatgctgtgaaacaaaatgatctcctccatgaagctgctcaaagatttgaagaagctacaaaaaatttggaatcttcactaacatttgagaagcaacggcatcaggcaaatttgatagaattagatgaagcgcgagaaaagattgaagaacttcaaagagaagttggggacactgatgaaaaatccaccctgcttcagactagtatacaaagccttgaagaaaggttaggagagaaggatgctctattgacaacagaaaggctagaaagtgaagcaactaagaaatcgctcaatgaatctgaggatagaaacaaggacttactaatgaaaattgaagttgctgagaaagacattgctcacttccaagaaactgtccaaagaaatgaagaaaatatggcagcactggaaacttcgttgagatctgaaaggcagcaaaaggatgcaatcatgaaacaactagctgaatctcagggtgaaataggagagctgcaaaggaagcttgaagatgctgatgccagaaatgggcttcttcaagattctttgcagagactcgaagaaagtacagcagataaagattctttattggctacagaaagacatgaaaacagtgaaaccaagaaggaattagctggttctcagaaaaagattgcggaattgctaactgaagtgcaagataccggtgcatatattgcagaacttgagggctcggttaggagactcgaaggaaacttgacagtaactgaagcttcattgctaactgaaaaggaacagaatgcttccaccttaaaattacttacagaagcacaattgagaatcgaagaattaataaaaaagcttgaaggttcaaatagaaaatctgatagtcttctggatacaataacaagacttgaacaagatgtctctgccaaagaggtcttattgcttacagaaaagcaggcacacgaggcaacaaggaagactctcactgaagttcaggaaaaaagtgaagaacttctgaagaaaattcatgataatgataaacatattcttcagcttcagtttactatacagaggcttgaggaaaccacagttgcaaatgagaatttgctgttgagggagagggagcagaatgacacaacaacaaaagcgcacaatgaaagtcaagaaaaatatgaagaattactaaagaaatttattgatgttgacaggaaaatcgaccttcttcaaggtaccatagaaaggcttggagaaaatacaacagcaaaggattctctgttgctatcagagagacatgaaaaggctgctattaagaaagcacttactgaggctgaagagaaaaatgaagagttactgatgaaagttgaagatgctaatgaaaaaataggacaccttcaaactaagataaatatgcttgaagataatgtagccgcaaaagatgtttctttagaagctgcaatcaaggaaaatgacgcaaccaggaaatctcttactgaagctcaagagagaaatggtgaattactcaagaaaatcagtgacagtgactacaggatccatttacttcaagacacggtacaaaagcttcaagtagatgcaatatcaaggttgtcgtcttttgtaatggaaaaacaagaaagtgatattgcaaagagagccgttactgaagctcatgaaagaaatgaagatttactaaagagaaatgaggacctcctcaagaggaatgatgatttgattaagaaaattgaagactctagtaaaattgtcactcaacttcaggaagctctacaaagacttgaaggaaaagcatccaacttagaggttgagaaccaagttcttcgtcaacatgcaacttcaactccaccgtctactgctaaatctccagcttcacgctcaaagatctcaaggatccatagaagtccagagaatggccatattttgaatggtgacattaggcaaactgaaatgaagccctcaactggcacatcagcagcaattacctcagtagctaatgttcctgacttgggcgaccaaaaggagtttgaacatggagaaaaactgcaaagaataccaaaacagaaatatcagcagccccaagacgatcagcagtggctagtcacttgtatttcacaatatcttggattttctgggagcaaacctgttgcagctctccttatataccaatgtcttctccattggaaatcatttgaagccatgaagacgggtgtctttgatagcattttgcatgctataaactcagccacagaggttcaaaatgacatgagaacattggcgtattggttgtccaacttatctacattaacagttttccttcaacggtcattcaaaactactaggaccacaatctcaactccacaaaggagaagattttcgtccgagaggatgtttggaaatcaaacttcaaatgctgggcttgcttatctcagtggtcaatcagttggatctgctggattgctccaagttgaagcaaagtatcctgctttgctattcaaacagcagctcgtggatttaattgaaaaggtttatggcatgataagtgacagcgtgaagaaggaactaaaccctttgcttgaattgtgtatacaggatccacaaacttctcagtcaagtattgcaaaaggtaatcttaatggcatgggtcaacagaaccaactcacacattggctgggcatagtgaaaatcctcactagctacttggatgtactaagggaaaatcacgttccctcaattctggtgcataaacttttcactcaaatgttctcacttattgatgttcaattatttaaccgattacttttgcggcgtgagtgctgttcttttagtaacggggaatatatcagagctggactagctgaactaaaacattggtccgacaatgctacaagagagtttgcaggttcagcgtgggaggcattgaggcatattagacaagctgttgatttcctggtgatttctcttaagccaatgaggacattaagagagatacgcactgatgtgtgccctgccctcagtatacaacagctagagcgaatagttagtatgtactgggatgatgtgaatggtacaaacactatttcagcagagtttacatcaagcttgaaatctgccatacgtgatgaatccaatatggccacaaatttctctatactgctagatgatgattccagtatacctttttcacttgatgatattacaaagacattgccggtcattgagctggctgatgacgactttctgccatttgtccatgaaaacccaagctttgcgtttttattgcaaagaggggagtagtcttttttttttgtcaccattgtgacttcacctacctgtggataagtcaggattcctgctaggatgtacagtacgcgtgattctttttgtaccaggtagcaaggcatcaaagattagatgctaggtgagcttataggcttctggtttctattgatttgtttgttggttgtatatttgtattcaggttttccttgccattttttctacttgtagccgttttttgggcttgtatactaggtggtaagggcagaagaccctgccctgtaagcatagttacacaaggtcttgctgtaggtatggaagctgtacatgtgttgtaacggattataaaagggggaaagtagtgcgtagtgatggctttgtggttggtgtgttgcttacctttgatcaatgatcatgtattggttcgtcatatattgtttattgtactgcacaccattccattgtagataacatacacgctcaagacttgttctgggatgtcaaatgagtaatctgttacggtacagaaatgtcatgcttacttccagatcttctgtaatgaacacaaataattatcattttcatttatttttgttcttagatcctgctgcggcttttatagggtaattatcgagag

SEQ ID NO: 77595 - DNA, 4258 bp, Zea Mays
aggtttgttgctttatttcctgacttagagcaatttcttgacccttatgcagagctggtccacatggattcaagattcagggaatgttggttcctcctgcttaggcaattcgggctgcaagttttggcaccgcaatcatctaatataaatttcatggaatggtggcatgaagcaaatgaagctattcagggtcccttcagagatggcctaaactctcttattgtgctaggtgcttgggccttatggaatcatagaaaaacacatgcatctttgatggttttgctccggaagttgtcacaatttctggatccgataggtggtaaatttctgcattttaggcattactctgataattcaaagtctccttttctgtatcggtgcagactagaagggactgtaagtgaatatgaggcccttttgctaacagaaagacaacaaaatgaagcagctaatgctgcagttgctgaatctcaagcaagaagtgaagcattggtaagcaagctcgaagatgctgtgaaacaaaatgatctcctccatgaagctgctcaaagatttgaagaagctacaaaaaatttggaatcttcactaacatttgagaagcaacggcatcaggcaaatttgatagaattagatgaagcgcgagaaaagattgaagaacttcaaagagaagttggggacactgatgaaaaatccaccctgcttcagactagtatacaaagccttgaagaaaggttaggagagaaggatgctctattgacaacagaaaggctagaaagtgaagcaactaagaaatcgctcaatgaatctgaggatagaaacaaggacttactaatgaaaattgaagttgctgagaaagacattgctcacttccaagaaactgtccaaagaaatgaagaaaatatggcagcactggaaacttcgttgagatctgaaaggcagcaaaaggatgcaatcatgaaacaactagctgaatctcagggtgaaataggagagctgcaaaggaagcttgaagatgctgatgccagaaatgggcttcttcaagattctttgcagagactcgaagaaagtacagcagataaagattctttattggctacagaaagacatgaaaacagtgaaaccaagaaggaattagctggttctcagaaaaagattgcggaattgctaactgaagtgcaagataccggtgcatatattgcagaacttgagggctcggttaggagacttgaacaagatgtctctgccaaagaggtcttattgcttacagaaaagcaggcacacgaggcaacaaggaagactctcactgaagttcaggaaaaaagtgaagaacttctgaagaaaattcatgataatgataaacatattcttcagcttcagtttactatacagaggcttgaggaaaccacagttgcaaatgagaatttgctgttgagggagagggagcagaatgacacaacaacaaaagcgcacaatgaaagtcaagaaaaatatgaagaattactaaagaaatttattgatgttgacaggaaaatcgaccttcttcaaggtaccatagaaaggcttggagaaaatacaacagcaaaggattctctgttgctatcagagagacatgaaaaggctgctattaagaaagcacttactgaggctgaagagaaaaatgaagagttactgatgaaagttgaagatgctaatgaaaaaataggacaccttcaaactaagataaatatgcttgaagataatgtagccgcaaaagatgtttctttagaagctgcaatcaaggaaaatgacgcaaccaggaaatctcttactgaagctcaagagagaaatggtgaattactcaagaaaatcagtgacagtgactacaggatccatttacttcaagacacggtacaaaagcttcaagtagatgcaatatcaaggttgtcgtcttttgtaatggaaaaacaagaaagtgatattgcaaagagagccgttactgaagctcatgaaagaaatgaagatttactaaagagaaatgaggacctcctcaagaggaatgatgatttgattaagaaaattgaagactctagtaaaattgtcactcaacttcaggaagctctacaaagacttgaaggaaaagcatccaacttagaggttgagaaccaagttcttcgtcaacatgcaacttcaactccaccgtctactgctaaatctccagcttcacgctcaaagatctcaaggatccatagaagtccagagaatggccatattttgaatggtgacattaggcaaactgaaatgaagccctcaactggcacatcagcagcaattacctcagtagctaatgttcctgacttgggcgaccaaaaggagtttgaacatggagaaaaactgcaaagaataccaaaacagaaatatcagccttcccataaccagcagccccaagacgatcagcagtggctagtcacttgtatttcacaatatcttggattttctgggagcaaacctgttgcagctctccttatataccaatgtcttctccattggaaatcatttgaagccatgaagacgggtgtctttgatagcattttgcatgctataaactcagccacagaggttcaaaatgacatgagaacattggcgtattggttgtccaacttatctacattaacagttttccttcaacggtcattcaaaactactaggaccacaatctcaactccacaaaggagaagattttcgtccgagaggatgtttggaaatcaaacttcaaatgctgggcttgcttatctcagtggtcaatcagttggatctgctggattgctccaagttgaagcaaagtatcctgctttgctattcaaacagcagctcgtggatttaattgaaaaggtttatggcatgataagtgacagcgtgaagaaggaactaaaccctttgcttgaattgtgtatacaggatccacaaacttctcagtcaagtattgcaaaaggtaatcttaatggcatgggtcaacagaaccaactcacacattggctgggcatagtgaaaatcctcactagctacttggatgtactaagggaaaatcacgttccctcaattctggtgcataaacttttcactcaaatgttctcacttattgatgttcaattatttaaccgattacttttgcggcgtgagtgctgttcttttagtaacggggaatatatcagagctggactagctgaactaaaacattggtccgacaatgctacaagagagtttgcaggttcagcgtgggaggcattgaggcatattagacaagctgttgatttcctggtgatttctcttaagccaatgaggacattaagagagatacgcactgatgtgtgccctgccctcagtatacaacagctagagcgaatagttagtatgtactgggatgatgtgaatggtacaaacactatttcagcagagtttacatcaagcttgaaatctgccatacgtgatgaatccaatatggccacaaatttctctatactgctagatgatgattccagtatacctttttcacttgatgatattacaaagacattgccggtcattgagctggctgatgacgactttctgccatttgtccatgaaaacccaagctttgcgtttttattgcaaagaggggagtagtcttttttttttgtcaccattgtgacttcacctacctgtggataagtcaggattcctgctaggatgtacagtacgcgtgattctttttgtaccaggtagcaaggcatcaaagattagatgctaggtgagcttataggcttctggtttctattgatttgtttgttggttgtatatttgtattcaggttttccttgccattttttctacttgtagccgttttttgggcttgtatactaggtggtaagggcagaagaccctgccctgtaagcatagttacacaaggtcttgctgtaggtatggaagctgtacatgtgttgtaacggattataaaagggggaaagtagtgcgtagtgatggctttgtggttggtgtgttgcttacctttgatcaatgatcatgtattggttcgtcatatattgtttattgtactgcacaccattccattgtagataacatacacgctcaagacttgttctgggatgtcaaatgagtaatctgttacggtacagaaatgtcatgcttacttccagatcttctgtaatgaacacaaataattatcattttcatttatttttgttcttagatcctgctgcggcttttatagggtaattatcgagag

SEQ ID NO: 77596 - DNA, 4090 bp, Zea Mays
aggtttgttgctttatttcctgacttagagcaatttcttgacccttatgcagagctggtccacatggattcaagattcagggaatgttggttcctcctgcttaggcaattcgggctgcaagttttggcaccgcaatcatctaatataaatttcatggaatggtggcatgaagcaaatgaagctattcagggtcccttcagagatggcctaaactctcttattgtgctaggtgcttgggccttatggaatcatagaaaaacacatgcatctttgatggttttgctccggaagttgtcacaatttctggatccgataggtggtaaatttctgcattttaggcattactctgataattcaaagtctccttttctgtatcggtgcagactagaagggactgtaagtgaatatgaggcccttttgctaacagaaagacaacaaaatgaagcagctaatgctgcagttgctgaatctcaagcaagaagtgaagcattggtaagcaagctcgaagatgctgtgaaacaaaatgatctcctccatgaagctgctcaaagatttgaagaagctacaaaaaatttggaatcttcactaacatttgagaagcaacggcatcaggcaaatttgatagaattagatgaagcgcgagaaaagattgaagaacttcaaagagaagttggggacactgatgaaaaatccaccctgcttcagactagtatacaaagccttgaagaaaggttaggagagaaggatgctctattgacaacagaaaggctagaaagtgaagcaactaagaaatcgctcaatgaatctgaggatagaaacaaggacttactaatgaaaattgaagttgctgagaaagacattgctcacttccaagaaactgtccaaagaaatgaagaaaatatggcagcactggaaacttcgttgagatctgaaaggcagcaaaaggatgcaatcatgaaacaactagctgaatctcagggtgaaataggagagctgcaaaggaagcttgaagatgctgatgccagaaatgggcttcttcaagattctttgcagagacttgaacaagatgtctctgccaaagaggtcttattgcttacagaaaagcaggcacacgaggcaacaaggaagactctcactgaagttcaggaaaaaagtgaagaacttctgaagaaaattcatgataatgataaacatattcttcagcttcagtttactatacagaggcttgaggaaaccacagttgcaaatgagaatttgctgttgagggagagggagcagaatgacacaacaacaaaagcgcacaatgaaagtcaagaaaaatatgaagaattactaaagaaatttattgatgttgacaggaaaatcgaccttcttcaaggtaccatagaaaggcttggagaaaatacaacagcaaaggattctctgttgctatcagagagacatgaaaaggctgctattaagaaagcacttactgaggctgaagagaaaaatgaagagttactgatgaaagttgaagatgctaatgaaaaaataggacaccttcaaactaagataaatatgcttgaagataatgtagccgcaaaagatgtttctttagaagctgcaatcaaggaaaatgacgcaaccaggaaatctcttactgaagctcaagagagaaatggtgaattactcaagaaaatcagtgacagtgactacaggatccatttacttcaagacacggtacaaaagcttcaagtagatgcaatatcaaggttgtcgtcttttgtaatggaaaaacaagaaagtgatattgcaaagagagccgttactgaagctcatgaaagaaatgaagatttactaaagagaaatgaggacctcctcaagaggaatgatgatttgattaagaaaattgaagactctagtaaaattgtcactcaacttcaggaagctctacaaagacttgaaggaaaagcatccaacttagaggttgagaaccaagttcttcgtcaacatgcaacttcaactccaccgtctactgctaaatctccagcttcacgctcaaagatctcaaggatccatagaagtccagagaatggccatattttgaatggtgacattaggcaaactgaaatgaagccctcaactggcacatcagcagcaattacctcagtagctaatgttcctgacttgggcgaccaaaaggagtttgaacatggagaaaaactgcaaagaataccaaaacagaaatatcagccttcccataaccagcagccccaagacgatcagcagtggctagtcacttgtatttcacaatatcttggattttctgggagcaaacctgttgcagctctccttatataccaatgtcttctccattggaaatcatttgaagccatgaagacgggtgtctttgatagcattttgcatgctataaactcagccacagaggttcaaaatgacatgagaacattggcgtattggttgtccaacttatctacattaacagttttccttcaacggtcattcaaaactactaggaccacaatctcaactccacaaaggagaagattttcgtccgagaggatgtttggaaatcaaacttcaaatgctgggcttgcttatctcagtggtcaatcagttggatctgctggattgctccaagttgaagcaaagtatcctgctttgctattcaaacagcagctcgtggatttaattgaaaaggtttatggcatgataagtgacagcgtgaagaaggaactaaaccctttgcttgaattgtgtatacaggatccacaaacttctcagtcaagtattgcaaaaggtaatcttaatggcatgggtcaacagaaccaactcacacattggctgggcatagtgaaaatcctcactagctacttggatgtactaagggaaaatcacgttccctcaattctggtgcataaacttttcactcaaatgttctcacttattgatgttcaattatttaaccgattacttttgcggcgtgagtgctgttcttttagtaacggggaatatatcagagctggactagctgaactaaaacattggtccgacaatgctacaagagagtttgcaggttcagcgtgggaggcattgaggcatattagacaagctgttgatttcctggtgatttctcttaagccaatgaggacattaagagagatacgcactgatgtgtgccctgccctcagtatacaacagctagagcgaatagttagtatgtactgggatgatgtgaatggtacaaacactatttcagcagagtttacatcaagcttgaaatctgccatacgtgatgaatccaatatggccacaaatttctctatactgctagatgatgattccagtatacctttttcacttgatgatattacaaagacattgccggtcattgagctggctgatgacgactttctgccatttgtccatgaaaacccaagctttgcgtttttattgcaaagaggggagtagtcttttttttttgtcaccattgtgacttcacctacctgtggataagtcaggattcctgctaggatgtacagtacgcgtgattctttttgtaccaggtagcaaggcatcaaagattagatgctaggtgagcttataggcttctggtttctattgatttgtttgttggttgtatatttgtattcaggttttccttgccattttttctacttgtagccgttttttgggcttgtatactaggtggtaagggcagaagaccctgccctgtaagcatagttacacaaggtcttgctgtaggtatggaagctgtacatgtgttgtaacggattataaaagggggaaagtagtgcgtagtgatggctttgtggttggtgtgttgcttacctttgatcaatgatcatgtattggttcgtcatatattgtttattgtactgcacaccattccattgtagataacatacacgctcaagacttgttctgggatgtcaaatgagtaatctgttacggtacagaaatgtcatgcttacttccagatcttctgtaatgaacacaaataattatcattttcatttatttttgttcttagatcctgctgcggcttttatagggtaattatcgagag

SEQ ID NO: 77597 - DNA, 2504 bp, Zea Mays
aggtttgttgctttatttcctgacttagagcaatttcttgacccttatgcagagctggtccacatggattcaagattcagggaatgttggttcctcctgcttaggcaattcgggctgcaagttttggcaccgcaatcatctaatataaatttcatggaatggtggcatgaagcaaatgaagctattcagggtcccttcagagatggcctaaactctcttattgtgctaggtgcttgggccttatggaatcatagaaaaacacatgcatctttgatggttttgctccggaagttgtcacaatttctggatccgataggtggtaaatttctgcattttaggcattactctgataattcaaagtctccttttctgtatcggtgcagactagaagggactgtaagtgaatatgaggcccttttgctaacagaaagacaacaaaatgaagcagctaatgctgcagttgctgaatctcaagcaagaagtgaagcattggtaagcaagctcgaagatgctgtgaaacaaaatgatctcctccatgaagctgctcaaagatttgaagaagctacaaaaaatttggaatcttcactaacatttgagaagcaacggcatcaggcaaatttgatagaattagatgaagcgcgagaaaagattgaagaacttcaaagagaagttggggacactgatgaaaaatccaccctgcttcagactagtatacaaagccttgaagaaaggttaggagagaaggatgctctattgacaacagaaaggctagaaagtgaagcaactaagaaatcgctcaatgaatctgaggatagaaacaaggacttactaatgaaaattgaagttgctgagaaagacattgctcacttccaagaaactgtccaaagaaatgaagaaaatatggcagcactggaaacttcgttgagatctgaaaggcagcaaaaggatgcaatcatgaaacaactagctgaatctcagggtgaaataggagagctgcaaaggaagcttgaagatgctgatgccagaaatgggcttcttcaagattctttgcagagactcgaagaaagtacagcagataaagattctttattggctacagaaagacatgaaaacagtgaaaccaagaaggaattagctggttctcagaaaaagattgcggaattgctaactgaagtgcaagataccggtgcatatattgcagaacttgagggctcggttaggagactcgaaggaaacttgacagtaactgaagcttcattgctaactgaaaaggaacagaatgcttccaccttaaaattacttacagaagcacaattgagaatcgaagaattaataaaaaagcttgaaggttcaaatagaaaatctgatagtcttctggatacaataacaaggcacacgaggcaacaaggaagactctcactgaagttcaggaaaaaagtgaagaacttctgaagaaaattcatgataatgataaacatattcttcagcttcagtttactatacagaggcttgaggaaaccacagttgcaaatgagaatttgctgttgagggagagggagcagaatgacacaacaacaaaagcgcacaatgaaagtcaagaaaaatatgaagaattactaaagaaatttattgatgttgacaggaaaatcgaccttcttcaaggtaccatagaaaggcttggagaaaatacaacagcaaaggattctctgttgctatcagagagacatgaaaaggctgctattaagaaagcacttactgaggctgaagagaaaaatgaagagttactgatgaaagttgaagatgctaatgaaaaaataggacaccttcaaactaagataaatatgcttgaagataatgtagccgcaaaagatgtttctttagaagctgcaatcaaggaaaatgacgcaaccaggaaatctcttactgaagctcaagagagaaatggtgaattactcaagaaaatcagtgacagtgactacaggatccatttacttcaagacacggtacaaaagcttcaagtagatgcaatatcaaggttgtcgtcttttgtaatggaaaaacaagaaagtgatattgcaaagagagccgttactgaagctcatgaaagaaatgaagatttactaaagagaaatgaggacctcctcaagaggaatgatgatttgattaagaaaattgaagactctagtaaaattgtcactcaacttcaggaagctctacaaagacttgaaggaaaagcatccaacttagaggttgagaaccaagttcttcgtcaacatgcaacttcaactccaccgtctactgctaaatctccagcttcacgctcaaagatctcaaggatccatagaagtccagagaatggccatattttgaatggtgacattaggcaaactgaaatgaagccctcaactggcacatcagcagcaattacctcagtaccagttcagacctcctgccctctaaagcgtgtatccttgaagcttcgaagattggccaggtccttgtag

SEQ ID NO: 77598 - DNA, 2220 bp, Zea Mays
aggtttgttgctttatttcctgacttagagcaatttcttgacccttatgcagagctggtccacatggattcaagattcagggaatgttggttcctcctgcttaggcaattcgggctgcaagttttggcaccgcaatcatctaatataaatttcatggaatggtggcatgaagcaaatgaagctattcagggtcccttcagagatggcctaaactctcttattgtgctaggtgcttgggccttatggaatcatagaaaaacacatgcatctttgatggttttgctccggaagttgtcacaatttctggatccgataggtggtaaatttctgcattttaggcattactctgataattcaaagtctccttttctgtatcggtgcagactagaagggactgtaagtgaatatgaggcccttttgctaacagaaagacaacaaaatgaagcagctaatgctgcagttgctgaatctcaagcaagaagtgaagcattggtaagcaagctcgaagatgctgtgaaacaaaatgatctcctccatgaagctgctcaaagatttgaagaagctacaaaaaatttggaatcttcactaacatttgagaagcaacggcatcaggcaaatttgatagaattagatgaagcgcgagaaaagattgaagaacttcaaagagaagttggggacactgatgaaaaatccaccctgcttcagactagtatacaaagccttgaagaaaggttaggagagaaggatgctctattgacaacagaaaggctagaaagtgaagcaactaagaaatcgctcaatgaatctgaggatagaaacaaggacttactaatgaaaattgaagttgctgagaaagacattgctcacttccaagaaactgtccaaagaaatgaagaaaatatggcagcactggaaacttcgttgagatctgaaaggcagcaaaaggatgcaatcatgaaacaactagctgaatctcagggtgaaataggagagctgcaaaggaagcttgaagatgctgatgccagaaatgggcttcttcaagattctttgcagagacttgaacaagatgtctctgccaaagaggtcttattgcttacagaaaagcaggcacacgaggcaacaaggaagactctcactgaagttcaggaaaaaagtgaagaacttctgaagaaaattcatgataatgataaacatattcttcagcttcagtttactatacagaggcttgaggaaaccacagttgcaaatgagaatttgctgttgagggagagggagcagaatgacacaacaacaaaagcgcacaatgaaagtcaagaaaaatatgaagaattactaaagaaatttattgatgttgacaggaaaatcgaccttcttcaaggtaccatagaaaggcttggagaaaatacaacagcaaaggattctctgttgctatcagagagacatgaaaaggctgctattaagaaagcacttactgaggctgaagagaaaaatgaagagttactgatgaaagttgaagatgctaatgaaaaaataggacaccttcaaactaagataaatatgcttgaagataatgtagccgcaaaagatgtttctttagaagctgcaatcaaggaaaatgacgcaaccaggaaatctcttactgaagctcaagagagaaatggtgaattactcaagaaaatcagtgacagtgactacaggatccatttacttcaagacacggtacaaaagcttcaagtagatgcaatatcaaggttgtcgtcttttgtaatggaaaaacaagaaagtgatattgcaaagagagccgttactgaagctcatgaaagaaatgaagatttactaaagagaaatgaggacctcctcaagaggaatgatgatttgattaagaaaattgaagactctagtaaaattgtcactcaacttcaggaagctctacaaagacttgaaggaaaagcatccaacttagaggttgagaaccaagttcttcgtcaacatgcaacttcaactccaccgtctactgctaaatctccagcttcacgctcaaagatctcaaggatccatagaagtccagagaatggccatattttgaatggtgacattaggcaaactgaaatgaagccctcaactggcacatcagcagcaattacctcagtaccagttcagacctcctgccctctaaagcgtgtatccttgaagcttcgaagattggccaggtccttgtag

SEQ ID NO: 77599 - DNA, 2388 bp, Zea Mays
aggtttgttgctttatttcctgacttagagcaatttcttgacccttatgcagagctggtccacatggattcaagattcagggaatgttggttcctcctgcttaggcaattcgggctgcaagttttggcaccgcaatcatctaatataaatttcatggaatggtggcatgaagcaaatgaagctattcagggtcccttcagagatggcctaaactctcttattgtgctaggtgcttgggccttatggaatcatagaaaaacacatgcatctttgatggttttgctccggaagttgtcacaatttctggatccgataggtggtaaatttctgcattttaggcattactctgataattcaaagtctccttttctgtatcggtgcagactagaagggactgtaagtgaatatgaggcccttttgctaacagaaagacaacaaaatgaagcagctaatgctgcagttgctgaatctcaagcaagaagtgaagcattggtaagcaagctcgaagatgctgtgaaacaaaatgatctcctccatgaagctgctcaaagatttgaagaagctacaaaaaatttggaatcttcactaacatttgagaagcaacggcatcaggcaaatttgatagaattagatgaagcgcgagaaaagattgaagaacttcaaagagaagttggggacactgatgaaaaatccaccctgcttcagactagtatacaaagccttgaagaaaggttaggagagaaggatgctctattgacaacagaaaggctagaaagtgaagcaactaagaaatcgctcaatgaatctgaggatagaaacaaggacttactaatgaaaattgaagttgctgagaaagacattgctcacttccaagaaactgtccaaagaaatgaagaaaatatggcagcactggaaacttcgttgagatctgaaaggcagcaaaaggatgcaatcatgaaacaactagctgaatctcagggtgaaataggagagctgcaaaggaagcttgaagatgctgatgccagaaatgggcttcttcaagattctttgcagagactcgaagaaagtacagcagataaagattctttattggctacagaaagacatgaaaacagtgaaaccaagaaggaattagctggttctcagaaaaagattgcggaattgctaactgaagtgcaagataccggtgcatatattgcagaacttgagggctcggttaggagacttgaacaagatgtctctgccaaagaggtcttattgcttacagaaaagcaggcacacgaggcaacaaggaagactctcactgaagttcaggaaaaaagtgaagaacttctgaagaaaattcatgataatgataaacatattcttcagcttcagtttactatacagaggcttgaggaaaccacagttgcaaatgagaatttgctgttgagggagagggagcagaatgacacaacaacaaaagcgcacaatgaaagtcaagaaaaatatgaagaattactaaagaaatttattgatgttgacaggaaaatcgaccttcttcaaggtaccatagaaaggcttggagaaaatacaacagcaaaggattctctgttgctatcagagagacatgaaaaggctgctattaagaaagcacttactgaggctgaagagaaaaatgaagagttactgatgaaagttgaagatgctaatgaaaaaataggacaccttcaaactaagataaatatgcttgaagataatgtagccgcaaaagatgtttctttagaagctgcaatcaaggaaaatgacgcaaccaggaaatctcttactgaagctcaagagagaaatggtgaattactcaagaaaatcagtgacagtgactacaggatccatttacttcaagacacggtacaaaagcttcaagtagatgcaatatcaaggttgtcgtcttttgtaatggaaaaacaagaaagtgatattgcaaagagagccgttactgaagctcatgaaagaaatgaagatttactaaagagaaatgaggacctcctcaagaggaatgatgatttgattaagaaaattgaagactctagtaaaattgtcactcaacttcaggaagctctacaaagacttgaaggaaaagcatccaacttagaggttgagaaccaagttcttcgtcaacatgcaacttcaactccaccgtctactgctaaatctccagcttcacgctcaaagatctcaaggatccatagaagtccagagaatggccatattttgaatggtgacattaggcaaactgaaatgaagccctcaactggcacatcagcagcaattacctcagtaccagttcagacctcctgccctctaaagcgtgtatccttgaagcttcgaagattggccaggtccttgtag

SEQ ID NO: 77600 - DNA, 2556 bp, Zea Mays
aggtttgttgctttatttcctgacttagagcaatttcttgacccttatgcagagctggtccacatggattcaagattcagggaatgttggttcctcctgcttaggcaattcgggctgcaagttttggcaccgcaatcatctaatataaatttcatggaatggtggcatgaagcaaatgaagctattcagggtcccttcagagatggcctaaactctcttattgtgctaggtgcttgggccttatggaatcatagaaaaacacatgcatctttgatggttttgctccggaagttgtcacaatttctggatccgataggtggtaaatttctgcattttaggcattactctgataattcaaagtctccttttctgtatcggtgcagactagaagggactgtaagtgaatatgaggcccttttgctaacagaaagacaacaaaatgaagcagctaatgctgcagttgctgaatctcaagcaagaagtgaagcattggtaagcaagctcgaagatgctgtgaaacaaaatgatctcctccatgaagctgctcaaagatttgaagaagctacaaaaaatttggaatcttcactaacatttgagaagcaacggcatcaggcaaatttgatagaattagatgaagcgcgagaaaagattgaagaacttcaaagagaagttggggacactgatgaaaaatccaccctgcttcagactagtatacaaagccttgaagaaaggttaggagagaaggatgctctattgacaacagaaaggctagaaagtgaagcaactaagaaatcgctcaatgaatctgaggatagaaacaaggacttactaatgaaaattgaagttgctgagaaagacattgctcacttccaagaaactgtccaaagaaatgaagaaaatatggcagcactggaaacttcgttgagatctgaaaggcagcaaaaggatgcaatcatgaaacaactagctgaatctcagggtgaaataggagagctgcaaaggaagcttgaagatgctgatgccagaaatgggcttcttcaagattctttgcagagactcgaagaaagtacagcagataaagattctttattggctacagaaagacatgaaaacagtgaaaccaagaaggaattagctggttctcagaaaaagattgcggaattgctaactgaagtgcaagataccggtgcatatattgcagaacttgagggctcggttaggagactcgaaggaaacttgacagtaactgaagcttcattgctaactgaaaaggaacagaatgcttccaccttaaaattacttacagaagcacaattgagaatcgaagaattaataaaaaagcttgaaggttcaaatagaaaatctgatagtcttctggatacaataacaagacttgaacaagatgtctctgccaaagaggtcttattgcttacagaaaagcaggcacacgaggcaacaaggaagactctcactgaagttcaggaaaaaagtgaagaacttctgaagaaaattcatgataatgataaacatattcttcagcttcagtttactatacagaggcttgaggaaaccacagttgcaaatgagaatttgctgttgagggagagggagcagaatgacacaacaacaaaagcgcacaatgaaagtcaagaaaaatatgaagaattactaaagaaatttattgatgttgacaggaaaatcgaccttcttcaaggtaccatagaaaggcttggagaaaatacaacagcaaaggattctctgttgctatcagagagacatgaaaaggctgctattaagaaagcacttactgaggctgaagagaaaaatgaagagttactgatgaaagttgaagatgctaatgaaaaaataggacaccttcaaactaagataaatatgcttgaagataatgtagccgcaaaagatgtttctttagaagctgcaatcaaggaaaatgacgcaaccaggaaatctcttactgaagctcaagagagaaatggtgaattactcaagaaaatcagtgacagtgactacaggatccatttacttcaagacacggtacaaaagcttcaagtagatgcaatatcaaggttgtcgtcttttgtaatggaaaaacaagaaagtgatattgcaaagagagccgttactgaagctcatgaaagaaatgaagatttactaaagagaaatgaggacctcctcaagaggaatgatgatttgattaagaaaattgaagactctagtaaaattgtcactcaacttcaggaagctctacaaagacttgaaggaaaagcatccaacttagaggttgagaaccaagttcttcgtcaacatgcaacttcaactccaccgtctactgctaaatctccagcttcacgctcaaagatctcaaggatccatagaagtccagagaatggccatattttgaatggtgacattaggcaaactgaaatgaagccctcaactggcacatcagcagcaattacctcagtaccagttcagacctcctgccctctaaagcgtgtatccttgaagcttcgaagattggccaggtccttgtag

SEQ ID NO: 77601 - DNA, 1223 bp, Zea Mays
aaaaattcctcctacttcagttcagtaagaaaatgttcttccagggtggataaaggagctagacagcttgtaaacagaataaatgcatcaataggacaagacccagactctaacaaactgattggagtacttgatatatatggttttgaaagttttaaaaccaacagttttgaacaactgtgcatcaattttaccaatgaaaaactccagcaacattttaatcagaatgtcttcaaaatggaacaagaggaatacacaagggagcaaattaattggagttacatagagtttgttgacaatcaagatgtacttgacctgattgaaaagaaaccaggtggcattattgcacttcttgatgaagcctgcatgtttccaaagtccacacacgagacattgtctcagaagctgtatgaaaagttcaagacccacaaaagatttaccaaaccaaagctttctcgtactgcatttacaattcaacattatgctggggatgtaacatatcaatctgatcaattcctggacaagaacaaggactacgtggttgcagagcatcaagaattacttaatggttctaagtgctcttttgtatcaggattatttccaccagcaacagaagagaacacaaaatcatcaaaatcatcaattgcaactcgctttaagatgcaacttcacgagctcatggagactttaagctctacagagccacattatattagatgtataaaaccaaatagtgtccttaagcctggcatttttgagaataccaatgttctacagcagcttcgatgctctggtgttcttgaagccattagaatcagctgtgctggttatcccacaaggaaacaatttcatgattttctacatcgcttttgtgttcttgctcctgaaattttgaaagagaaaaatgatgaaaaagtctcatgtcaaaagattttggacaaaatgggactacagggttatcaggtgaaaaacacttcacttaccaatctcctcaacatgtattggaagagagtatttagatttcctaattggtggtaggctttacaatatatataagcctacctagggttcccccctaaccctaataggctatacatggactgggctctagatccataacactcacagccacacagtaatagcagccacacactaaaggtctaatgcacaatctaacaccctcccgttgttgaaactctagccacaacatatgttgagactgg

SEQ ID NO: 77602 - DNA, 2454 bp, Zea Mays
ggccttttccggaatttggagctttcaattcaatttattgaagccacgagctggttcgatttctctggcttcaatgttaaacattgtcataggttctcatgtatgggtggaagataaagacttgtcctgggttgatggtgaggtattccgaattgatggtcaaaatgcccatgttcacacaaccaaggggaagacggtcattgcaaatatctcaaatattcatcctaaagacacagaagcaccacctgatggggtggatgacatgacaaggttatcatacttgcatgagcctggtgttttagataacctggctgtcagatatgcgaaaaatatcatttatacctacactggtaacattctgattgcaataaatccattccaaaggctacctagtctggttgatgcccttactatggaaaaatacaaaggtgcaaatcttggtgacctagatcctcatgtatttgcaatagctgacgccgcttacaggcaaatgataaatgaaggaaagagtaactccgttttggtcagtggtgaaagtggtgctggtaagactgaaactacgaaattgttgatgagatatcttgcatttctgggtgggcgatccggaacaggagagaggacagttgaacaacaagttttagaatctaatccagtccttgaagcctttgggaatgcaaaaactgttcggaacaacaactcaagtcgatttggtaaatttgttgaaatccagtttgacaagagtggtaagatatctggtgctgccattagaacttacttgcttgagagatctcgggtttgccaaattaatagtccagagaggaactaccattgcttttacttcctatgtgcagctccatcggaggatcttaagaagtataagctcggggacccatcgtcctttcactatctcaaccagtcagcttgcattcaagttgatggaatcaatgacgctgaggagtaccttgcaacaagaaatgcaatggatactgttggaatcactgatcaagaacaggaagctatattccgtgttgttgctgctgtgcttcatcttggaaacataaattttgcaaaagggagagaggtagattcatccataataaaggatgacaaatctagattccatcttaagacagcaggagagctcttgatgtgtgattgtgagaagttagagaatgccttgataaaaagggaaattaatacacccgaaggagtgattaccacaacagttggtccaaattctgctactattagccgggatggtttagcaaagcagatatactctcgattatttgagtggcttgtaaacagaataaatgcatcaataggacaagacccagactctaacaaactgattggagtacttgatatatatggttttgaaagttttaaaaccaacagttttgaacaactgtgcatcaattttaccaatgaaaaactccagcaacattttaatcagaatgtcttcaaaatggaacaagaggaatacacaagggagcaaattaattggagttacatagagtttgttgacaatcaagatgtacttgacctgattgaaaagaaaccaggtggcattattgcacttcttgatgaagcctgcatgtttccaaagtccacacacgagacattgtctcagaagctgtatgaaaagttcaagacccacaaaagatttaccaaaccaaagctttctcgtactgcatttacaattcaacattatgctggggatgtaacatatcaatctgatcaattcctggacaagaacaaggactacgtggttgcagagcatcaagaattacttaatggttctaagtgctcttttgtatcaggattatttccaccagcaacagaagagaacacaaaatcatcaaaatcatcaattgcaactcgctttaagatgcaacttcacgagctcatggagactttaagctctacagagccacattatattagatgtataaaaccaaatagtgtccttaagcctggcatttttgagaataccaatgttctacagcagcttcgatgctctggtgttcttgaagccattagaatcagctgtgctggttatcccacaaggaaacaatttcatgattttctacatcgcttttgtgttcttgctcctgaaattttgaaagagaaaaatgatgaaaaagtctcatgtcaaaagattttggacaaaatgggactacagggttatcaggtgaaaaacacttcacttaccaatctcctcaacatgtattggaagagagtatttagatttcctaattggtggtaggctttacaatatatataagcctacctagggttcccccctaaccctaataggctatacatggactgggctctagatccataacactcacagccacacagtaatagcagccacacactaaaggtctaatgcacaatctaacaccctcccgttgttgaaactctagccacaacatatgttgagactgg

SEQ ID NO: 77603 - DNA, 2126 bp, Zea Mays
gtggctcccctcgcccccccaccacctcgtctctctcctcctgtcgtgcccgcggtcgcgtccccttcaccaccaccccacccgcctccgcgtcgcttgtgctgctgccaccgccgtgagcctccaccacgggcgccacgcgttcccgggggcggatcgcgctgccgcaaaggcgatcggcgagtgacccaggggaggagatcgcccgtcggcgccgcagctgccgccgcagaccgagccgcgtttcctcccgtccggttccatcgcagctcctgtctgggccagtccgttgaggcagggcggggcggctcgatcgcccgcagatgaatcatggcttcaatgttaaacattgtcataggttctcatgtatgggtggaagataaagacttgtcctgggttgatggtgaggtattccgaattgatggtcaaaatgcccatgttcacacaaccaaggggaagacggtcattgcaaatatctcaaatattcatcctaaagacacagaagcaccacctgatggggtggatgacatgacaaggttatcatacttgcatgagcctggtgttttagataacctggctgtcagatatgcgaaaaatatcatttatacctacactggtaacattctgattgcaataaatccattccaaaggctacctagtctggttgatgcccttactatggaaaaatacaaaggtgcaaatcttggtgacctagatcctcatgtatttgcaatagctgacgccgcttacaggcaaatgataaatgaaggaaagagtaactccgttttggtcagtggtgaaagtggtgctggtaagactgaaactacgaaattgttgatgagatatcttgcatttctgggtgggcgatccggaacaggagagaggacagttgaacaacaagttttagaatctaatccagtccttgaagcctttgggaatgcaaaaactgttcggaacaacaactcaaggcttgtaaacagaataaatgcatcaataggacaagacccagactctaacaaactgattggagtacttgatatatatggttttgaaagttttaaaaccaacagttttgaacaactgtgcatcaattttaccaatgaaaaactccagcaacattttaatcagaatgtcttcaaaatggaacaagaggaatacacaagggagcaaattaattggagttacatagagtttgttgacaatcaagatgtacttgacctgattgaaaagaaaccaggtggcattattgcacttcttgatgaagcctgcatgtttccaaagtccacacacgagacattgtctcagaagctgtatgaaaagttcaagacccacaaaagatttaccaaaccaaagctttctcgtactgcatttacaattcaacattatgctggggatgtaacatatcaatctgatcaattcctggacaagaacaaggactacgtggttgcagagcatcaagaattacttaatggttctaagtgctcttttgtatcaggattatttccaccagcaacagaagagaacacaaaatcatcaaaatcatcaattgcaactcgctttaagatgcaacttcacgagctcatggagactttaagctctacagagccacattatattagatgtataaaaccaaatagtgtccttaagcctggcatttttgagaataccaatgttctacagcagcttcgatgctctggtgttcttgaagccattagaatcagctgtgctggttatcccacaaggaaacaatttcatgattttctacatcgcttttgtgttcttgctcctgaaattttgaaagagaaaaatgatgaaaaagtctcatgtcaaaagattttggacaaaatgggactacagggttatcaggtgaaaaacacttcacttaccaatctcctcaacatgtattggaagagagtatttagatttcctaattggtggtaggctttacaatatatataagcctacctagggttcccccctaaccctaataggctatacatggactgggctctagatccataacactcacagccacacagtaatagcagccacacactaaaggtctaatgcacaatctaacaccctcccgttgttgaaactctagccacaacatatgttgagactgg

SEQ ID NO: 77604 - DNA, 2753 bp, Zea Mays
cggctggcttcgcctggccgtgggctgtggctcccctcgcccccccaccacctcgtctctctcctcctgtcgtgcccgcggtcgcgtccccttcaccaccaccccacccgcctccgcgtcgcttgtgctgctgccaccgccgtgagcctccaccacgggcgccacgcgttcccgggggcggatcgcgctgccgcaaaggcgatcggcgagtgacccaggggaggagatcgcccgtcggcgccgcagctgccgccgcagaccgagccgcgtttcctcccgtccggttccatcgcagctcctgtctgggccagtccgttgaggcagggcggggcggctcgatcgcccgcagatgaatcatggcttcaatgttaaacattgtcataggttctcatgtatgggtggaagataaagacttgtcctgggttgatggtgaggtattccgaattgatggtcaaaatgcccatgttcacacaaccaaggggaagacggtcattgcaaatatctcaaatattcatcctaaagacacagaagcaccacctgatggggtggatgacatgacaaggttatcatacttgcatgagcctggtgttttagataacctggctgtcagatatgcgaaaaatatcatttatacctacactggtaacattctgattgcaataaatccattccaaaggctacctagtctggttgatgcccttactatggaaaaatacaaaggtgcaaatcttggtgacctagatcctcatgtatttgcaatagctgacgccgcttacaggaaacaggcaaatgataaatgaaggaaagagtaactccgttttggtcagtggtgaaagtggtgctggtaagactgaaactacgaaattgttgatgagatatcttgcatttctgggtgggcgatccggaacaggagagaggacagttgaacaacaagttttagaatctaatccagtccttgaagcctttgggaatgcaaaaactgttcggaacaacaactcaagtcgatttggtaaatttgttgaaatccagtttgacaagagtggtaagatatctggtgctgccattagaacttacttgcttgagagatctcgggtttgccaaattaatagtccagagaggaactaccattgcttttacttcctatgtgcagctccatcggaggatcttaagaagtataagctcggggacccatcgtcctttcactatctcaaccagtcagcttgcattcaagttgatggaatcaatgacgctgaggagtaccttgcaacaagaaatgcaatggatactgttggaatcactgatcaagaacaggaagctatattccgtgttgttgctgctgtgcttcatcttggaaacataaattttgcaaaagggagagaggtagattcatccataataaaggatgacaaatctagattccatcttaagacagcaggagagctcttgatgtgtgattgtgagaagttagagaatgccttgataaaaagggaaattaatacacccgaaggagtgattaccacaacagttggtccaaattctgctactattagccgggatggtttagcaaagcagatatactctcgattatttgagtggcttgtaaacagaataaatgcatcaataggacaagacccagactctaacaaactgattggagtacttgatatatatggttttgaaagttttaaaaccaacagttttgaacaactgtgcatcaattttaccaatgaaaaactccagcaacattttaatcagaatgtcttcaaaatggaacaagaggaatacacaagggagcaaattaattggagttacatagagtttgttgacaatcaagatgtacttgacctgattgaaaagaaaccaggtggcattattgcacttcttgatgaagcctgcatgtttccaaagtccacacacgagacattgtctcagaagctgtatgaaaagttcaagacccacaaaagatttaccaaaccaaagctttctcgtactgcatttacaattcaacattatgctggggatgtaacatatcaatctgatcaattcctggacaagaacaaggactacgtggttgcagagcatcaagaattacttaatggttctaagtgctcttttgtatcaggattatttccaccagcaacagaagagaacacaaaatcatcaaaatcatcaattgcaactcgctttaagatgcaacttcacgagctcatggagactttaagctctacagagccacattatattagatgtataaaaccaaatagtgtccttaagcctggcatttttgagaataccaatgttctacagcagcttcgatgctctggtgttcttgaagccattagaatcagctgtgctggttatcccacaaggaaacaatttcatgattttctacatcgcttttgtgttcttgctcctgaaattttgaaagagaaaaatgatgaaaaagtctcatgtcaaaagattttggacaaaatgggactacagggttatcaggtgaaaaacacttcacttaccaatctcctcaacatgtattggaagagagtatttagatttcctaattggtggtaggctttacaatatatataagcctacctagggttcccccctaaccctaataggctatacatggactgggctctagatccataacactcacagccacacagtaatagcagccacacactaaaggtctaatgcacaatctaacaccctcccgttgttgaaactctagccacaacatatgttgagactgg

SEQ ID NO: 77605 - DNA, 2512 bp, Zea Mays
atctatcctccggcgcgctacgcccccgtctacgcctcccaacgacgttgttgtgctgtgatcagcccctgccaccatccaccaataccacctccatatcccctaccgacaccaccaggcttcaatgttaaacattgtcataggttctcatgtatgggtggaagataaagacttgtcctgggttgatggtgaggtattccgaattgatggtcaaaatgcccatgttcacacaaccaaggggaagacggtcattgcaaatatctcaaatattcatcctaaagacacagaagcaccacctgatggggtggatgacatgacaaggttatcatacttgcatgagcctggtgttttagataacctggctgtcagatatgcgaaaaatatcatttatacctacactggtaacattctgattgcaataaatccattccaaaggctacctagtctggttgatgcccttactatggaaaaatacaaaggtgcaaatcttggtgacctagatcctcatgtatttgcaatagctgacgccgcttacaggaaacaggcaaatgataaatgaaggaaagagtaactccgttttggtcagtggtgaaagtggtgctggtaagactgaaactacgaaattgttgatgagatatcttgcatttctgggtgggcgatccggaacaggagagaggacagttgaacaacaagttttagaatctaatccagtccttgaagcctttgggaatgcaaaaactgttcggaacaacaactcaagtcgatttggtaaatttgttgaaatccagtttgacaagagtggtaagatatctggtgctgccattagaacttacttgcttgagagatctcgggtttgccaaattaatagtccagagaggaactaccattgcttttacttcctatgtgcagctccatcggaggatcttaagaagtataagctcggggacccatcgtcctttcactatctcaaccagtcagcttgcattcaagttgatggaatcaatgacgctgaggagtaccttgcaacaagaaatgcaatggatactgttggaatcactgatcaagaacaggaagctatattccgtgttgttgctgctgtgcttcatcttggaaacataaattttgcaaaagggagagaggtagattcatccataataaaggatgacaaatctagattccatcttaagacagcaggagagctcttgatgtgtgattgtgagaagttagagaatgccttgataaaaagggaaattaatacacccgaaggagtgattaccacaacagttggtccaaattctgctactattagccgggatggtttagcaaagcagatatactctcgattatttgagtggcttgtaaacagaataaatgcatcaataggacaagacccagactctaacaaactgattggagtacttgatatatatggttttgaaagttttaaaaccaacagttttgaacaactgtgcatcaattttaccaatgaaaaactccagcaacattttaatcagaatgtcttcaaaatggaacaagaggaatacacaagggagcaaattaattggagttacatagagtttgttgacaatcaagatgtacttgacctgattgaaaagaaaccaggtggcattattgcacttcttgatgaagcctgcatgtttccaaagtccacacacgagacattgtctcagaagctgtatgaaaagttcaagacccacaaaagatttaccaaaccaaagctttctcgtactgcatttacaattcaacattatgctggggatgtaacatatcaatctgatcaattcctggacaagaacaaggactacgtggttgcagagcatcaagaattacttaatggttctaagtgctcttttgtatcaggattatttccaccagcaacagaagagaacacaaaatcatcaaaatcatcaattgcaactcgctttaagatgcaacttcacgagctcatggagactttaagctctacagagccacattatattagatgtataaaaccaaatagtgtccttaagcctggcatttttgagaataccaatgttctacagcagcttcgatgctctggtgttcttgaagccattagaatcagctgtgctggttatcccacaaggaaacaatttcatgattttctacatcgcttttgtgttcttgctcctgaaattttgaaagagaaaaatgatgaaaaagtctcatgtcaaaagattttggacaaaatgggactacagggttatcaggtgaaaaacacttcacttaccaatctcctcaacatgtattggaagagagtatttagatttcctaattggtggtaggctttacaatatatataagcctacctagggttcccccctaaccctaataggctatacatggactgggctctagatccataacactcacagccacacagtaatagcagccacacactaaaggtctaatgcacaatctaacaccctcccgttgttgaaactctagccacaacatatgttgagactgg

SEQ ID NO: 77606 - DNA, 2258 bp, Zea Mays
ccaccacctcgtctctctcctcctgtcgtgcccgcggtcgcgtccccttcaccaccaccccacccgcctccgcgtcgcttgtgctgctgccaccgccgtgagcctccaccacgggcgccacgcgttcccgggggcggatcgcgctgccgcaaaggcgatcggcgagtgacccaggggaggagatcgcccgtcggcgccgcagctgccgccgcagaccgagccgcgtttcctcccgtccggttccatcgcagctcctgtctgggccagtccgttgaggcagggcggggcggctcgatcgcccgcagatgaatcatggcttcaatgttaaacattgtcataggttctcatgtatgggtggaagataaagacttgtcctgggttgatggtgaggtattccgaattgatggtcaaaatgcccatgttcacacaaccaaggggaagacggtcattgcaaatatctcaaatattcatcctaaagacacagaagcaccacctgatggggtggatgacatgacaaggttatcatacttgcatgagcctggtgttttagataacctggctgtcagatatgcgaaaaatatcatttatacctacactggtaacattctgattgcaataaatccattccaaaggctacctagtctggttgatgcccttactatggaaaaatacaaaggtgcaaatcttggtgacctagatcctcatgtatttgcaatagctgacgccgcttacaggaaacaggcaaatgataaatgaaggaaagagtaactccgttttggtcagtggtgaaagtggtgctggtaagactgaaactacgaaattgttgatgagatatcttgcatttctgggtgggcgatccggaacaggagagaggacagttgaacaacaagttttagaatctaatccagtccttgaagcctttgggaatgcaaaaactgttcggaacaacaactcaagtcgatttggtaaatttgttgaaatccagtttgacaagagtggtaagatatctggtgctgccattagaacttacttgcttgagagatctcgggtttgccaaattaatagtccagagaggaactaccattgcttttacttcctatgtgcagctccatcggaggatcttaagaagtataagctcggggacccatcgtcctttcactatctcaaccagtcagcttgcattcaagttgatggaatcaatgacgctgaggagtaccttgcaacaagaaatgcaatggatactgttggaatcactgatcaagaacaggaagctatattccgtgttgttgctgctgtgcttcatcttggaaacataaattttgcaaaagggagagaggtagattcatccataataaaggatgacaaatctagattccatcttaagacagcaggagagctcttgatgtgtgattgtgagaagttagagaatgccttgataaaaagggaaattaatacacccgaaggagtgattaccacaacagttggtccaaattctgctactattagccgggatggtttagcaaagcagatatactctcgattatttgagtgaataaatgcatcaataggacaagacccagactctaacaaactgattggagtacttgatatatatggttttgaaagttttaaaaccaacagttttgaacaactgtgcatcaattttaccaatgaaaaactccagcaacattttaatcagaatgtcttcaaaatggaacaagaggaatacacaagggagcaaattaattggagttacatagagtttgttgacaatcaagatgtacttgacctgattgaaaagaaaccaggtggcattattgcacttcttgatgaagcctgcatgtttccaaagtccacacacgagacattgtctcagaagctgtatgaaaagttcaagacccacaaaagatttaccaaaccaaagctttctcgtactgcatttacaattcaacattatgctggggatgtaacatatcaatctgatcaattcctggacaagaacaaggactacgtggttgcagagcatcaagaattacttaatggttctaagtgctcttttgtatcaggattatttccaccagcaacagaagagaacacaaaatcatcaaaatcatcaattgcaactcgctttaaggagagctgcgcatagcgcatcattatattaagaaggagagaaaggtccaaaatggaccggagtacaaaaaccctaggaggcagaaacagacacactagcgatcacctcttacacaaagaaaaac

SEQ ID NO: 77607 - DNA, 1116 bp, Zea Mays
cacggcactagaccaatgttataccggagtacatatccaattacagagaagggaaagcagaggtcttgggtcggtccaagtgggcagtactaccgtgagctgccttgccccagctgtaggggtagaggttacactccatgcaaggagtgtggaatagatagatcaagtttggactgccctatgtgcaatggcaaggggattcaaacttgtctacaatgtagtggagagtgtgtgatatggcaagaatctgttgatgaacagccatgggagaaagttcggtcaagttctcccttgaaagtaaaagaagatgacgaagttgacaagttagagataaatatcaacaaccccaaaagatcaaagcgtacttatgcatctacttcaccggaagttgccaagaagattagccggtctttaagaagtctaaatgctcaaacaggattgtttactaagcacatgaagattatacaccaagacccagaattgcgtgctcaaagagttgctgcaatcaagagaacaaaaggaactgatgttgcaagaaagcgtgcttctgaaattcagaaggcattcttcagtgatcctgagaaccggctcaagagaagcattgccatgaaaggggtgaaattttactgcagcaaatgtgggcaagaaggacatagaagcttttattgccctactttgagggaaggttcaaccagggtgcggttcaggtgccggttgtgtggcagagaagggcataatagtcgaacatgtggaaaaccaaagtccgagaaggagcacaaacaacgacctcaccactgcagccgatgtggtgaaaagggacataaccggcgcaactgccccacatccactgatttgggtagtgatgcttcaggctatgtggttaacaaagttaatggctctaattcagctgtttatcaatgtagtatatgcttagaaaaggggcataacagacgaacatgcccgaaaagaaaggctaccttactaaaatgaaaagtgtgagtaaaattaaaagaaaggctatcttttatgcctgtgttttttctatttctctattttgtattaattcgttcaaacatgctctaaaacattttagcggattttaaaacctgagtttcg

SEQ ID NO: 77608 - DNA, 1638 bp, Zea Mays
ccgagccgaacgggcgtgcgccatgcgcatgcgaccctgacgagcaacgacaaccacagagcccaaccgggaggaggatcggtaccagctcacggcggcgtcagcaccacacgccgccgccgccgcccacccccttcccgacaggcacgcttcttgcgcctcttgtgggatgctactacggataacgtacgcccaacccacgccttcggcggcggcccagttgaggctccctgggccgcgtttacgccgacgccgcgtcgctgcttccgcggcggacggcgccggcaattcaagctctccggagtacatatccaattacagagaagggaaagcagaggtcttgggtcggtccaagtgggcagtactaccgtgagctgccttgccccagctgtaggggtagaggttacactccatgcaaggagtgtggaatagatagatcaagtttggactgccctatgtgcaatggcaaggggattcaaacttgtctacaatgtagtggagagtgtgtgatatggcaagaatctgttgatgaacagccatgggagaaagttcggtcaagatcgactgcatattgttttttctgaaaatgttcagggatgaactgagactgcgttatggctttgaattgttgaacccgtcagcattaaagtattttcagtgactattactgatgtctgaagggattacatgatatggttcttatacacggcaaattgaaatatatccttttggattcctgtgcatacttgtgttctagaaaaatattcctgtgcacacattgtcatgtattctttttgtatttgcagttctcccttgaaagtaaaagaagatgacgaagttgacaagttagagataaatatcaacaaccccaaaagatcaaagcgtacttatgcatctacttcaccggaagttgccaagaagattagccggtctttaagaagtctaaatgctcaaacaggattgtttactaagcacatgaagattatacaccaagacccagaattgcgtgctcaaagagttgctgcaatcaagagaacaaaaggaactgatgttgcaagaaagcgtgcttctgaaattcagaaggcattcttcagtgatcctgagaaccggctcaagagaagcattgccatgaaaggggtgaaattttactgcagcaaatgtgggcaagaaggacatagaagcttttattgccctactttgagggaaggttcaaccagggtgcggttcaggtgccggttgtgtggcagagaagggcataatagtcgaacatgtggaaaaccaaagtccgagaaggagcacaaacaacgacctcaccactgcagccgatgtggtgaaaagggacataaccggcgcaactgccccacatccactgatttgggtagtgatgcttcaggctatgtggttaacaaagttaatggctctaattcagctgtttatcaatgtagtatatgcttagaaaaggggcataacagacgaacatgcccgaaaagaaaggctaccttactaaaatgaaaagtgtgagtaaaattaaaagaaaggctatcttttatgcctgtgttttttctatttctctattttgtattaattcgttcaaacatgctctaaaacattttagcggattttaaaacctgagtttcg

SEQ ID NO: 77609 - DNA, 1516 bp, Zea Mays
ccgagccgaacgggcgtgcgccatgcgcatgcgaccctgacgagcaacgacaaccacagagcccaaccgggaggaggatcggtaccagctcacggcggcgtcagcaccacacgccgccgccgccgcccacccccttcccgacaggcacgcttcttgcgcctcttgtgggatgctactacggataacgtacgcccaacccacgccttcggcggcggcccagttgaggctccctgggccgcgtttacgccgacgccgcgtcgctgcttccgcggcggacggcgccggcaattcaagctctccgctccattgcgacccttcgccccacgcgtacctcctgggtccgggcgtcgaacccagtggctcactctcactgagtacatatccaattacagagaagggaaagcagaggtcttgggtcggtccaagtgggcagtactaccgtgagctgccttgccccagctgtaggggtagaggttacactccatgcaaggagtgtggaatagatagatcaagtttggactgccctatgtgcaatggcaaggggattcaaacttgtctacaatgtagtggagagtgtgtgatatggcaagaatctgttgatgaacagccatgggagaaagttcggtcaagggatgaactgagactgcgttatggctttgaattgttgaacccgtcagcattaaattctcccttgaaagtaaaagaagatgacgaagttgacaagttagagataaatatcaacaaccccaaaagatcaaagcgtacttatgcatctacttcaccggaagttgccaagaagattagccggtctttaagaagtctaaatgctcaaacaggattgtttactaagcacatgaagattatacaccaagacccagaattgcgtgctcaaagagttgctgcaatcaagagaacaaaaggaactgatgttgcaagaaagcgtgcttctgaaattcagaaggcattcttcagtgatcctgagaaccggctcaagagaagcattgccatgaaaggggtgaaattttactgcagcaaatgtgggcaagaaggacatagaagcttttattgccctactttgagggaaggttcaaccagggtgcggttcaggtgccggttgtgtggcagagaagggcataatagtcgaacatgtggaaaaccaaagtccgagaaggagcacaaacaacgacctcaccactgcagccgatgtggtgaaaagggacataaccggcgcaactgccccacatccactgatttgggtagtgatgcttcaggctatgtggttaacaaagttaatggctctaattcagctgtttatcaatgtagtatatgcttagaaaaggggcataacagacgaacatgcccgaaaagaaaggctaccttactaaaatgaaaagtgtgagtaaaattaaaagaaaggctatcttttatgcctgtgttttttctatttctctattttgtattaattcgttcaaacatgctctaaaacattttagcggattttaaaacctgagtttcg

SEQ ID NO: 77610 - DNA, 1582 bp, Zea Mays
ctcgcccgctccagtccggccgagccgaacgggcgtgcgccatgcgcatgcgaccctgacgagcaacgacaaccacagagcccaaccgggaggaggatcggtaccagctcacggcggcgtcagcaccacacgccgccgccgccgcccacccccttcccgacaggcacgcttcttgcgcctcttgtgggatgctactacggataacgtacgcccaacccacgccttcggcggcggcccagttgaggctccctgggccgcgtttacgccgacgccgcgtcgctgcttccgcggcggacggcgccggcaattcaagctctccgctccattgcgacccttcgccccacgcgtacctcctgggtccgggcgtcgaacccagtggctcactctcactgagtacatatccaattacagagaagggaaagcagaggtcttgggtcggtccaagtgggcagtactaccgtgagctgccttgccccagctgtaggggtagaggttacactccatgcaaggagtgtggaatagatagatcaagtttggactgccctatgtgcaatggcaaggggattcaaacttgtctacaatgtagtggagagtgtgtgatatggcaagaatctgttgatgaacagccatgggagaaagttcggtcaagggatgaactgagactgcgttatggctttgaattgttgaacccgtcagcattaaagtattttcagtgactattactgatgtctgaagggattacatgatatgttctcccttgaaagtaaaagaagatgacgaagttgacaagttagagataaatatcaacaaccccaaaagatcaaagcgtacttatgcatctacttcaccggaagttgccaagaagattagccggtctttaagaagtctaaatgctcaaacaggattgtttactaagcacatgaagattatacaccaagacccagaattgcgtgctcaaagagttgctgcaatcaagagaacaaaaggaactgatgttgcaagaaagcgtgcttctgaaattcagaaggcattcttcagtgatcctgagaaccggctcaagagaagcattgccatgaaaggggtgaaattttactgcagcaaatgtgggcaagaaggacatagaagcttttattgccctactttgagggaaggttcaaccagggtgcggttcaggtgccggttgtgtggcagagaagggcataatagtcgaacatgtggaaaaccaaagtccgagaaggagcacaaacaacgacctcaccactgcagccgatgtggtgaaaagggacataaccggcgcaactgccccacatccactgatttgggtagtgatgcttcaggctatgtggttaacaaagttaatggctctaattcagctgtttatcaatgtagtatatgcttagaaaaggggcataacagacgaacatgcccgaaaagaaaggctaccttactaaaatgaaaagtgtgagtaaaattaaaagaaaggctatcttttatgcctgtgttttttctatttctctattttgtattaattcgttcaaacatgctctaaaacattttagcggattttaaaacctgagtttcg

SEQ ID NO: 77611 - DNA, 1415 bp, Zea Mays
ggccgctcgcccgctccagtccggccgagccgaacgggcgtgcgccatgcgcatgcgaccctgacgagcaacgacaaccacagagcccaaccgggaggaggatcggtaccagctcacggcggcgtcagcaccacacgccgccgccgccgcccacccccttcccgacaggcacgcttcttgcgcctcttgtgggatgctactacggataacgtacgcccaacccacgccttcggcggcggcccagttgaggctccctgggccgcgtttacgccgacgccgcgtcgctgcttccgcggcggacggcgccggcaattcaagctctccggagtacatatccaattacagagaagggaaagcagaggtcttgggtcggtccaagtgggcagtactaccgtgagctgccttgccccagctgtaggggtagaggttacactccatgcaaggagtgtggaatagatagatcaagtttggactgccctatgtgcaatggcaaggggattcaaacttgtctacaatgtagtggagagtgtgtgatatggcaagaatctgttgatgaacagccatgggagaaagttcggtcaagttctcccttgaaagtaaaagaagatgacgaagttgacaagttagagataaatatcaacaaccccaaaagatcaaagcgtacttatgcatctacttcaccggaagttgccaagaagattagccggtctttaagaagtctaaatgctcaaacaggattgtttactaagcacatgaagattatacaccaagacccagaattgcgtgctcaaagagttgctgcaatcaagagaacaaaaggaactgatgttgcaagaaagcgtgcttctgaaattcagaaggcattcttcagtgatcctgagaaccggctcaagagaagcattgccatgaaaggggtgaaattttactgcagcaaatgtgggcaagaaggacatagaagcttttattgccctactttgagggaaggttcaaccagggtgcggttcaggtgccggttgtgtggcagagaagggcataatagtcgaacatgtggaaaaccaaagtccgagaaggagcacaaacaacgacctcaccactgcagccgatgtggtgaaaagggacataaccggcgcaactgccccacatccactgatttgggtagtgatgcttcaggctatgtggttaacaaagttaatggctctaattcagctgtttatcaatgtagtatatgcttagaaaaggggcataacagacgaacatgcccgaaaagaaaggctaccttactaaaatgaaaagtgtgagtaaaattaaaagaaaggctatcttttatgcctgtgttttttctatttctctattttgtattaattcgttcaaacatgctctaaaacattttagcggattttaaaacctgagtttcg

SEQ ID NO: 77612 - DNA, 1567 bp, Zea Mays
cccgggagcgtggggtcggtttctggagcgacgtgtcttggaaccggacggatcggcaacgttgattccgctgtggcctgtggccgctcgcccgctccagtccggccgagccgaacgggcgtgcgccatgcgcatgcgaccctgacgagcaacgacaaccacagagcccaaccgggaggaggatcggtaccagctcacggcggcgtcagcaccacacgccgccgccgccgcccacccccttcccgacaggcacgcttcttgcgcctcttgtgggatgctactacggataacgtacgcccaacccacgccttcggcggcggcccagttgaggctccctgggccgcgtttacgccgacgccgcgtcgctgcttccgcggcggacggcgccggcaattcaagctctccgctccattgcgacccttcgccccacgcgtacctcctgggtccgggcgtcgaacccagtggctcactctcactgagtacatatccaattacagagaagggaaagcagaggtcttgggtcggtccaagtgggcagtactaccgtgagctgccttgccccagctgtaggggtagaggttacactccatgcaaggagtgtggaatagatagatcaagtttggactgccctatgtgcaatggcaaggggattcaaacttgtctacaatgtagtggagagtgtgtgatatggcaagaatctgttgatgaacagccatgggagaaagttcggtcaagttctcccttgaaagtaaaagaagatgacgaagttgacaagttagagataaatatcaacaaccccaaaagatcaaagcgtacttatgcatctacttcaccggaagttgccaagaagattagccggtctttaagaagtctaaatgctcaaacaggattgtttactaagcacatgaagattatacaccaagacccagaattgcgtgctcaaagagttgctgcaatcaagagaacaaaaggaactgatgttgcaagaaagcgtgcttctgaaattcagaaggcattcttcagtgatcctgagaaccggctcaagagaagcattgccatgaaaggggtgaaattttactgcagcaaatgtgggcaagaaggacatagaagcttttattgccctactttgagggaaggttcaaccagggtgcggttcaggtgccggttgtgtggcagagaagggcataatagtcgaacatgtggaaaaccaaagtccgagaaggagcacaaacaacgacctcaccactgcagccgatgtggtgaaaagggacataaccggcgcaactgccccacatccactgatttgggtagtgatgcttcaggctatgtggttaacaaagttaatggctctaattcagctgtttatcaatgtagtatatgcttagaaaaggggcataacagacgaacatgcccgaaaagaaaggctaccttactaaaatgaaaagtgtgagtaaaattaaaagaaaggctatcttttatgcctgtgttttttctatttctctattttgtattaattcgttcaaacatgctctaaaacattttagcggattttaaaacctgagtttcg

SEQ ID NO: 77613 - DNA, 1773 bp, Zea Mays
aagtctcaagcacgagacggccagagaaccagattccgttcccctgaacccgatcgagatggagtcggaagctgacagagccgcggcaccggcgccggcgccggcagttgccgcggagaccagcgacgacgccatccaggaggagtctccagccacggccccttcctcagacggaaagcccggatcaggggcggcggcggccccggcgccggaggtggaggtgcagctgttccggcgcgggcgtccggtggcagtgttccggtcgcagctgggcgggtatacgcaggaccagctggaggtgggcgacgtcctggagcagcacggcctcaagtccgtcttcgccttcgaccctgccgcccgcaaacgcggcgtcgccatccgcttcaaccctcgcaacggccgctccctcctcccctacgcccctggttccacgatcttcctagacggcgagcccaaggattctttgctgaagcccatcacgaagatggtgattggggtcgccgctatgactgtggtagctgcagtcctattgaaggaggccaagatgcccgagtggcttcagtcatccaagctgggcgccgtgagcttcccaccatgggtgctggcttgcatggtcatcgtgttcatgaggctccggaagagaaccatggatgcaatgaagaagtttggctgggtctcatgaggagtacatatccaattacagagaagggaaagcagaggtcttgggtcggtccaagtgggcagtactaccgtgagctgccttgccccagctgtaggggtagaggttacactccatgcaaggagtgtggaatagatagatcaagtttggactgccctatgtgcaatggcaaggggattcaaacttgtctacaatgtagtggagagtgtgtgatatggcaagaatctgttgatgaacagccatgggagaaagttcggtcaagttctcccttgaaagtaaaagaagatgacgaagttgacaagttagagataaatatcaacaaccccaaaagatcaaagcgtacttatgcatctacttcaccggaagttgccaagaagattagccggtctttaagaagtctaaatgctcaaacaggattgtttactaagcacatgaagattatacaccaagacccagaattgcgtgctcaaagagttgctgcaatcaagagaacaaaaggaactgatgttgcaagaaagcgtgcttctgaaattcagaaggcattcttcagtgatcctgagaaccggctcaagagaagcattgccatgaaaggggtgaaattttactgcagcaaatgtgggcaagaaggacatagaagcttttattgccctactttgagggaaggttcaaccagggtgcggttcaggtgccggttgtgtggcagagaagggcataatagtcgaacatgtggaaaaccaaagtccgagaaggagcacaaacaacgacctcaccactgcagccgatgtggtgaaaagggacataaccggcgcaactgccccacatccactgatttgggtagtgatgcttcaggctatgtggttaacaaagttaatggctctaattcagctgtttatcaatgtagtatatgcttagaaaaggggcataacagacgaacatgcccgaaaagaaaggctaccttactaaaatgaaaagtgtgagtaaaattaaaagaaaggctatcttttatgcctgtgttttttctatttctctattttgtattaattcgttcaaacatgctctaaaacattttagcggattttaaaacctgagtttcg

SEQ ID NO: 77614 - DNA, 2020 bp, Zea Mays
aagtctcaagcacgagacggccagagaaccagattccgttcccctgaacccgatcgagatggagtcggaagctgacagagccgcggcaccggcgccggcgccggcagttgccgcggagaccagcgacgacgccatccaggaggagtctccagccacggccccttcctcagacggaaagcccggatcaggggcggcggcggccccggcgccggaggtggaggtgcagctgttccggcgcgggcgtccggtggcagtgttccggtcgcagctgggcgggtatacgcaggaccagctggaggtgggcgacgtcctggagcagcacggcctcaagtccgtcttcgccttcgaccctgccgcccgcaaacgcggcgtcgccatccgcttcaaccctcgcaacggccgctccctcctcccctacgcccctggttccacgatcttcctagacggcgagcccaaggattctttgctgaagcccatcacgaagatggtgattggggtcgccgctatgactgtggtagctgcagtcctattgaaggaggccaagatgcccgagtggcttcagtcatccaagctgggcgccgtgagcttcccaccatgggtgctggcttgcatggtcatcgtgttcatgaggctccggaagagaaccatggatgcaatgaagaagtttggctgggtctcatgaggagtacatatccaattacagagaagggaaagcagaggtcttgggtcggtccaagtgggcagtactaccgtgagctgccttgccccagctgtaggggtagaggttacactccatgcaaggagtgtggaatagatagatcaagtttggactgccctatgtgcaatggcaaggggattcaaacttgtctacaatgtagtggagagtgtgtgatatggcaagaatctgttgatgaacagccatgggagaaagttcggtcaagatcgactgcatattgttttttctgaaaatgttcagggatgaactgagactgcgttatggctttgaattgttgaacccgtcagcattaaagtattttcagtgactattactgatgtctgaagggattacatgatatggttcttatacacggcaaattgaaatatatccttttggattcctgtgcatacttgtgttctagaaaaatattcctgtgcacacattgtcatgtattctttttgtatttgcagttctcccttgaaagtaaaagaagatgacgaagttgacaagttagagataaatatcaacaaccccaaaagatcaaagcgtacttatgcatctacttcaccggaagttgccaagaagattagccggtctttaagaagtctaaatgctcaaacaggattgtttactaagcacatgaagattatacaccaagacccagaattgcgtgctcaaagagttgctgcaatcaagagaacaaaaggaactgatgttgcaagaaagcgtgcttctgaaattcagaaggcattcttcagtgatcctgagaaccggctcaagagaagcattgccatgaaaggggtgaaattttactgcagcaaatgtgggcaagaaggacatagaagcttttattgccctactttgagggaaggttcaaccagggtgcggttcaggtgccggttgtgtggcagagaagggcataatagtcgaacatgtggaaaaccaaagtccgagaaggagcacaaacaacgacctcaccactgcagccgatgtggtgaaaagggacataaccggcgcaactgccccacatccactgatttgggtagtgatgcttcaggctatgtggttaacaaagttaatggctctaattcagctgtttatcaatgtagtatatgcttagaaaaggggcataacagacgaacatgcccgaaaagaaaggctaccttactaaaatgaaaagtgtgagtaaaattaaaagaaaggctatcttttatgcctgtgttttttctatttctctattttgtattaattcgttcaaacatgctctaaaacattttagcggattttaaaacctgagtttcg

SEQ ID NO: 77615 - DNA, 1827 bp, Zea Mays
aagtctcaagcacgagacggccagagaaccagattccgttcccctgaacccgatcgagatggagtcggaagctgacagagccgcggcaccggcgccggcgccggcagttgccgcggagaccagcgacgacgccatccaggaggagtctccagccacggccccttcctcagacggaaagcccggatcaggggcggcggcggccccggcgccggaggtggaggtgcagctgttccggcgcgggcgtccggtggcagtgttccggtcgcagctgggcgggtatacgcaggaccagctggaggtgggcgacgtcctggagcagcacggcctcaagtccgtcttcgccttcgaccctgccgcccgcaaacgcggcgtcgccatccgcttcaaccctcgcaacggccgctccctcctcccctacgcccctggttccacgatcttcctagacggcgagcccaaggattctttgctgaagcccatcacgaagatggtgattggggtcgccgctatgactgtggtagctgcagtcctattgaaggaggccaagatgcccgagtggcttcagtcatccaagctgggcgccgtgagcttcccaccatgggtgctggcttgcatggtcatcgtgttcatgaggctccggaagagaaccatggatgcaatgaagaagtttggctgggtctcatgaggagtacatatccaattacagagaagggaaagcagaggtcttgggtcggtccaagtgggcagtactaccgtgagctgccttgccccagctgtaggggtagaggttacactccatgcaaggagtgtggaatagatagatcaagtttggactgccctatgtgcaatggcaaggggattcaaacttgtctacaatgtagtggagagtgtgtgatatggcaagaatctgttgatgaacagccatgggagaaagttcggtcaagggatgaactgagactgcgttatggctttgaattgttgaacccgtcagcattaaattctcccttgaaagtaaaagaagatgacgaagttgacaagttagagataaatatcaacaaccccaaaagatcaaagcgtacttatgcatctacttcaccggaagttgccaagaagattagccggtctttaagaagtctaaatgctcaaacaggattgtttactaagcacatgaagattatacaccaagacccagaattgcgtgctcaaagagttgctgcaatcaagagaacaaaaggaactgatgttgcaagaaagcgtgcttctgaaattcagaaggcattcttcagtgatcctgagaaccggctcaagagaagcattgccatgaaaggggtgaaattttactgcagcaaatgtgggcaagaaggacatagaagcttttattgccctactttgagggaaggttcaaccagggtgcggttcaggtgccggttgtgtggcagagaagggcataatagtcgaacatgtggaaaaccaaagtccgagaaggagcacaaacaacgacctcaccactgcagccgatgtggtgaaaagggacataaccggcgcaactgccccacatccactgatttgggtagtgatgcttcaggctatgtggttaacaaagttaatggctctaattcagctgtttatcaatgtagtatatgcttagaaaaggggcataacagacgaacatgcccgaaaagaaaggctaccttactaaaatgaaaagtgtgagtaaaattaaaagaaaggctatcttttatgcctgtgttttttctatttctctattttgtattaattcgttcaaacatgctctaaaacattttagcggattttaaaacctgagtttcg

SEQ ID NO: 77616 - DNA, 1995 bp, Zea Mays
cacttaggcacttagcacctagttctctcaagtctcaagcacgagacggccagagaaccagattccgttcccctgaacccgatcgagatggagtcggaagctgacagagccgcggcaccggcgccggcgccggcagttgccgcggagaccagcgacgacgccatccaggaggagtctccagccacggccccttcctcagacggaaagcccggatcaggggcggcggcggccccggcgccggaggtggaggtgcagctgttccggcgcgggcgtccggtggcagtgttccggtcgcagctgggcgggtatacgcaggaccagctggaggtgggcgacgtcctggagcagcacggcctcaagtccgtcttcgccttcgaccctgccgcccgcaaacgcggcgtcgccatccgcttcaaccctcgcaacggccgctccctcctcccctacgcccctggttccacgatcttcctagacggcgagcccaaggattctttgctgaagcccatcacgaagatggtgattggggtcgccgctatgactgtggtagctgcagtcctattgaaggaggccaagatgcccgagtggcttcagtcatccaagctgggcgccgtgagcttcccaccatgggtgctggcttgcatggtcatcgtgttcatgaggctccggaagagaaccatggatgcaatgaagaagtttggctgggtctcatgaggagtacatatccaattacagagaagggaaagcagaggtcttgggtcggtccaagtgggcagtactaccgtgagctgccttgccccagctgtaggggtagaggttacactccatgcaaggagtgtggaatagatagatcaagtttggactgccctatgtgcaatggcaaggggattcaaacttgtctacaatgtagtggagagtgtgtgatatggcaagaatctgttgatgaacagccatgggagaaagttcggtcaagggatgaactgagactgcgttatggctttgaattgttgaacccgtcagcattaaagtattttcagtgactattactgatgtctgaagggattacatgatatggttcttatacacggcaaattgaaatatatccttttggattcctgtgcatacttgtgttctagaaaaatattcctgtgcacacattgtcatgtattctttttgtatttgcagttctcccttgaaagtaaaagaagatgacgaagttgacaagttagagataaatatcaacaaccccaaaagatcaaagcgtacttatgcatctacttcaccggaagttgccaagaagattagccggtctttaagagattgtttactaagcacatgaagattatacaccaagacccagaattgcgtgctcaaagagttgctgcaatcaagagaacaaaaggaactgatgttgcaagaaagcgtgcttctgaaattcagaaggcattcttcagtgatcctgagaaccggctcaagagaagcattgccatgaaaggggtgaaattttactgcagcaaatgtgggcaagaaggacatagaagcttttattgccctactttgagggaaggttcaaccagggtgcggttcaggtgccggttgtgtggcagagaagggcataatagtcgaacatgtggaaaaccaaagtccgagaaggagcacaaacaacgacctcaccactgcagccgatgtggtgaaaagggacataaccggcgcaactgccccacatccactgatttgggtagtgatgcttcaggctatgtggttaacaaagttaatggctctaattcagctgtttatcaatgtagtatatgcttagaaaaggggcataacagacgaacatgcccgaaaagaaaggctaccttactaaaatgaaaagtgtgagtaaaattaaaagaaaggctatcttttatgcctgtgttttttctatttctctattttgtattaattcgttcaaacatgctctaaaacattttagcggattttaaaacctgagtttcg

SEQ ID NO: 77617 - DNA, 1610 bp, Zea Mays
cattcattttttttctttgtctagagacttgaacacaagatcaatcaattttggtatcactatttttgtgaactataggaaccagagttgtcttgtgacaagtctaagcatcatagaagttttgaatctttctaattggttgttgatctgtccccaggtaatcatacacatgatttgtttgccactactttttagatgcacaagatcctatgctgtacatgccaatgactactcctgctgtttcttattgccaataagcacaagcacacttgagaaccggccatcaccatggagatgagactctttatcgcccttcagtgcgtgcagtgcgccaccatgcaggtgaagcagcagaagaagagcagcaacaagtgggtgtgtgtggtgtgcaaccagcgtcagtctgtgcttcatgtccatgccaggggctatcgtgctgctgatctccgccgcttcgtccaggacaccaaccttgcccgtggccgccgggagttcgcaccgttggccgagcccgacgtggacagggatctggcggcagttgaggagggagatgtgttccctatcgagaagagtcagacggaatggtccgagtatctggacgatccaggggagacaggtaaaggttgtggtggccttggcgcagatgcttcagatggagaatcggatgaaggaattgaggtgataactgaactgcctcagaaaagacctaaagttaggcctcgcaaagcccaatcagatgtagtaggaaagagaaccaagctgtcaacacatcccactttatgtaataagaggcagcagatcaagcaaggatcaaatccccactgtgcaactactactgctgaagcacaaggatcaaaatggaccaagtatttggacacgagccgttttggtgggaggaaatgcttcgatacctctggtctgcactggactgaacatgatgaatctgccactactgaggctactactgacgtagtggtggatgatgagaatcacagggtgcatccacggaatgtcacaagctcagtgtgaggtggctgagcacttgagctgaggaaaattcttgtttctgttctgcatcaactagagtcacctgaccatgtggcacagcacagagaagagccgaagacgtacagcatggatcacaggagcagtacaccttgatgactgactgttgtctgttggtacctataatcctgtgacaggtctgaacaaccgagtgattgattgatgtctccggcttccctgcagccaaaatgacgaatgggttaccctgcttgaatcctttgccactgcgcttgcgtgctactactattccatgcaaaacaacgtgttcggaaccaaaattaaagttccgaacatcgctgtgatgaatgggtgaatcgtcacctttttctttgaaatagcaactgtatgctcgaagaacagctgtgctggtccagctatctgggtaccgtactccctaccccgattgaactgtatttgggtcaaagtaatgggggagatactctttccatgctaggatataaggtgtaactacctttaattctaagatcaagaaatatatttaattctctttatcaataaagtattgttatgagcgtgcttatatt

SEQ ID NO: 77618 - DNA, 1442 bp, Zea Mays
acctggagcaactgcgggctgcactcggtctcgccgtcgaactcgaagacgaacctcggactactcctgctgtttcttattgccaataagcacaagcacacttgagaaccggccatcaccatggagatgagactctttatcgcccttcagtgcgtgcagtgcgccaccatgcaggtgaagcagcagaagaagagcagcaacaagtgggtgtgtgtggtgtgcaaccagcgtcagtctgtgcttcatgtccatgccaggggctatcgtgctgctgatctccgccgcttcgtccaggacaccaaccttgcccgtggccgccgggagttcgcaccgttggccgagcccgacgtggacagggatctggcggcagttgaggagggagatgtgttccctatcgagaagagtcagacggaatggtccgagtatctggacgatccaggggagacaggtaaaggttgtggtggccttggcgcagatgcttcagatggagaatcggatgaaggaattgaggtgataactgaactgcctcagaaaagacctaaagttaggcctcgcaaagcccaatcagatgtagtaggaaagagaaccaagctgtcaacacatcccactttatgtaataagaggcagcagatcaagcaaggatcaaatccccactgtgcaactactactgctgaagcacaaggatcaaaatggaccaagtatttggacacgagccgttttggtgggaggaaatgcttcgatacctctggtctgcactggactgaacatgatgaatctgccactactgaggctactactgacgtagtggtggatgatgagaatcacagggtgcatccacggaatgtcacaagctcagtgtgaggtggctgagcacttgagctgaggaaaattcttgtttctgttctgcatcaactagagtcacctgaccatgtggcacagcacagagaagagccgaagacgtacagcatggatcacaggagcagtacaccttgatgactgactgttgtctgttggtacctataatcctgtgacaggtctgaacaaccgagtgattgattgatgtctccggcttccctgcagccaaaatgacgaatgggttaccctgcttgaatcctttgccactgcgcttgcgtgctactactattccatgcaaaacaacgtgttcggaaccaaaattaaagttccgaacatcgctgtgatgaatgggtgaatcgtcacctttttctttgaaatagcaactgtatgctcgaagaacagctgtgctggtccagctatctgggtaccgtactccctaccccgattgaactgtatttgggtcaaagtaatgggggagatactctttccatgctaggatataaggtgtaactacctttaattctaagatcaagaaatatatttaattctctttatcaataaagtattgttatgagcgtgcttatatt

SEQ ID NO: 77619 - DNA, 1528 bp, Zea Mays
cttcatgctccccttaacctggagcaactgcgggctgcactcggtctcgccgtcgaactcgaagacgaacctcgggtaatcatacacatgatttgtttgccactactttttagatgcacaagatcctatgctgtacatgccaatgactactcctgctgtttcttattgccaataagcacaagcacacttgagaaccggccatcaccatggagatgagactctttatcgcccttcagtgcgtgcagtgcgccaccatgcaggtgaagcagcagaagaagagcagcaacaagtgggtgtgtgtggtgtgcaaccagcgtcagtctgtgcttcatgtccatgccaggggctatcgtgctgctgatctccgccgcttcgtccaggacaccaaccttgcccgtggccgccgggagttcgcaccgttggccgagcccgacgtggacagggatctggcggcagttgaggagggagatgtgttccctatcgagaagagtcagacggaatggtccgagtatctggacgatccaggggagacaggtaaaggttgtggtggccttggcgcagatgcttcagatggagaatcggatgaaggaattgaggtgataactgaactgcctcagaaaagacctaaagttaggcctcgcaaagcccaatcagatgtagtaggaaagagaaccaagctgtcaacacatcccactttatgtaataagaggcagcagatcaagcaaggatcaaatccccactgtgcaactactactgctgaagcacaaggatcaaaatggaccaagtatttggacacgagccgttttggtgggaggaaatgcttcgatacctctggtctgcactggactgaacatgatgaatctgccactactgaggctactactgacgtagtggtggatgatgagaatcacagggtgcatccacggaatgtcacaagctcagtgtgaggtggctgagcacttgagctgaggaaaattcttgtttctgttctgcatcaactagagtcacctgaccatgtggcacagcacagagaagagccgaagacgtacagcatggatcacaggagcagtacaccttgatgactgactgttgtctgttggtacctataatcctgtgacaggtctgaacaaccgagtgattgattgatgtctccggcttccctgcagccaaaatgacgaatgggttaccctgcttgaatcctttgccactgcgcttgcgtgctactactattccatgcaaaacaacgtgttcggaaccaaaattaaagttccgaacatcgctgtgatgaatgggtgaatcgtcacctttttctttgaaatagcaactgtatgctcgaagaacagctgtgctggtccagctatctgggtaccgtactccctaccccgattgaactgtatttgggtcaaagtaatgggggagatactctttccatgctaggatataaggtgtaactacctttaattctaagatcaagaaatatatttaattctctttatcaataaagtattgttatgagcgtgcttatatt

SEQ ID NO: 77620 - DNA, 2407 bp, Zea Mays
atggacccgtgcccgttcgtgcgggtgctggtcggcaacctggcgctgaagatgccggcatcaggggggaaggaacttggtgccactgccactaaccgcgagcgcaggtcgctgttgctgcggcaggagaacttgcacgggctgcttcatgctccccttaacctggagctgcttcatgctccccttaacctggagcacctgcgggctgtactcggtctcgccgtcgaactcgaagacgaacctcgggtcaggctcgcccaggacggtcgccgctggctcatatccttgccgggtgtgccagagttcgctgagcgcgcggaggcggtgggagtagtcggcgacggcgaggaagcaccgcgctgactgccacaccgtcaggatctgcggcagccggtgcagcgtctgcagcctaagcgcgtccgcctgcaatgtaacccatgtacgccgcaagaagagacggtgtagagacgagtgcgccagacggcgtctgcgcaggcgaacgactactcctgctgtttcttattgccaataagcacaagcacacttgagaaccggccatcaccatggagatgagactctttatcgcccttcagtgcgtgcagtgcgccaccatgcaggtgaagcagcagaagaagagcagcaacaagtgggtgtgtgtggtgtgcaaccagcgtcagtctgtgcttcatgtccatgccaggggctatcgtgctgctgatctccgccgcttcgtccaggacaccaaccttgcccgtggccgccgggagttcgcaccgttggccgagcccgacgtggacagggatctggcggcagttgaggagggagatgtgttccctatcgagaagagtcagacggaatggtccgagtatctggacgatccaggggagacaggtaaaggttgtggtggccttggcgcagatgcttcagatggagaatcggatgaaggaattgaggtgataactgaactgcctcagaaaagacctaaagttaggcctcgcaaagcccaatcagatgtagtaggaaagagaaccaagctgtcaacacatcccactttatgtaataagaggcagcagatcaagcaaggatcaaatccccactgtgcaactactactgctgaagcacaaggatcaaaatggaccaagtatttggacacgagccgttttggtgggaggaaatgcttcgatacctctggtctgcactggactgaacatgatgaatctgccactactgaggctactactgacgtagtggtggatgatgaggtgcaccctgatttcatctgatctcatgttggtttgaaatgccaaatgctttgtgttttggtagtgtgtagtttggtagccataaattgtgctgctggcaattcacattgtcaagacaaaggatgtgcagtacttggtacccgagggaagaagactgttgttcccaagatgttatccagtatgatgggcaattcatagtaaaagcaccgtgctagtcaaaatcagcccaagactattgggttgttttatctctgatcaaaacacgagtatagtcaaactcggtcctctaatcaaatctggctaccgaaacatttttttcacgtgccttgtttacggtcgccggggcatggagccagaaaccgtatttcggcgttgcaacgtgatccagggtggatttggtggtagcggattccaaatactccctctgtttattttttatttatcgcgttttagttcaaaaatgaactggctaatgataaatattccatgtgaatctccaaacgggctactctctggtggcagaatcacagggtgcatccacggaatgtcacaagctcagtgtgaggtggctgagcacttgagctgaggaaaattcttgtttctgttctgcatcaactagagtcacctgaccatgtggcacagcacagagaagagccgaagacgtacagcatggatcacaggagcagtacaccttgatgactgactgttgtctgttggtacctataatcctgtgacaggtctgaacaaccgagtgattgattgatgtctccggcttccctgcagccaaaatgacgaatgggttaccctgcttgaatcctttgccactgcgcttgcgtgctactactattccatgcaaaacaacgtgttcggaaccaaaattaaagttccgaacatcgctgtgatgaatgggtgaatcgtcacctttttctttgaaatagcaactgtatgctcgaagaacagctgtgctggtccagctatctgggtaccgtactccctaccccgattgaactgtatttgggtcaaagtaatgggggagatactctttccatgctaggatataaggtgtaactacctttaattctaagatcaagaaatatatttaattctctttatcaataaagtattgttatgagcgtgcttatatt

SEQ ID NO: 77621 - DNA, 2550 bp, Zea Mays
tttttttaatttaattttagctaggcgtgggatgcacgtgggaatgagaataggctttgtgggatagagaatgagaaagatacgtgatagccgggaatggaaatgtgaatggaaatgtgaatgggctttgcagggagggggaatggacggtccagataaatcgtagcggaaattgtagtctactatactttcgagttttgcaaaaaaaaaaaaaatcctcagcccgtctcctttccaaatttttcacccggcgtctgctcgcctgcgagacgccgcgaccgcgatcaccctctcgggtttctcggacgcgccgccatcgccactccgccactcgcgggttcgttggatcgacgccaccgtcacctcgcgccgcccagaggaggacgcctgcttctcccccgacgccgacgacccccgccaccgtcttccgcgccaacgccgccgtcgccatcacctcgcgtcgcgccatacgcccaggtctccgccgacgctgtcacacgccaggagctcgagtcttcgtcggtccctttgccagatcttcatcgtgcccttcaccagcgacgagcacccaacaggtaatcatacacatgatttgtttgccactactttttagatgcacaagatcctatgctgtacatgccaatgactactcctgctgtttcttattgccaataagcacaagcacacttgagaaccggccatcaccatggagatgagactctttatcgcccttcagtgcgtgcagtgcgccaccatgcaggtgaagcagcagaagaagagcagcaacaagtgggtgtgtgtggtgtgcaaccagcgtcagtctgtgcttcatgtccatgccaggggctatcgtgctgctgatctccgccgcttcgtccaggacaccaaccttgcccgtggccgccgggagttcgcaccgttggccgagcccgacgtggacagggatctggcggcagttgaggagggagatgtgttccctatcgagaagagtcagacggaatggtccgagtatctggacgatccaggggagacaggtaaaggttgtggtggccttggcgcagatgcttcagatggagaatcggatgaaggaattgaggtgataactgaactgcctcagaaaagacctaaagttaggcctcgcaaagcccaatcagatgtagtaggaaagagaaccaagctgtcaacacatcccactttatgtaataagaggcagcagatcaagcaaggatcaaatccccactgtgcaactactactgctgaagcacaaggatcaaaatggaccaagtatttggacacgagccgttttggtgggaggaaatgcttcgatacctctggtctgcactggactgaacatgatgaatctgccactactgaggctactactgacgtagtggtggatgatgaggtgcaccctgatttcatctgatctcatgttggtttgaaatgccaaatgctttgtgttttggtagtgtgtagtttggtagccataaattgtgctgctggcaattcacattgtcaagacaaaggatgtgcagtacttggtacccgagggaagaagactgttgttcccaagatgttatccagtatgatgggcaattcatagtaaaagcaccgtgctagtcaaaatcagcccaagactattgggttgttttatctctgatcaaaacacgagtatagtcaaactcggtcctctaatcaaatctggctaccgaaacatttttttcacgtgccttgtttacggtcgccggggcatggagccagaaaccgtatttcggcgttgcaacgtgatccagggtggatttggtggtagcggattccaaatactccctctgtttattttttatttatcgcgttttagttcaaaaatgaactggctaatgataaatattccatgtgaatctccaaacgggctactctctggtggcagaatcacagggtgcatccacggaatgtcacaagctcagtgtgaggtggctgagcacttgagctgaggaaaattcttgtttctgttctgcatcaactagagtcacctgaccatgtggcacagcacagagaagagccgaagacgtacagcatggatcacaggagcagtacaccttgatgactgactgttgtctgttggtacctataatcctgtgacaggtctgaacaaccgagtgattgattgatgtctccggcttccctgcagccaaaatgacgaatgggttaccctgcttgaatcctttgccactgcgcttgcgtgctactactattccatgcaaaacaacgtgttcggaaccaaaattaaagttccgaacatcgctgtgatgaatgggtgaatcgtcacctttttctttgaaatagcaactgtatgctcgaagaacagctgtgctggtccagctatctgggtaccgtactccctaccccgattgaactgtatttgggtcaaagtaatgggggagatactctttccatgctaggatataaggtgtaactacctttaattctaagatcaagaaatatatttaattctctttatcaataaagtattgttatgagcgtgcttatatt

SEQ ID NO: 77622 - DNA, 2217 bp, Zea Mays
tttttttaatttaattttagctaggcgtgggatgcacgtgggaatgagaataggctttgtgggatagagaatgagaaagatacgtgatagccgggaatggaaatgtgaatggaaatgtgaatgggctttgcagggagggggaatggacggtccagataaatcgtagcggaaattgtagtctactatactttcgagttttgcaaaaaaaaaaaaaatcctcagcccgtctcctttccaaatttttcacccggcgtctgctcgcctgcgagacgccgcgaccgcgatcaccctctcgggtttctcggacgcgccgccatcgccactccgccactcgcgggttcgttggatcgacgccaccgtcacctcgcgccgcccagaggaggacgcctgcttctcccccgacgccgacgacccccgccaccgtcttccgcgccaacgccgccgtcgccatcacctcgcgtcgcgccatacgcccaggtctccgccgacgctgtcacacgccaggagctcgagtcttcgtcggtccctttgccagatcttcatcgtgcccttcaccagcgacgagcacccaacagagaggagaggattcgacgaaatggaggcgttggcgttggcttctctgttctggagacgcagcgacagccaaactccaaaacggaaatgagacagcgcttggagctgcgttaacaggaagaaggccagggctgaggtgacagttgggcatctatgtggccattcattttttttctttgtctagagacttggtaatcatacacatgatttgtttgccactactttttagatgcacaagatcctatgctgtacatgccaatgactactcctgctgtttcttattgccaataagcacaagcacacttgagaaccggccatcaccatggagatgagactctttatcgcccttcagtgcgtgcagtgcgccaccatgcaggtgaagcagcagaagaagagcagcaacaagtgggtgtgtgtggtgtgcaaccagcgtcagtctgtgcttcatgtccatgccaggggctatcgtgctgctgatctccgccgcttcgtccaggacaccaaccttgcccgtggccgccgggagttcgcaccgttggccgagcccgacgtggacagggatctggcggcagttgaggagggagatgtgttccctatcgagaagagtcagacggaatggtccgagtatctggacgatccaggggagacaggtaaaggttgtggtggccttggcgcagatgcttcagatggagaatcggatgaaggaattgaggtgataactgaactgcctcagaaaagacctaaagttaggcctcgcaaagcccaatcagatgtagtaggaaagagaaccaagctgtcaacacatcccactttatgtaataagaggcagcagatcaagcaaggatcaaatccccactgtgcaactactactgctgaagcacaaggatcaaaatggaccaagtatttggacacgagccgttttggtgggaggaaatgcttcgatacctctggtctgcactggactgaacatgatgaatctgccactactgaggctactactgacgtagtggtggatgatgagaatcacagggtgcatccacggaatgtcacaagctcagtgtgaggtggctgagcacttgagctgaggaaaattcttgtttctgttctgcatcaactagagtcacctgaccatgtggcacagcacagagaagagccgaagacgtacagcatggatcacaggagcagtacaccttgatgactgactgttgtctgttggtacctataatcctgtgacaggtctgaacaaccgagtgattgattgatgtctccggcttccctgcagccaaaatgacgaatgggttaccctgcttgaatcctttgccactgcgcttgcgtgctactactattccatgcaaaacaacgtgttcggaaccaaaattaaagttccgaacatcgctgtgatgaatgggtgaatcgtcacctttttctttgaaatagcaactgtatgctcgaagaacagctgtgctggtccagctatctgggtaccgtactccctaccccgattgaactgtatttgggtcaaagtaatgggggagatactctttccatgctaggatataaggtgtaactacctttaattctaagatcaagaaatatatttaattctctttatcaataaagtattgttatgagcgtgcttatatt

SEQ ID NO: 77623 - DNA, 2073 bp, Zea Mays
tttttttaatttaattttagctaggcgtgggatgcacgtgggaatgagaataggctttgtgggatagagaatgagaaagatacgtgatagccgggaatggaaatgtgaatggaaatgtgaatgggctttgcagggagggggaatggacggtccagataaatcgtagcggaaattgtagtctactatactttcgagttttgcaaaaaaaaaaaaaatcctcagcccgtctcctttccaaatttttcacccggcgtctgctcgcctgcgagacgccgcgaccgcgatcaccctctcgggtttctcggacgcgccgccatcgccactccgccactcgcgggttcgttggatcgacgccaccgtcacctcgcgccgcccagaggaggacgcctgcttctcccccgacgccgacgacccccgccaccgtcttccgcgccaacgccgccgtcgccatcacctcgcgtcgcgccatacgcccaggtctccgccgacgctgtcacacgccaggagctcgagtcttcgtcggtccctttgccagatcttcatcgtgcccttcaccagcgacgagcacccaacagagaggagaggattcgacgaaatggaggcgttggcgttggcttctctgttctggagacgcagcgacagccaaactccaaaacggaaatgagacagcgcttggagctgcgttaacagactactcctgctgtttcttattgccaataagcacaagcacacttgagaaccggccatcaccatggagatgagactctttatcgcccttcagtgcgtgcagtgcgccaccatgcaggtgaagcagcagaagaagagcagcaacaagtgggtgtgtgtggtgtgcaaccagcgtcagtctgtgcttcatgtccatgccaggggctatcgtgctgctgatctccgccgcttcgtccaggacaccaaccttgcccgtggccgccgggagttcgcaccgttggccgagcccgacgtggacagggatctggcggcagttgaggagggagatgtgttccctatcgagaagagtcagacggaatggtccgagtatctggacgatccaggggagacaggtaaaggttgtggtggccttggcgcagatgcttcagatggagaatcggatgaaggaattgaggtgataactgaactgcctcagaaaagacctaaagttaggcctcgcaaagcccaatcagatgtagtaggaaagagaaccaagctgtcaacacatcccactttatgtaataagaggcagcagatcaagcaaggatcaaatccccactgtgcaactactactgctgaagcacaaggatcaaaatggaccaagtatttggacacgagccgttttggtgggaggaaatgcttcgatacctctggtctgcactggactgaacatgatgaatctgccactactgaggctactactgacgtagtggtggatgatgagaatcacagggtgcatccacggaatgtcacaagctcagtgtgaggtggctgagcacttgagctgaggaaaattcttgtttctgttctgcatcaactagagtcacctgaccatgtggcacagcacagagaagagccgaagacgtacagcatggatcacaggagcagtacaccttgatgactgactgttgtctgttggtacctataatcctgtgacaggtctgaacaaccgagtgattgattgatgtctccggcttccctgcagccaaaatgacgaatgggttaccctgcttgaatcctttgccactgcgcttgcgtgctactactattccatgcaaaacaacgtgttcggaaccaaaattaaagttccgaacatcgctgtgatgaatgggtgaatcgtcacctttttctttgaaatagcaactgtatgctcgaagaacagctgtgctggtccagctatctgggtaccgtactccctaccccgattgaactgtatttgggtcaaagtaatgggggagatactctttccatgctaggatataaggtgtaactacctttaattctaagatcaagaaatatatttaattctctttatcaataaagtattgttatgagcgtgcttatatt

SEQ ID NO: 77624 - DNA, 2143 bp, Zea Mays
tttttttaatttaattttagctaggcgtgggatgcacgtgggaatgagaataggctttgtgggatagagaatgagaaagatacgtgatagccgggaatggaaatgtgaatggaaatgtgaatgggctttgcagggagggggaatggacggtccagataaatcgtagcggaaattgtagtctactatactttcgagttttgcaaaaaaaaaaaaaatcctcagcccgtctcctttccaaatttttcacccggcgtctgctcgcctgcgagacgccgcgaccgcgatcaccctctcgggtttctcggacgcgccgccatcgccactccgccactcgcgggttcgttggatcgacgccaccgtcacctcgcgccgcccagaggaggacgcctgcttctcccccgacgccgacgacccccgccaccgtcttccgcgccaacgccgccgtcgccatcacctcgcgtcgcgccatacgcccaggtctccgccgacgctgtcacacgccaggagctcgagtcttcgtcggtccctttgccagatcttcatcgtgcccttcaccagcgacgagcacccaacagagaggagaggattcgacgaaatggaggcgttggcgttggcttctctgttctggagacgcagcgacagccaaactccaaaacggaaatgagacagcgcttggagctgcgttaacaggtaatcatacacatgatttgtttgccactactttttagatgcacaagatcctatgctgtacatgccaatgactactcctgctgtttcttattgccaataagcacaagcacacttgagaaccggccatcaccatggagatgagactctttatcgcccttcagtgcgtgcagtgcgccaccatgcaggtgaagcagcagaagaagagcagcaacaagtgggtgtgtgtggtgtgcaaccagcgtcagtctgtgcttcatgtccatgccaggggctatcgtgctgctgatctccgccgcttcgtccaggacaccaaccttgcccgtggccgccgggagttcgcaccgttggccgagcccgacgtggacagggatctggcggcagttgaggagggagatgtgttccctatcgagaagagtcagacggaatggtccgagtatctggacgatccaggggagacaggtaaaggttgtggtggccttggcgcagatgcttcagatggagaatcggatgaaggaattgaggtgataactgaactgcctcagaaaagacctaaagttaggcctcgcaaagcccaatcagatgtagtaggaaagagaaccaagctgtcaacacatcccactttatgtaataagaggcagcagatcaagcaaggatcaaatccccactgtgcaactactactgctgaagcacaaggatcaaaatggaccaagtatttggacacgagccgttttggtgggaggaaatgcttcgatacctctggtctgcactggactgaacatgatgaatctgccactactgaggctactactgacgtagtggtggatgatgagaatcacagggtgcatccacggaatgtcacaagctcagtgtgaggtggctgagcacttgagctgaggaaaattcttgtttctgttctgcatcaactagagtcacctgaccatgtggcacagcacagagaagagccgaagacgtacagcatggatcacaggagcagtacaccttgatgactgactgttgtctgttggtacctataatcctgtgacaggtctgaacaaccgagtgattgattgatgtctccggcttccctgcagccaaaatgacgaatgggttaccctgcttgaatcctttgccactgcgcttgcgtgctactactattccatgcaaaacaacgtgttcggaaccaaaattaaagttccgaacatcgctgtgatgaatgggtgaatcgtcacctttttctttgaaatagcaactgtatgctcgaagaacagctgtgctggtccagctatctgggtaccgtactccctaccccgattgaactgtatttgggtcaaagtaatgggggagatactctttccatgctaggatataaggtgtaactacctttaattctaagatcaagaaatatatttaattctctttatcaataaagtattgttatgagcgtgcttatatt

SEQ ID NO: 77625 - DNA, 2065 bp, Zea Mays
tttttttaatttaattttagctaggcgtgggatgcacgtgggaatgagaataggctttgtgggatagagaatgagaaagatacgtgatagccgggaatggaaatgtgaatggaaatgtgaatgggctttgcagggagggggaatggacggtccagataaatcgtagcggaaattgtagtctactatactttcgagttttgcaaaaaaaaaaaaaatcctcagcccgtctcctttccaaatttttcacccggcgtctgctcgcctgcgagacgccgcgaccgcgatcaccctctcgggtttctcggacgcgccgccatcgccactccgccactcgcgggttcgttggatcgacgccaccgtcacctcgcgccgcccagaggaggacgcctgcttctcccccgacgccgacgacccccgccaccgtcttccgcgccaacgccgccgtcgccatcacctcgcgtcgcgccatacgcccaggtctccgccgacgctgtcacacgccaggagctcgagtcttcgtcggtccctttgccagatcttcatcgtgcccttcaccagcgacgagcacccaacagagaggagaggattcgacgaaatggaggcgttggcgttggcttctctgttctggagacgcagcgacagccaaactccaaaacggaaatgagacagcgcttggagctgcgttaacagactactcctgctgtttcttattgccaataagcacaagcacacttgagaaccggccatcaccatggagatgagactctttatcgcccttcagtgcgtgcagtgcgccaccatgcaggtgaagcagcagaagaagagcagcaacaagtgggtgtgtgtggtgtgcaaccagcgtcagtctgtgcttcatgtccatgccaggggctatcgtgctgctgatctccgccgcttcgtccaggacaccaaccttgcccgtggccgccgggagttcgcaccgttggccgagcccgacgtggacagggatctggcggcagttgaggagggagatgtgttccctatcgagaagagtcagacggaatggtccgagtatctggacgatccaggggagacaggtaaaggttgtggtggccttggcgcagatgcttcagatggagaatcggatgaaggaattgaggtgataactgaactgcctcagaaaagacctaaagttaggcctcgcaaagcccaatcagatgtagtaggaaagagaaccaagctgtcaacacatcccactttatgtaataagaggcagcagatcaagcaaggatcaaatccccactgtgcaactactactgctgaagcacaaggatcaaaatggaccaagtatttggacacgagccgttttggtgggaggaaatgcttcgatacctctggtctgcactggactgaacatgatgaatctgccactactgaggctactactgacgtagtggtggatgatgagggtgcatccacggaatgtcacaagctcagtgtgaggtggctgagcacttgagctgaggaaaattcttgtttctgttctgcatcaactagagtcacctgaccatgtggcacagcacagagaagagccgaagacgtacagcatggatcacaggagcagtacaccttgatgactgactgttgtctgttggtacctataatcctgtgacaggtctgaacaaccgagtgattgattgatgtctccggcttccctgcagccaaaatgacgaatgggttaccctgcttgaatcctttgccactgcgcttgcgtgctactactattccatgcaaaacaacgtgttcggaaccaaaattaaagttccgaacatcgctgtgatgaatgggtgaatcgtcacctttttctttgaaatagcaactgtatgctcgaagaacagctgtgctggtccagctatctgggtaccgtactccctaccccgattgaactgtatttgggtcaaagtaatgggggagatactctttccatgctaggatataaggtgtaactacctttaattctaagatcaagaaatatatttaattctctttatcaataaagtattgttatgagcgtgcttatatt

SEQ ID NO: 77626 - DNA, 3977 bp, Zea Mays
atttgctcccgtctcctccactctccctctctttcactgttgcttcttccttccttgtgcttctctctctaggtatagcagcccattctccacactcccccacctccctcctgcactcaccatctcctccccacctctccctccctcccgtaccatctcgtcggctcctcccccgtcgccgtcccgcttctttaatggttttataaggtagcgcgctagctcatggaatctccggggctggtgctggtcgctgtagtggcactcttcgtcgtcgtcgtggcggccaccgcctccgacggcgacgatgcccagctgctggagcagttcaaggaggccgtgcctagccaggccccggacctgcgcgggtggagcgccagcgatggcgcctgcaggttcccaggcgccggctgcaggggcggtcgcctcacgtcgctgtcgctcgccgccgtcccgctcaatgccgacttccgggccgtcgcggccaccctgctgcagctgagcagcctcgagacgctcagcctgcgcggcaccaacgtcagcggcgcgctggccgccgcgccgaggtgcggggccaagctgcagtcgctcgacctgtcagggaatgccggcctgcggggcaccgtcgccgacgtcgaggcgctggccgcttcctgcaccggccttagcgctctgaacctctccggcggttcggtcggtgggccgaggtctgccggcgctgtcgcttcttccggatttggccggctagacgctctcgacttgtccgacaacaagatctccggcgatggcgacctccggtggatggtgggcgccggcgtcggcgcggtccgccgtctggacctctccgggaacaagatctctcggctcccagagctcaccaactgctctgggcttgagtacctcgacctctccggcaacctcatcgcgggcgaggtagccggcgggattctcgctgactgccgtggcctgagaacgctcaacctctcaggcaaccacctggtcggcccgttcccgccggacgtcgccgccctcaccgctctcaccgcgctaaacctgtcaaacaacaacttctccagcgagctccccgccgacgcttacaacgaactacggcagctcaaggtgctgtccctctccttcaaccacttcaacggcaccattccggactccttggcagcgctgccggagctcgacgtgctggacctcagctccaacaccttctccggcaccatcccttcgtccatctgccaaggccccaactccagcctccgcatgctgtacctccagaacaactacctctccggcgccatcccggagtcaatctccaactgcaccaagctcgaatctctcgacctcagcctcaacaacatcaacggcacccttcccgcatccctcggaaaactccgggagctccgggacctcattctgtggcagaacttgttggagggcgagattccggcgtccctggaaaatttggtcaggctcgagcatctcatcctcgactacaacgggctcaccggtggcatcccgcgggaactctccaagtgcaaggagctgaactggatatccttggcgagcaaccagctgtctggtccgatcccggcttggcttgggcagctcagcaacttggccatcttgaagctgagcaacaattccttctcggggccaataccggctgagcttggcaactgccagagcttggtctggctggacttgaacagtaaccagcttaaagggtcaataccggcggaactggcaaaacagtctgggaagatgaacgtcggccttgtccttgggcggccatatgtgtatcttcgaaatgacgagctgagcagcgagtgccatggcaaggggagcttgctagagttcaccagcattcggcctgaagagctcagccggatgccaagcaagaagctgtgcaacttcactcgggtgtacatggggagcacagagtataccttcaataagaatggatccatgatatttctggatttgtcatttaatcaactcgactcggagatcccaaaggagcttgggaacatgtactacctcatgatcatgaatcttgggcacaacttactgtctggcgtcatcccaccagaactagctggtgccaagaagcttgcggtacttgacctgtcacacaaccagttacaagggcctattcccaactccttctcaacgttgtccttgtcggagatcaacctttcaaataatcagctgaatggttcaattccagagctgggttcgctgttcacattcccgaggatttcatatgagaataactctggtctttgtggcttcccactgttgccatgtgggcacaatgctggctcaagttcttcaggtgaccatcgatcccaccggacccaggcttcgctcgcaggtagtgttgctatgggactcttgttctcgctgttctgtatagttggtattgtcatcatagccattgagtgcaagaagcggaagcagatcaatgaagaggcaagtacctcccgtgacatatacattgatagccggtcacattctgggacaatgaattccaattggagactctctggtactaatgctctcagcgtcaacctcgctgcatttgagaagcgactgcagaagctaacttttaatgatcttattgtggcaacgaatggcttccacaatgatagccaaatcgggtctggtggttttggggatgtctataaggcccagctcaaggatggaaaggttgttgcaatcaagaagcttatacatgtgagtggccaaggtgaccgggagtttacagcagaaatggagaccatcgggaggatcaaacaccgcaatcttgttccgctccttggctactgcaagtgtggcgaggagcggctgttggtttatgattacatgaggtttggcagcttggaagacgtgttgcatgaccgaaaaaagatcgggatcaagctaaattgggcagcaaggaaaaagatcgccattggggctgcaaggggattggcatacctccaccacaactgtataccgcacatcatacaccgagacatgaagtcaagcaatgtgcttatcgatgagcagttagaggcaagggtatccgatttcggtatggcaaggatgatgagcgtggtggatacccacctgagcgtgtccactctcgccggcactccaggctacgtgccgccagagtactaccagagcttcagatgcactaccaagggcgatgtgtatagctatggcgttgtattgctcgagctgctcactgggaaaccgcctacagattcaaccgacttcggcgaggacaacaatctcgtaggatgggtcaaacaacactcaaagtcgaagctggcagatctgtttgaccctgtactactggtggaggatccggccttggagctcgagctactagagcacctgaaaatcgcctgtgcgtgcttggatgaccgaccatccaagcgcccgacgatgcttaaagtcatggcgatgttcaaggagatgcaggccagttcggctgtggactcgaagacctcagcatgcacggtcgccgtggatgatgcgtgttttggcgacgtggagatgacgaccctgaaagaagacaaggaggagaaggactagagcaaggcccaccgacacgcgagaagctgcccttggttcctgcccagggccgagcggcagctacacggtcagtcagatctcagatgcaaaaaaacaaaatcaaaaaaacgcccgtaggaatcagttggtcaggacaccattcgaagcatcttcttgagcttagcattcccttctgacggtacaagacagaagtttttttttcccttgtagcttcgcaaagctgaagatgttatgtacctatgggagtaggtgcagcaagcatgatggaaatggggcgtccaaatctgagatgcaggcagtgtgaggcaccaagggatgagggggaggaagtgcaagagtacactggactggtcaagcaagatgaacagcaaaaggcaaccaagggg

SEQ ID NO: 77627 - DNA, 911 bp, Zea Mays
tgtttcctatccgtgtgtttggttggagagaaactgcatccacaaatcctcaaagcacattttgtttgtttcacttctctgcataaccaggctgagcgggtgcaagaaacaacagcgagccaggcccgctagaaacggacgctcggcgcgtacgcgcgcgtgcaggcgcggtgcagccacgcccgtacggtatgtgtttctattctgcatccaccatttatcttttctctttcctatgtgttcgcaaggcctcctccttcaagctgaaggccgagccgtgctgtggcctgtggtggtgttggccgtgggagcagcgacgacattcgcattgagtagcccgcccaaggtcttctgcccgtcccggcctccaccgaccgtcgcaagggcaaaggccatatctcctcttctatgctgctctcagactccacctttggtattgctcctagctaaggttgatttggtgacaagagaataacgtgagattgaaaaggattggcggagaaataaactaaggtggaattgggtccgaagcgtggcccatgcaaatgtatatggatagatgcagatgggcattttggattagggttcgcatttcagaaaaaaaaatgcacaacgctgcttgaggcagccgttggggcgccatggatcgactgtcggtagcggcacgggccagggcgcacgtggacggctggccgcacgaggactcgacggcagtcgctaggggctcaacctcgacgctcggcatgtggacaggaactggcctgctagagtgcgagccgcagggagcaagggcagacgccagttagggcacccagccacgccactgcgggaagattatgagacaagaccgaggaggctaatattttgttatggcgatggcattaggtggctttatacatatttgagattag

SEQ ID NO: 77628 - DNA, 1883 bp, Zea Mays
caagatttagaagagcggtgaacagagcagtactctctgatctcattatttctaccaatatgtagaaagcattcatctccagtctaaacaagaggaaacgggcattattggtctgcacagagaaaagcatttgaagtagccaaacaacatactcattctacaaatgaaaagtgtgcatgtgtgagcctaaacatttccataactagtccaaagatgcaagaaccattggttttaaagttcatagacatactttatatgaatagtaagtaaatttggtgccatgtggaaattttattacagaacctgcaactttctagtgactatttaaaaaaaataaaccttatatttcaaatcttggcattttgcaccaacaacagcatagtgtccgatgacattgttttccccaataattgtccgtccagggatatctgcaccaacaatagcaccactgcaacaaccaagcctttttagtcccaagtaagttacgataggctagagttaaaacccaacaaaatccataaatcaaggttcaggcatgtaaatagttgttttctattcgctcatattcaaggctaagtcttaagaaatatttcatttttccggtcctcttttactgtctatcccatgtcaacttcggtcttcccctgcctctcctcccgttagtatcgcgccttaagatcccacattcccactacgtactagtgcctctggaggtcttcgttggacaccttcaaaccatcttaatcggtattgaaaagcttttcttcaattggttctacccctagcctatcatgtacatcatcgtttcggggtttcagacttgatcccttcttatatgtccataaattcaacgcaacatactcattctacaacacctatctactaaacataacatcttttttagaccaacattctgcactatataacatagtaggtctaatcgtcatcctataaaacttgcattttagcttctatggtaccctcttgtcacatagaaagtgagatgcttgttgacacttcctcgaccttgctttgattctatggttaacattttcatcaatatcttcatctctctgtagcattgcacctaaataccgaaaggtatccttcctagccactacttaaccttccaaactagcatttcctttctcatgtgtagtagtgttgaagtcacatctcatgtattttattttagttctactgcgtctaaaacctttggactctagagtctcctacacacatcacactgtaaggtatattaggggtttgcgatatgatgcgttatccttgattttgcaaattcatgcatagagtgtcatttcctatggttcagttgttaagaaacaaaataaattgagccaagtaactctatatggtgaattttcaatctcctttgttatttttcatcaaaaaagttttcacagatgtacttgtcaagtgctcgagtcaaaagggaccaaggcctgagggagtgatactccactaatgacagagaagcaacaagacaagaactattttcaactgcttatgtgaaacacacctaaaacaaaataatggacctgaagggctagagctccatctcatgtgctgttgtgatggcatcaaactttgtgttcgtaacagtgatccatgtttaatttggttgtagttttatttcacaaaaaacattcaatgtatctttctttgcttcaattatatgtccgaatatggattcccaatgtaggcattgtgagcatatattattcacaaaaggggcacaaattcaggcgacaaaagagagagaaagatgctatctcacgtttgaacaatgcatccctcccctagctcagtatggcccatgacatggctcccggcatgtaactgacaggtatcaccaactctgg

SEQ ID NO: 77629 - DNA, 2205 bp, Zea Mays
atcgtggcctgtagtttaactgtgcaatgaacctcgtgctgaggatgctctaccagctgatgcgacaggttcctctccacactttgggagaaagggatctgaactaggtccaactcatgttttagttgttcgtggcttagatgaaaatgctgatgaggaaatgcttcggtacgaatttgctaagcacgcaccattaaaggacatccgccttgttcgggataagtttactcatgtgtctagaggttttgccttcgttcatttccattcggtggaagatgctacgaaagctctggaagctacaaatgggattacactcgagaaaaacggtcaggttttgcgtgtagcatatgctaaaagtacacatggacctgcatcagggggctcacagtcaaacagccttgctgcagctgccattgaggctgcatcatttgctcaacagtatgatgccataggttgggctccaaaagagtacaatcctgatgacaaacagaacagtaactttgaatctcaaaaagacgatggcagtggcacagcacagtcgggatttgtttgggatgaaaaatctggttactactatgattctgcatctggattctattatgacggaacaactggcctttactatgacagcaactctggagtttggtattcgtacgatcaacagactcaacagtatgtcccttgtactgaccagagcaatactaaggcagccggggagacgtccagtgaaaacatgatctcagatagtatttgtgggaaaaaggttgtgatctctgcgcctgctgccacaattaaacaaaacaagaaaacatcactccctgatgctgttcaagctgctgcaaatgcagccctggctgcagaaaagagagaaaaggagaaggcaaaagagattaagttggcctcaaaaagtagtctcatagctaataagaagaagatgaacaatgtcctagccatgtggaagcaaaggaatcaagaagggcaggccgcacggattgtcattgatgacaaagaaccaccaaattctgatgatagatttaatcattcacatagtggaactggtttctcttcgaaaagcaagccaaattttgaatttgaaaatgctatggataattctgttcgccaaggaattgcatcgacccaaatgttggattctgatgtaaagcctagacctgtcagtaacagcttaggtactacagttatgggtgtcataagaggttctactagaggagtgatcaagtcggatactacgtttcatgcattatctgatgccgggagcactgattcccgcaccactataatcacaagatcaaatgggttaatgacaagtcctgtggaacttgtaactcctgcaccctacaaaactgatgtgtctgccttagtctctaatacttcatcgggagtttctgggagtggtaaacgtcggttttctgaggcaccagggcaatcccagtacagggatcgagctgcagaaagacggaatctgtatggatcatctcttcgcactgatgctgttggattggattcaactggtcactatccgtcccgaaagggtccaagtgagatagggtcgatgccatttcctcctggcgtgggtgaacgttctaatggtgaaattggcaacaacgaaaactatgaagttattaccgctgatagcgcaatcgacgaaagcaatgtgggtaaccgtattctacgcaacatgggttggcaagagggactgggtctcggaaaggatggcagcggtatcaaggaaccagtccaggcaaaatccgtggacgtcagggctggactaggaagtcagcagcggaaggctgatccaatcctggaggccaaagccggagacagctacaaaaccatcatccagaagaaggccatggcaagattcaaggagatgtcctagctagaccttttttttttgtatattcggttgtcgtattttgtcgtccgtatacttttttttttacaatctgtgcactgttttgcttgtgttttttttcttcacaaacctagccactgaattgtgatttattatcctcaaaggggcaccgtgtttatcttattattactatgtagttcgagacctggatgctttttttttcatgtgtgttggggttttcatttgcacgacgaatgtgcccgatcagttgctttgccacacatgatgtggcggtactgcctctacatcttatcgtggcacaggttgttttt

SEQ ID NO: 77630 - DNA, 6539 bp, Zea Mays
ctgagtcctgaccatcgtggcctgtagtttaactgtgcaatgaacctcgtgctgaggatgctctaccagctgatgcgacaggttcctctccacactttgggagaaagggatctgaactaggtccaactcatgttttagttgttcgtggcttagatgaaaatgctgatgaggaaatgcttcggtacgaatttgctaagcacgcaccattaaaggacatccgccttgttcgggataagtttactcatgtgtctagaggttttgccttcgttcatttccattcggtggaagatgctacgaaagctctggaagctacaaatgggattacactcgagaaaaacggtcaggttttgcgtgtagcatatgctaaaagtacacatggacctgcatcagggggctcacagtcaaacagccttgctgcagctgccattgaggctgcatcatttgctcaacagtatgatgccataggttgggctccaaaagagtacaatcctgatgacaaacagaacagtaactttgaatctcaaaaagacgatggcagtggcacagcacagtcgggatttgtttgggatgaaaaatctggttactactatgattctgcatctggattctattatgacggaacaactggcctttactatgacagcaactctggagtttggtattcgtacgatcaacagactcaacagtatgtcccttgtactgaccagagcaatactaaggcagccggggagacgtccagtgaaaacatgatctcagatagtatttgtgggaaaaaggttgtgatctctgcgcctgctgccacaattaaacaaaacaagaaaacatcactccctgatgctgttcaagctgctgcaaatgcagccctggctgcagaaaagagagaaaaggagaaggcaaaagagattaagttggcctcaaaaagtagtctcatagctaataagaagaagatgaacaatgtcctagccatgtggaagcaaaggaatcaagaagggcaggccgcacggattgtcattgatgacaaagaaccaccaaattctgatgatagatttaatcattcacatagtggaactggtttctcttcgaaaagcaagccaaattttgaatttgaaaatgctatggataattctgttcgccaaggaattgcatcgacccaaatgttggattctgatgtaaagcctagacctgtcagtaacagcttaggtactacagttatgggtgtcataagaggttctactagaggagtgatcaagtcggatactacgtttcatgcattatctgatgccgggagcactgattcccgcaccactataatcacaagatcaaatgggttaatgacaagtcctgtggaacttgtaactcctgcaccctacaaaactgatgtgtctgccttagtctctaatacttcatcgggagtttctgggagtggtaaacgtcggttttctgaggcaccagggcaatcccagtacagggatcgagctgcagaaagacggaatctgtatggatcatctcttcgcactgatgctgttggattggattcaagtaagaatacactttcttaagtttttctttatcgcgtacaattgttgtcattttcccattgtcattccttcagcacgatgtgttagtaacagcaacatactgtccgttcagattttttttgttattctcatcattatcattttgctgaagcatcattgtcagtattagtgttggtataaggctgacttggtatttctgggagtctttttgttaccataggaatatgtccttgaccaacatacagttcaggaatcttattttttgttttgtttgtaagctttttattgattttctggaaattacctgttgtcaagctggtcactatccgtcccgaaagggtccaagtgagatagggtcgatgccatttcctcctggcgtgggtgaacgttctaatggtgaaattggcaacaacgaaaactatgaagttattaccgctgatagcgcaatcgacgaaagcaatgtgggtaaccgtattctacgcaacatgggttggcaagagggactggtaagttcatgtcccacatatttctcagtttgagatgctctcaggcttgatagcattttccatgagtgtttatgcctcttctttatttctcttgctaatgcaattgcatctgactttgcaatctaatttatgtaagttttttatgagaaaaaggtaaatatgcctatttgtaataaggcagttgtatcaaatttattttaatgcagctctctggttttaaccggagtactttggagcttggtacgctattagtatgttagcaaatcttaagcttgtcttgttgatctctttacagaaataattaatgaagtatacctctgtgtcttgacttgattctgagtccatgtgcttcctttgtgtctagactctacaatgtaggaatcagaagtcactgacatacttagtctgagtgagaagatgcctagtttttagcctaagtgagaagatgtctagtttttaggtgcgtgcctgtagggaaacatcgctttgagaacaaagtggtggaaactgaaaggaaagacgacagaagccttcaaggaaagggtcatcaaagagggcactcggaagaagacaaacaataattgggagaagatggcaacctgcattcggaaggtggctttaaaggtgcgtggagcaagtgagcaaccaaagggagtggaggcgaagctaaagttttttggtggtggaatgaggaagtctaaagggacctattaaggagaagaaagcatgctatagacgtttgtaccatgacaggagtggacaacatagagaagtataaggtagtaaaaaagactcgtggcaaagggtagggcgtacgaggatttttatcaaacgtgaaggaaggagggtgaaaggagaggacatatattgggattgttagggttcatgagaggaagacaagggacttcaaccaagttgagtgtattaaggacaaaacagagtaccttttcatggagtatgaggtcatatgtagatggtgagggtattttaacaaagtatttaatggggacaatggggatgtaacctttactactctttcgatgacaccaataagcactttgtgcgtagtatccaagaatccaagggtagagaggcattgaaatggatgaagggggtaagatgatggaccctaatgatatctgagacatggatatgccttggggacatagctatactatagttaaccaagttgtttaaccatatcttttggtcaaacaagatgtctgacaagtggagaaatatttaagggagatattcaaagttgtattaggtatcgggaattaagtttatgagccatactacgaagctatgagagagttatcgagcatcatctcaagggaataacaacaatctctgtgaaaccaatttggtttcgtgtctaaaaagtcaaccatggaagccattttctcaataagacaagttatggagtgatgtagggagcacaacctacccatggttttaatttacttggagaaggcctacgataaaataccaaggaatgttatgtggtgggtttggtcagacataatgttttagggtgtgcttggttctgcttttaacacctgtttctgcttaaaaaagtagaaagttggaccataggtctcccacccagcccttgcttttcccaccgcagttgcttttccgtagttgaactcatgaaggagacagattcttgcttttccaacggtggcaacaaagtcaagttcgaagaatttacccacctgacatcggttaaggggcactagactgttatttctctttctttcaccttttctctttcatcgttttcttcacactgttcaatccaaaagcttaagctattatagaagaaggtagtcaattcacttatacatttcaacatcttcacgcacgtgcagccagagaggcgcatacgtggaaataaaggggcggaggcacaaacttctgtaggttttgaacttgaaacctctgattccgatactatgttagagtggatgcagtaaccagttcaactcaaaagtttaatctattaggagaaggtagtcaatcaacttatacactttaatttttcaacacacatcgagtagggaccaaacaaaacccagagaaaagctagggttcggccgcatgccctcccaccatcccagtaccatatcactgtcctctacagtagccttggcggcttccgtatgcgcgaccccctctccaggaagacgctgtttagttatttagttgtttttaagttattttgtagttatttatatgtatgaaatgttataataggggttgaagtagacatctgaattattaggataaatttaatattttgaaatagatacgtataggatttggcgctaatatttagttatgttgttaaacacattataaaaacaagaaaaaatgtcgcatattttttgtgcattatttgcttcccacaacgaaaaacatgaaaaaacatttgaatccatattcaaattttatatatatatcatttgagaagatatatgacaaaatttgacgttttctttttatgaatcttaacaagttcaatgctaaaaacaagaatacggatttacacaacagattagcagattctttattcacaatcgaagcaaaaacaaaaaattaacatatgaaccaatatccgcttgcatctctaactataatggtgaaaattatgtcaatcatcacgaataatgttgcatgttgcaccacggtcaatttgcatataaacagtcttgcaatagatcatatgaagtctacattctcacatcagtttgaaccaaacgacttttagctttttcacaacaaacaactctcagcagacatcataagcaatttttctcaaagcagacaactgaacccagcgcacctttaatgaagtatgttggactcattaaggacatatacaacaatgttgtgatgatggagacacggatgacttttcggttagaataggactacatcaaggatcaactttgagcccttgttgcattagtgatgtgttacaaggggcatataaggggagatgccttagtgtatgtttttttatgtagtgctagatgacaaaagccgggcagaaaaataggaaattagagttgtcacgggagactctagagcccaaaggttttagactctttagaactaaaactgaatatatgagatatgaatttggcactactacacatgagcaagatgtttggaggccaagtagtgcccatgaaagatatctttaagtatttaggaccaatgctataaagcgacgtggatatcgattaagatgttagccatgaatcaaacctgtgtggatgaagtggcttcaagcatgtggtgttttaaatgacaagagggtaccacagaagctaaaaggcaaattttataggacgatgattatacctgctatgttgtatgatgcagaatgttggcctaaaaaaagacatgtttaatagacaagtgttgcggaaatgtgtgcgttgcgttgggtttgtggccgtataagaaagtaatgagtttggaacgatgatatatgtggtatggtaagggtagtgccaattgaagaaaagaggtcgagatggtttggatatatccaatgaagtcctctagaggcaccaatgcattttggattctaaggtgtgatagcaatgaaaagtgggacaggagaagactgaaattgatatgggacgatacaataaaaggagacttgaatggacagaatatagcacaaaaattagtttgaacaagagtgcatgtaaaacaagatatccacgtgtctaaatcttgtggttttctgttgggtttgaactctaaactatccaacttgcgataaaaagcttcgttgttgtggataagatgtctagcgtggaataaatagtttgttggacacgagaagtgattccatccaggggaaatcagtgtgcccatatttcatgcattgtggaaagtgcaaaaaatattgtattgtattccttctaatgtgagtgtgcatttgtattgtttttgtttcttgcaactattacgcaaatatccagggtctcggaaaggatggcagcggtatcaaggaaccagtccaggcaaaatccgtggacgtcagggctggactaggaagtcagcagcggaaggctgatccaatcctggaggccaaagccggagacagctacaaaaccatcatccagaagaaggccatggcaagattcaaggagatgtcctagctagaccttttttttttgtatattcggttgtcgtattttgtcgtccgtatacttttttttttacaatctgtgcactgttttgcttgtgttttttttcttcacaaacctagccactgaattgtgatttattatcctcaaaggggcaccgtgtttatcttattattactatgtagttcgagacctggatgctttttttttcatgtgtgttggggttttcatttgcacgacgaatgtgcccgatcagttgctttgccacacatgatgtggcggtactgcctctacatcttatcgtggcacaggttgttttt

SEQ ID NO: 77631 - DNA, 3458 bp, Zea Mays
actcgcgactccgcccgcctgcccagcgatagcgccatagcggcgaccggcgagctccaatatcacgcggatcggcggcggcgcccttgccccggagccccgcggcggcgcggccctgtccccgttccccgccccggcggtaggcagccccgtctcctgtcgagcgctcccaccaccccagccccggcgcccccgctcccagcccgaccgctgtatccgcggcgaccggcgtcccgaacggacgcggcccgagcgcctggctcacagaaaatctgcacacaaaactacaaaagtttaaggtcaccaagaaccttgcaggataacacaagtgctggattttggaaatggaccatgggctttatgctccacaacatggatgggagaacaacagtgcatcaaatgggtatggtgcaatcaatgagccagattttaggtctggtggatcctacaatggtaggagatctgtggatgaaggttttcctagagattcatatgggaggggtgcatactgtcaggatacacatgatagaaatatgtatgcaccaccgccatctgttggtggaatatggtctcagcctcgaaggaatcatgatgaggaatatgcaactgcaagagatcacagaagtcgccctgattttggtgttgataggagcaaaaggattggaagcagagaaagtgcggagtttcatggtgagtttgaagaccggtaccacagttctaaccaaagcagagatgacagctatgagagagatcatgaatatggtcattatgattatgattcggaccatgagagaggcaggagagatagtagctggaaaagacgcgattcatgcgagagcaaacgtgaaagaagtggattaagtcgtgaaagagaggaaagtccatacatgcgccatagccgttctcgatcacatggacgtgatgaccgatcaagatcatggtctagatcaagatctcctcgtgcgagaagtcatggtcggaaccaaagagatggcctgtatgatgataatcgatttgacagaagaagggaatatgattgggatgataggaggcatggtgattcagtggccccatctgccactgttgttgtcaagggactgtctatgaagactaatgatgatgacctatatcagattctttctcagtggggccctctacgcagtgtacgtgtgatcaaggaacggaattctggcatgtctcgtggatttgcttttattgacttctccactgtggaagctgcctgtagaatgatggaagctactggaaagagtggtctccaaattgatggcaggaatgtgttctttcagtacagtagtaaaccaaccggtgtaatgggtgggtcttctcctggacaagaaaatcttacaaggcctacttatgggccccgcactgttgctgcactctgtgactggatttgttctatatgcggatgtatgaatttcgcccgcaggacctcctgttttcagtgcaatgaacctcgtgctgaggatgctctaccagctgatgcgacaggttcctctccacactttgggagaaagggatctgaactaggtccaactcatgttttagttgttcgtggcttagatgaaaatgctgatgaggaaatgcttcggtacgaatttgctaagcacgcaccattaaaggacatccgccttgttcgggataagtttactcatgtgtctagaggttttgccttcgttcatttccattcggtggaagatgctacgaaagctctggaagctacaaatgggattacactcgagaaaaacggtcaggttttgcgtgtagcatatgctaaaagtacacatggacctgcatcagggggctcacagtcaaacagccttgctgcagctgccattgaggctgcatcatttgctcaacagtatgatgccataggttgggctccaaaagagtacaatcctgatgacaaacagaacagtaactttgaatctcaaaaagacgatggcagtggcacagcacagtcgggatttgtttgggatgaaaaatctggttactactatgattctgcatctggattctattatgacggaacaactggcctttactatgacagcaactctggagtttggtattcgtacgatcaacagactcaacagtatgtcccttgtactgaccagagcaatactaaggcagccggggagacgtccagtgaaaacatgatctcagatagtatttgtgggaaaaaggttgtgatctctgcgcctgctgccacaattaaacaaaacaagaaaacatcactccctgatgctgttcaagctgctgcaaatgcagccctggctgcagaaaagagagaaaaggagaaggcaaaagagattaagttggcctcaaaaagtagtctcatagctaataagaagaagatgaacaatgtcctagccatgtggaagcaaaggaatcaagaagggcaggccgcacggattgtcattgatgacaaagaaccaccaaattctgatgatagatttaatcattcacatagtggaactggtttctcttcgaaaagcaagccaaattttgaatttgaaaatgctatggataattctgttcgccaaggaattgcatcgacccaaatgttggattctgatgtaaagcctagacctgtcagtaacagcttaggtactacagttatgggtgtcataagaggttctactagaggagtgatcaagtcggatactacgtttcatgcattatctgatgccgggagcactgattcccgcaccactataatcacaagatcaaatgggttaatgacaagtcctgtggaacttgtaactcctgcaccctacaaaactgatgtgtctgccttagtctctaatacttcatcgggagtttctgggagtggtaaacgtcggttttctgaggcaccagggcaatcccagtacagggatcgagctgcagaaagacggaatctgtatggatcatctcttcgcactgatgctgttggattggattcaaggtctcggaaaggatggcagcggtatcaaggaaccagtccaggcaaaatccgtggacgtcagggctggactaggaagtcagcagcggaaggctgatccaatcctggaggccaaagccggagacagctacaaaaccatcatccagaagaaggccatggcaagattcaaggagatgtcctagctagaccttttttttttgtatattcggttgtcgtattttgtcgtccgtatacttttttttttacaatctgtgcactgttttgcttgtgttttttttcttcacaaacctagccactgaattgtgatttattatcctcaaaggggcaccgtgtttatcttattattactatgtagttcgagacctggatgctttttttttcatgtgtgttggggttttcatttgcacgacgaatgtgcccgatcagttgctttgccacacatgatgtggcggtactgcctctacatcttatcgtggcacaggttgttttt

SEQ ID NO: 77632 - DNA, 3914 bp, Zea Mays
actcgcgactccgcccgcctgcccagcgatagcgccatagcggcgaccggcgagctccaatatcacgcggatcggcggcggcgcccttgccccggagccccgcggcggcgcggccctgtccccgttccccgccccggcggtaggcagccccgtctcctgtcgagcgctcccaccaccccagccccggcgcccccgctcccagcccgaccgctgtatccgcggcgaccggcgtcccgaacggacgcggcccgagcgcctggctcacagaaaatctgcacacaaaactacaaaagtttaaggtcaccaagaaccttgcaggataacacaagtgctggattttggaaatggaccatgggctttatgctccacaacatggatgggagaacaacagtgcatcaaatgggtatggtgcaatcaatgagccagattttaggtctggtggatcctacaatggtaggagatctgtggatgaaggttttcctagagattcatatgggaggggtgcatactgtcaggatacacatgatagaaatatgtatgcaccaccgccatctgttggtggaatatggtctcagcctcgaaggaatcatgatgaggaatatgcaactgcaagagatcacagaaggcacaatactgattatcacaatgatggaaaacatcatgagtttgattcatacagagttgatagactccatgataattatcatgctactgacagctattatgaatctggcagtcgccctgattttggtgttgataggagcaaaaggattggaagcagagaaagtgcggagtttcatggtgagtttgaagaccggtaccacagttctaaccaaagcagagatgacagctatgagagagatcatgaatatggtcattatgattatgattcggaccatgagagaggcaggagagatagtagctggaaaagacgcgattcatgcgagagcaaacgtgaaagaagtggattaagtcgtgaaagagaggaaagtccatacatgcgccatagccgttctcgatcacatggacgtgatgaccgatcaagatcatggtctagatcaagatctcctcgtgcgagaagtcatggtcggaaccaaagagatggcctgtatgatgataatcgatttgacagaagaagggaatatgattgggatgataggaggcatggtgattcagtggtattgacatactgcatacatacatacatttgtagcagtggctttggaatttacaaaccatgagtttgcattcatgtttgcaggccccatctgccactgttgttgtcaagggactgtctatgaagactaatgatgatgacctatatcagattcttgtacaagttcttcataacttcttgcaccggttttaagtgtattgtctattgtctcgttcgttttaatcatttcgcctgttctcttgtagtctcagtggggccctctacgcagtgtacgtgtgatcaaggaacggaattctggcatgtctcgtggatttgcttttattgacttctccactgtggaagctgcctgtagaatgatggaagctactggaaagagtggtctccaaattgatggcaggaatgtgttctttcagtacagtagtaaaccaaccggtgtaatgggtgggtcttctcctggacaagaaaatcttacaaggcctacttatgggccccgcactgttgctgcactctgtgactggatttgttctatatgcggatgtatgaatttcgcccgcaggacctcctgttttcagtgcaatgaacctcgtgctgaggatgctctaccagctgatgcgacaggttcctctccacactttgggagaaagggatctgaactagttgttcgtggcttagatgaaaatgctgatgaggaaatgcttcggtacgaatttgctaagcacgcaccattaaaggacatccgccttgttcgggataagtttactcatgtgtctagaggttttgccttcgttcatttccattcggtggaagatgctacgaaagctctggaagctacaaatgggattacactcgagaaaaacggtcaggttttgcgtgtagcatatgctaaaagtacacatggacctgcatcagggggctcacagtcaaacagccttgctgcagctgccattgaggctgcatcatttgctcaacagtatgatgccataggttgggctccaaaagagtacaatcctgatgacaaacagaacagtaactttgaatctcaaaaagacgatggcagtggcacagcacagtcgggatttgtttgggatgaaaaatctggttactactatgattctgcatctggattctattatgacggaacaactggcctttactatgacagcaactctggagtttggtattcgtacgatcaacagactcaacagtatgtcccttgtactgaccagagcaatactaaggcagccggggagacgtccagtgaaaacatgatctcagatagtatttgtgggaaaaaggttgtgatctctgcgcctgctgccacaattaaacaaaacaagaaaacatcactccctgatgctgttcaagctgctgcaaatgcagccctggctgcagaaaagagagaaaaggagaaggcaaaagagattaagttggcctcaaaaagtagtctcatagctaataagaagaagatgaacaatgtcctagccatgtggaagcaaaggaatcaagaagggcaggccgcacggattgtcattgatgacaaagaaccaccaaattctgatgatagatttaatcattcacatagtggaactggtttctcttcgaaaagcaagccaaattttgaatttgaaaatgctatggataattctgttcgccaaggaattgcatcgacccaaatgttggattctgatgtaaagcctagacctgtcagtaacagcttaggtactacagttatgggtgtcataagaggttctactagaggagtgatcaagtcggatactacgtttcatgcattatctgatgccgggagcactgattcccgcaccactataatcacaagatcaaatgggttaatgacaagtcctgtggaacttgtaactcctgcaccctacaaaactgatgtgtctgccttagtctctaatacttcatcgggagtttctgggagtggtaaacgtcggttttctgaggcaccagggcaatcccagtacagggatcgagctgcagaaagacggaatctgtatggatcatctcttcgcactgatgctgttggattggattcaactggtcactatccgtcccgaaagggtccaagtgagatagggtcgatgccatttcctcctggcgtgggtgaacgttctaatggtgaaattggcaacaacgaaaactatgaagttattaccgctgatagcgcaatcgacgaaagcaatgtgggtaaccgtattctacgcaacatgggttggcaagagggactgggtctcggaaaggatggcagcggtatcaaggaaccagtccaggcaaaatccgtggacgtcagggctggactaggaagtcagcagcggaaggctgatccaatcctggaggccaaagccggagacagctacaaaaccatcatccagaagaaggccatggcaagattcaaggagatgtcctagctagaccttttttttttgtatattcggttgtcgtattttgtcgtccgtatacttttttttttacaatctgtgcactgttttgcttgtgttttttttcttcacaaacctagccactgaattgtgatttattatcctcaaaggggcaccgtgtttatcttattattactatgtagttcgagacctggatgctttttttttcatgtgtgttggggttttcatttgcacgacgaatgtgcccgatcagttgctttgccacacatgatgtggcggtactgcctctacatcttatcgtggcacaggttgttttt

SEQ ID NO: 77633 - DNA, 4333 bp, Zea Mays
actcgcgactccgcccgcctgcccagcgatagcgccatagcggcgaccggcgagctccaatatcacgcggatcggcggcggcgcccttgccccggagccccgcggcggcgcggccctgtccccgttccccgccccggcggtaggcagccccgtctcctgtcgagcgctcccaccaccccagccccggcgcccccgctcccagcccgaccgctgtatccgcggcgaccggcgtcccgaacggacgcggcccgagcgcctggctcacagaaaatctgcacacaaaactacaaaagtttaaggtcaccaagaaccttgcaggataacacaagtgctggattttggaaatggaccatgggctttatgctccacaacatggatgggagaacaacagtgtaattgcagtcttttcctttactaactactgaagatgatgaaatagcagaattttggccatgtgattggcctctgtgtatccagcctttagttgtaaaggagttcaagaagaggccgttgcttaaatggaatggatttacctgcctgttctgtagaatttgttgctgactccacttattctgttgaatctacaggcatcaaatgggtatggtgcaatcaatgagccagattttaggtaaggcaactggtcatttagtgttctgttaactgggatattcatgtcctttattcctgtaaaaacgtcatttttttttctctagcaagctgatatatgtttttatttggtactgggttaactcttcaacaagttctcttcttttgtgatttgtgtcatgcatttaatatttatatagtgttctgtcatattaccatatcttcccctattaacttaatttgcaggtctggtggatcctacaatggtaggagatctgtggatgaaggttttcctagagattcatatgggaggggtgcatactgtcaggatacacatgatagaaatatgtatgcaccaccgccatctgttggtggaatatggtctcagcctcgaaggaatcatgatgaggaatatgcaactgcaagagatcacagaaggcacaatactgattatcacaatgatggaaaacatcatgagtttgattcatacagagttgatagactccatgataattatcatgctactgacagctattatgaatctggcagtcgccctgattttggtgttgataggagcaaaaggattggaagcagagaaagtgcggagtttcatggtgagtttgaagaccggtaccacagttctaaccaaagcagagatgacagctatgagagagatcatgaatatggtcattatgattatgattcggaccatgagagaggcaggagagatagtagctggaaaagacgcgattcatgcgagagcaaacgtgaaagaagtggattaagtcgtgaaagagaggaaagtccatacatgcgccatagccgttctcgatcacatggacgtgatgaccgatcaagatcatggtctagatcaagatctcctcgtgcgagaagtcatggtcggaaccaaagagatggcctgtatgatgataatcgatttgacagaagaagggaatatgattgggatgataggaggcatggtgattcagtggtattgacatactgcatacatacatacatttgtagcagtggctttggaatttacaaaccatgagtttgcattcatgtttgcaggccccatctgccactgttgttgtcaagggactgtctatgaagactaatgatgatgacctatatcagattcttgtacaagttcttcataacttcttgcaccggttttaagtgtattgtctattgtctcgttcgttttaatcatttcgcctgttctcttgtagtctcagtggggccctctacgcagtgtacgtgtgatcaaggaacggaattctggcatgtctcgtggatttgcttttattgacttctccactgtggaagctgcctgtagaatgatggaagctactggaaagagtggtctccaaattgatggcaggaatgtgttctttcagtacagtagtaaaccaaccggtgtaatgggtgggtcttctcctggacaagaaaatcttacaaggcctacttatgggccccgcactgttgctgcactctgtgactggatttgttctatatgcggatgtatgaatttcgcccgcaggacctcctgttttcagtgcaatgaacctcgtgctgaggatgctctaccagctgatgcgacaggttcctctccacactttgggagaaagggatctgaactagttgttcgtggcttagatgaaaatgctgatgaggaaatgcttcggtacgaatttgctaagcacgcaccattaaaggacatccgccttgttcgggataagtttactcatgtgtctagaggttttgccttcgttcatttccattcggtggaagatgctacgaaagctctggaagctacaaatgggattacactcgagaaaaacggtcaggttttgcgtgtagcatatgctaaaagtacacatggacctgcatcagggggctcacagtcaaacagccttgctgcagctgccattgaggctgcatcatttgctcaacagtatgatgccataggttgggctccaaaagagtacaatcctgatgacaaacagaacagtaactttgaatctcaaaaagacgatggcagtggcacagcacagtcgggatttgtttgggatgaaaaatctggttactactatgattctgcatctggattctattatgacggaacaactggcctttactatgacagcaactctggagtttggtattcgtacgatcaacagactcaacagtatgtcccttgtactgaccagagcaatactaaggcagccggggagacgtccagtgaaaacatgatctcagatagtatttgtgggaaaaaggttgtgatctctgcgcctgctgccacaattaaacaaaacaagaaaacatcactccctgatgctgttcaagctgctgcaaatgcagccctggctgcagaaaagagagaaaaggagaaggcaaaagagattaagttggcctcaaaaagtagtctcatagctaataagaagaagatgaacaatgtcctagccatgtggaagcaaaggaatcaagaagggcaggccgcacggattgtcattgatgacaaagaaccaccaaattctgatgatagatttaatcattcacatagtggaactggtttctcttcgaaaagcaagccaaattttgaatttgaaaatgctatggataattctgttcgccaaggaattgcatcgacccaaatgttggattctgatgtaaagcctagacctgtcagtaacagcttaggtactacagttatgggtgtcataagaggttctactagaggagtgatcaagtcggatactacgtttcatgcattatctgatgccgggagcactgattcccgcaccactataatcacaagatcaaatgggttaatgacaagtcctgtggaacttgtaactcctgcaccctacaaaactgatgtgtctgccttagtctctaatacttcatcgggagtttctgggagtggtaaacgtcggttttctgaggcaccagggcaatcccagtacagggatcgagctgcagaaagacggaatctgtatggatcatctcttcgcactgatgctgttggattggattcaactggtcactatccgtcccgaaagggtccaagtgagatagggtcgatgccatttcctcctggcgtgggtgaacgttctaatggtgaaattggcaacaacgaaaactatgaagttattaccgctgatagcgcaatcgacgaaagcaatgtgggtaaccgtattctacgcaacatgggttggcaagagggactgggtctcggaaaggatggcagcggtatcaaggaaccagtccaggcaaaatccgtggacgtcagggctggactaggaagtcagcagcggaaggctgatccaatcctggaggccaaagccggagacagctacaaaaccatcatccagaagaaggccatggcaagattcaaggagatgtcctagctagaccttttttttttgtatattcggttgtcgtattttgtcgtccgtatacttttttttttacaatctgtgcactgttttgcttgtgttttttttcttcacaaacctagccactgaattgtgatttattatcctcaaaggggcaccgtgtttatcttattattactatgtagttcgagacctggatgctttttttttcatgtgtgttggggttttcatttgcacgacgaatgtgcccgatcagttgctttgccacacatgatgtggcggtactgcctctacatcttatcgtggcacaggttgttttt

SEQ ID NO: 77634 - DNA, 8583 bp, Zea Mays
actcgcgactccgcccgcctgcccagcgatagcgccatagcggcgaccggcgagctccaatatcacgcggatcggcggcggcgcccttgccccggagccccgcggcggcgcggccctgtccccgttccccgccccggcggtaggcagccccgtctcctgtcgagcgctcccaccaccccagccccggcgcccccgctcccagcccgaccgctgtatccgcggcgaccggcgtcccgaacggacgcggcccgagcgcctggctcacagaaaatctgcacacaaaactacaaaagtttaaggtcaccaagaaccttgcaggataacacaagtgctggattttggaaatggaccatgggctttatgctccacaacatggatgggagaacaacagtgtaattgcagtcttttcctttactaactactgaagatgatgaaatagcagaattttggccatgtgattggcctctgtgtatccagcctttagttgtaaaggagttcaagaagaggccgttgcttaaatggaatggatttacctgcctgttctgtagaatttgttgctgactccacttattctgttgaatctacaggcatcaaatgggtatggtgcaatcaatgagccagattttaggtaaggcaactggtcatttagtgttctgttaactgggatattcatgtcctttattcctgtaaaaacgtcatttttttttctctagcaagctgatatatgtttttatttggtactgggttaactcttcaacaagttctcttcttttgtgatttgtgtcatgcatttaatatttatatagtgttctgtcatattaccatatcttcccctattaacttaatttgcaggtctggtggatcctacaatggtaggagatctgtggatgaaggttttcctagagattcatatgggaggggtgcatactgtcaggatacacatgatagaaatatgtatgcaccaccgccatctgttggtggaatatggtctcagcctcgaaggaatcatgatgaggaatatgcaactgcaagagatcacagaaggcacaatactgattatcacaatgatggaaaacatcatgagtttgattcatacagagttgatagactccatgataattatcatgctactgacagctattatgaatctggcagtcgccctgattttggtgttgataggagcaaaaggattggaagcagagaaagtgcggagtttcatggtgagtttgaagaccggtaccacagttctaaccaaagcagagatgacagctatgagagagatcatgaatatggtcattatgattatgattcggaccatgagagaggcaggagagatagtagctggaaaagacgcgattcatgcgagagcaaacgtgaaagaagtggattaagtcgtgaaagagaggaaagtccatacatgcgccatagccgttctcgatcacatggacgtgatgaccgatcaagatcatggtctagatcaagatctcctcgtgcgagaagtcatggtcggaaccaaagagatggcctgtatgatgataatcgatttgacagaagaagggaatatgattgggatgataggaggcatggtgattcagtggtattgacatactgcatacatacatacatttgtagcagtggctttggaatttacaaaccatgagtttgcattcatgtttgcaggccccatctgccactgttgttgtcaagggactgtctatgaagactaatgatgatgacctatatcagattctttctcagtggggccctctacgcagtgtacgtgtgatcaaggaacggaattctggcatgtctcgtggatttgcttttattgacttctccactgtggaagctgcctgtagaatgatggaagctactggaaagagtggtctccaaattgatggcaggaatgtgttctttcagtacagtagtaaaccaaccggtgtaatgggtgggtcttctcctggacaagaaaatcttacaaggcctacttatgggccccgcactgttgctgcactctgtgactggatttgttctatatgcggatgtatgaatttcgcccgcaggacctcctgttttcagtgcaatgaacctcgtgctgaggatgctctaccagctgatgcgacaggttcctctccacactttgggagaaagggatctgaactaggtccaactcatgttttagttgttcgtggcttagatgaaaatgctgatgaggaaatgcttcggtacgaatttgctaagcacgcaccattaaaggacatccgccttgttcgggataagtttactcatgtgtctagaggttttgccttcgttcatttccattcggtggaagatgctacgaaagctctggaagctacaaatgggattacactcgagaaaaacggtcaggttttgcgtgtagcatatgctaaaagtacacatggacctgcatcagggggctcacagtcaaacagccttgctgcagctgccattgaggctgcatcatttgctcaacagtatgatgccataggttgggctccaaaagagtacaatcctgatgacaaacagaacagtaactttgaatctcaaaaagacgatggcagtggcacagcacagtcgggatttgtttgggatgaaaaatctggttactactatgattctgcatctggattctattatgacggaacaactggcctttactatgacagcaactctggagtttggtattcgtacgatcaacagactcaacagtatgtcccttgtactgaccagagcaatactaaggcagccggggagacgtccagtgaaaacatgatctcagatagtatttgtgggaaaaaggttgtgatctctgcgcctgctgccacaattaaacaaaacaagaaaacatcactccctgatgctgttcaagctgctgcaaatgcagccctggctgcagaaaagagagaaaaggagaaggcaaaagagattaagttggcctcaaaaagtagtctcatagctaataagaagaagatgaacaatgtcctagccatgtggaagcaaaggaatcaagaagggcaggccgcacggattgtcattgatgacaaagaaccaccaaattctgatgatagatttaatcattcacatagtggaactggtttctcttcgaaaagcaagccaaattttgaatttgaaaatgctatggataattctgttcgccaaggaattgcatcgacccaaatgttggattctgatgtaaagcctagacctgtcagtaacagcttaggtactacagttatgggtgtcataagaggttctactagaggagtgatcaagtcggatactacgtttcatgcattatctgatgccgggagcactgattcccgcaccactataatcacaagatcaaatgggttaatgacaagtcctgtggaacttgtaactcctgcaccctacaaaactgatgtgtctgccttagtctctaatacttcatcgggagtttctgggagtggtaaacgtcggttttctgaggcaccagggcaatcccagtacagggatcgagctgcagaaagacggaatctgtatggatcatctcttcgcactgatgctgttggattggattcaagtaagaatacactttcttaagtttttctttatcgcgtacaattgttgtcattttcccattgtcattccttcagcacgatgtgttagtaacagcaacatactgtccgttcagattttttttgttattctcatcattatcattttgctgaagcatcattgtcagtattagtgttggtataaggctgacttggtatttctgggagtctttttgttaccataggaatatgtccttgaccaacatacagttcaggaatcttattttttgttttgtttgtaagctttttattgattttctggaaattacctgttgtcaagctggtcactatccgtcccgaaagggtccaagtgagatagggtcgatgccatttcctcctggcgtgggtgaacgttctaatggtgaaattggcaacaacgaaaactatgaagttattaccgctgatagcgcaatcgacgaaagcaatgtgggtaaccgtattctacgcaacatgggttggcaagagggactggtaagttcatgtcccacatatttctcagtttgagatgctctcaggcttgatagcattttccatgagtgtttatgcctcttctttatttctcttgctaatgcaattgcatctgactttgcaatctaatttatgtaagttttttatgagaaaaaggtaaatatgcctatttgtaataaggcagttgtatcaaatttattttaatgcagctctctggttttaaccggagtactttggagcttggtacgctattagtatgttagcaaatcttaagcttgtcttgttgatctctttacagaaataattaatgaagtatacctctgtgtcttgacttgattctgagtccatgtgcttcctttgtgtctagactctacaatgtaggaatcagaagtcactgacatacttagtctgagtgagaagatgcctagtttttagcctaagtgagaagatgtctagtttttaggtgcgtgcctgtagggaaacatcgctttgagaacaaagtggtggaaactgaaaggaaagacgacagaagccttcaaggaaagggtcatcaaagagggcactcggaagaagacaaacaataattgggagaagatggcaacctgcattcggaaggtggctttaaaggtgcgtggagcaagtgagcaaccaaagggagtggaggcgaagctaaagttttttggtggtggaatgaggaagtctaaagggacctattaaggagaagaaagcatgctatagacgtttgtaccatgacaggagtggacaacatagagaagtataaggtagtaaaaaagactcgtggcaaagggtagggcgtacgaggatttttatcaaacgtgaaggaaggagggtgaaaggagaggacatatattgggattgttagggttcatgagaggaagacaagggacttcaaccaagttgagtgtattaaggacaaaacagagtaccttttcatggagtatgaggtcatatgtagatggtgagggtattttaacaaagtatttaatggggacaatggggatgtaacctttactactctttcgatgacaccaataagcactttgtgcgtagtatccaagaatccaagggtagagaggcattgaaatggatgaagggggtaagatgatggaccctaatgatatctgagacatggatatgccttggggacatagctatactatagttaaccaagttgtttaaccatatcttttggtcaaacaagatgtctgacaagtggagaaatatttaagggagatattcaaagttgtattaggtatcgggaattaagtttatgagccatactacgaagctatgagagagttatcgagcatcatctcaagggaataacaacaatctctgtgaaaccaatttggtttcgtgtctaaaaagtcaaccatggaagccattttctcaataagacaagttatggagtgatgtagggagcacaacctacccatggttttaatttacttggagaaggcctacgataaaataccaaggaatgttatgtggtgggtttggtcagacataatgttttagggtgtgcttggttctgcttttaacacctgtttctgcttaaaaaagtagaaagttggaccataggtctcccacccagcccttgcttttcccaccgcagttgcttttccgtagttgaactcatgaaggagacagattcttgcttttccaacggtggcaacaaagtcaagttcgaagaatttacccacctgacatcggttaaggggcactagactgttatttctctttctttcaccttttctctttcatcgttttcttcacactgttcaatccaaaagcttaagctattatagaagaaggtagtcaattcacttatacatttcaacatcttcacgcacgtgcagccagagaggcgcatacgtggaaataaaggggcggaggcacaaacttctgtaggttttgaacttgaaacctctgattccgatactatgttagagtggatgcagtaaccagttcaactcaaaagtttaatctattaggagaaggtagtcaatcaacttatacactttaatttttcaacacacatcgagtagggaccaaacaaaacccagagaaaagctagggttcggccgcatgccctcccaccatcccagtaccatatcactgtcctctacagtagccttggcggcttccgtatgcgcgaccccctctccaggaagacgctgtttagttatttagttgtttttaagttattttgtagttatttatatgtatgaaatgttataataggggttgaagtagacatctgaattattaggataaatttaatattttgaaatagatacgtataggatttggcgctaatatttagttatgttgttaaacacattataaaaacaagaaaaaatgtcgcatattttttgtgcattatttgcttcccacaacgaaaaacatgaaaaaacatttgaatccatattcaaattttatatatatatcatttgagaagatatatgacaaaatttgacgttttctttttatgaatcttaacaagttcaatgctaaaaacaagaatacggatttacacaacagattagcagattctttattcacaatcgaagcaaaaacaaaaaattaacatatgaaccaatatccgcttgcatctctaactataatggtgaaaattatgtcaatcatcacgaataatgttgcatgttgcaccacggtcaatttgcatataaacagtcttgcaatagatcatatgaagtctacattctcacatcagtttgaaccaaacgacttttagctttttcacaacaaacaactctcagcagacatcataagcaatttttctcaaagcagacaactgaacccagcgcacctttaatgaagtatgttggactcattaaggacatatacaacaatgttgtgatgatggagacacggatgacttttcggttagaataggactacatcaaggatcaactttgagcccttgttgcattagtgatgtgttacaaggggcatataaggggagatgccttagtgtatgtttttttatgtagtgctagatgacaaaagccgggcagaaaaataggaaattagagttgtcacgggagactctagagcccaaaggttttagactctttagaactaaaactgaatatatgagatatgaatttggcactactacacatgagcaagatgtttggaggccaagtagtgcccatgaaagatatctttaagtatttaggaccaatgctataaagcgacgtggatatcgattaagatgttagccatgaatcaaacctgtgtggatgaagtggcttcaagcatgtggtgttttaaatgacaagagggtaccacagaagctaaaaggcaaattttataggacgatgattatacctgctatgttgtatgatgcagaatgttggcctaaaaaaagacatgtttaatagacaagtgttgcggaaatgtgtgcgttgcgttgggtttgtggccgtataagaaagtaatgagtttggaacgatgatatatgtggtatggtaagggtagtgccaattgaagaaaagaggtcgagatggtttggatatatccaatgaagtcctctagaggcaccaatgcattttggattctaaggtgtgatagcaatgaaaagtgggacaggagaagactgaaattgatatgggacgatacaataaaaggagacttgaatggacagaatatagcacaaaaattagtttgaacaagagtgcatgtaaaacaagatatccacgtgtctaaatcttgtggttttctgttgggtttgaactctaaactatccaacttgcgataaaaagcttcgttgttgtggataagatgtctagcgtggaataaatagtttgttggacacgagaagtgattccatccaggggaaatcagtgtgcccatatttcatgcattgtggaaagtgcaaaaaatattgtattgtattccttctaatgtgagtgtgcatttgtattgtttttgtttcttgcaactattacgcaaatatccagggtctcggaaaggatggcagcggtatcaaggaaccagtccaggcaaaatccgtggacgtcagggctggactaggaagtcagcagcggaaggctgatccaatcctggaggccaaagccggagacagctacaaaaccatcatccagaagaaggccatggcaagattcaaggagatgtcctagctagaccttttttttttgtatattcggttgtcgtattttgtcgtccgtatacttttttttttacaatctgtgcactgttttgcttgtgttttttttcttcacaaacctagccactgaattgtgatttattatcctcaaaggggcaccgtgtttatcttattattactatgtagttcgagacctggatgctttttttttcatgtgtgttggggttttcatttgcacgacgaatgtgcccgatcagttgctttgccacacatgatgtggcggtactgcctctacatcttatcgtggcacaggttgttttt

SEQ ID NO: 77635 - DNA, 7656 bp, Zea Mays
actcgcgactccgcccgcctgcccagcgatagcgccatagcggcgaccggcgagctccaatatcacgcggatcggcggcggcgcccttgccccggagccccgcggcggcgcggccctgtccccgttccccgccccggcggtaggcagccccgtctcctgtcgagcgctcccaccaccccagccccggcgcccccgctcccagcccgaccgctgtatccgcggcgaccggcgtcccgaacggacgcggcccgagcgcctggctcacagaaaatctgcacacaaaactacaaaagtttaaggtcaccaagaaccttgcaggataacacaagtgctggattttggaaatggaccatgggctttatgctccacaacatggatgggagaacaacagtgcatcaaatgggtatggtgcaatcaatgagccagattttaggtctggtggatcctacaatggtaggagatctgtggatgaaggttttcctagagattcatatgggaggggtgcatactgtcaggatacacatgatagaaatatgtatgcaccaccgccatctgttggtggaatatggtctcagcctcgaaggaatcatgatgaggaatatgcaactgcaagagatcacagaagtcgccctgattttggtgttgataggagcaaaaggattggaagcagagaaagtgcggagtttcatggtgagtttgaagaccggtaccacagttctaaccaaagcagagatgacagctatgagagagatcatgaatatggtcattatgattatgattcggaccatgagagaggcaggagagatagtagctggaaaagacgcgattcatgcgagagcaaacgtgaaagaagtggattaagtcgtgaaagagaggaaagtccatacatgcgccatagccgttctcgatcacatggacgtgatgaccgatcaagatcatggtctagatcaagatctcctcgtgcgagaagtcatggtcggaaccaaagagatggcctgtatgatgataatcgatttgacagaagaagggaatatgattgggatgataggaggcatggtgattcagtggccccatctgccactgttgttgtcaagggactgtctatgaagactaatgatgatgacctatatcagattctttctcagtggggccctctacgcagtgtacgtgtgatcaaggaacggaattctggcatgtctcgtggatttgcttttattgacttctccactgtggaagctgcctgtagaatgatggaagctactggaaagagtggtctccaaattgatggcaggaatgtgttctttcagtacagtagtaaaccaaccggtgtaatgggtgggtcttctcctggacaagaaaatcttacaaggcctacttatgggccccgcactgttgctgcactctgtgactggatttgttctatatgcggatgtatgaatttcgcccgcaggacctcctgttttcagtgcaatgaacctcgtgctgaggatgctctaccagctgatgcgacaggttcctctccacactttgggagaaagggatctgaactaggtccaactcatgttttagttgttcgtggcttagatgaaaatgctgatgaggaaatgcttcggtacgaatttgctaagcacgcaccattaaaggacatccgccttgttcgggataagtttactcatgtgtctagaggttttgccttcgttcatttccattcggtggaagatgctacgaaagctctggaagctacaaatgggattacactcgagaaaaacggtcaggttttgcgtgtagcatatgctaaaagtacacatggacctgcatcagggggctcacagtcaaacagccttgctgcagctgccattgaggctgcatcatttgctcaacagtatgatgccataggttgggctccaaaagagtacaatcctgatgacaaacagaacagtaactttgaatctcaaaaagacgatggcagtggcacagcacagtcgggatttgtttgggatgaaaaatctggttactactatgattctgcatctggattctattatgacggaacaactggcctttactatgacagcaactctggagtttggtattcgtacgatcaacagactcaacagtatgtcccttgtactgaccagagcaatactaaggcagccggggagacgtccagtgaaaacatgatctcagatagtatttgtgggaaaaaggttgtgatctctgcgcctgctgccacaattaaacaaaacaagaaaacatcactccctgatgctgttcaagctgctgcaaatgcagccctggctgcagaaaagagagaaaaggagaaggcaaaagagattaagttggcctcaaaaagtagtctcatagctaataagaagaagatgaacaatgtcctagccatgtggaagcaaaggaatcaagaagggcaggccgcacggattgtcattgatgacaaagaaccaccaaattctgatgatagatttaatcattcacatagtggaactggtttctcttcgaaaagcaagccaaattttgaatttgaaaatgctatggataattctgttcgccaaggaattgcatcgacccaaatgttggattctgatgtaaagcctagacctgtcagtaacagcttaggtactacagttatgggtgtcataagaggttctactagaggagtgatcaagtcggatactacgtttcatgcattatctgatgccgggagcactgattcccgcaccactataatcacaagatcaaatgggttaatgacaagtcctgtggaacttgtaactcctgcaccctacaaaactgatgtgtctgccttagtctctaatacttcatcgggagtttctgggagtggtaaacgtcggttttctgaggcaccagggcaatcccagtacagggatcgagctgcagaaagacggaatctgtatggatcatctcttcgcactgatgctgttggattggattcaactggtcactatccgtcccgaaagggtccaagtgagatagggtcgatgccatttcctcctggcgtgggtgaacgttctaatggtgaaattggcaacaacgaaaactatgaagttattaccgctgatagcgcaatcgacgaaagcaatgtgggtaaccgtattctacgcaacatgggttggcaagagggactggtaagttcatgtcccacatatttctcagtttgagatgctctcaggcttgatagcattttccatgagtgtttatgcctcttctttatttctcttgctaatgcaattgcatctgactttgcaatctaatttatgtaagttttttatgagaaaaaggtaaatatgcctatttgtaataaggcagttgtatcaaatttattttaatgcagctctctggttttaaccggagtactttggagcttggtacgctattagtatgttagcaaatcttaagcttgtcttgttgatctctttacagaaataattaatgaagtatacctctgtgtcttgacttgattctgagtccatgtgcttcctttgtgtctagactctacaatgtaggaatcagaagtcactgacatacttagtctgagtgagaagatgcctagtttttagcctaagtgagaagatgtctagtttttaggtgcgtgcctgtagggaaacatcgctttgagaacaaagtggtggaaactgaaaggaaagacgacagaagccttcaaggaaagggtcatcaaagagggcactcggaagaagacaaacaataattgggagaagatggcaacctgcattcggaaggtggctttaaaggtgcgtggagcaagtgagcaaccaaagggagtggaggcgaagctaaagttttttggtggtggaatgaggaagtctaaagggacctattaaggagaagaaagcatgctatagacgtttgtaccatgacaggagtggacaacatagagaagtataaggtagtaaaaaagactcgtggcaaagggtagggcgtacgaggatttttatcaaacgtgaaggaaggagggtgaaaggagaggacatatattgggattgttagggttcatgagaggaagacaagggacttcaaccaagttgagtgtattaaggacaaaacagagtaccttttcatggagtatgaggtcatatgtagatggtgagggtattttaacaaagtatttaatggggacaatggggatgtaacctttactactctttcgatgacaccaataagcactttgtgcgtagtatccaagaatccaagggtagagaggcattgaaatggatgaagggggtaagatgatggaccctaatgatatctgagacatggatatgccttggggacatagctatactatagttaaccaagttgtttaaccatatcttttggtcaaacaagatgtctgacaagtggagaaatatttaagggagatattcaaagttgtattaggtatcgggaattaagtttatgagccatactacgaagctatgagagagttatcgagcatcatctcaagggaataacaacaatctctgtgaaaccaatttggtttcgtgtctaaaaagtcaaccatggaagccattttctcaataagacaagttatggagtgatgtagggagcacaacctacccatggttttaatttacttggagaaggcctacgataaaataccaaggaatgttatgtggtgggtttggtcagacataatgttttagggtgtgcttggttctgcttttaacacctgtttctgcttaaaaaagtagaaagttggaccataggtctcccacccagcccttgcttttcccaccgcagttgcttttccgtagttgaactcatgaaggagacagattcttgcttttccaacggtggcaacaaagtcaagttcgaagaatttacccacctgacatcggttaaggggcactagactgttatttctctttctttcaccttttctctttcatcgttttcttcacactgttcaatccaaaagcttaagctattatagaagaaggtagtcaattcacttatacatttcaacatcttcacgcacgtgcagccagagaggcgcatacgtggaaataaaggggcggaggcacaaacttctgtaggttttgaacttgaaacctctgattccgatactatgttagagtggatgcagtaaccagttcaactcaaaagtttaatctattaggagaaggtagtcaatcaacttatacactttaatttttcaacacacatcgagtagggaccaaacaaaacccagagaaaagctagggttcggccgcatgccctcccaccatcccagtaccatatcactgtcctctacagtagccttggcggcttccgtatgcgcgaccccctctccaggaagacgctgtttagttatttagttgtttttaagttattttgtagttatttatatgtatgaaatgttataataggggttgaagtagacatctgaattattaggataaatttaatattttgaaatagatacgtataggatttggcgctaatatttagttatgttgttaaacacattataaaaacaagaaaaaatgtcgcatattttttgtgcattatttgcttcccacaacgaaaaacatgaaaaaacatttgaatccatattcaaattttatatatatatcatttgagaagatatatgacaaaatttgacgttttctttttatgaatcttaacaagttcaatgctaaaaacaagaatacggatttacacaacagattagcagattctttattcacaatcgaagcaaaaacaaaaaattaacatatgaaccaatatccgcttgcatctctaactataatggtgaaaattatgtcaatcatcacgaataatgttgcatgttgcaccacggtcaatttgcatataaacagtcttgcaatagatcatatgaagtctacattctcacatcagtttgaaccaaacgacttttagctttttcacaacaaacaactctcagcagacatcataagcaatttttctcaaagcagacaactgaacccagcgcacctttaatgaagtatgttggactcattaaggacatatacaacaatgttgtgatgatggagacacggatgacttttcggttagaataggactacatcaaggatcaactttgagcccttgttgcattagtgatgtgttacaaggggcatataaggggagatgccttagtgtatgtttttttatgtagtgctagatgacaaaagccgggcagaaaaataggaaattagagttgtcacgggagactctagagcccaaaggttttagactctttagaactaaaactgaatatatgagatatgaatttggcactactacacatgagcaagatgtttggaggccaagtagtgcccatgaaagatatctttaagtatttaggaccaatgctataaagcgacgtggatatcgattaagatgttagccatgaatcaaacctgtgtggatgaagtggcttcaagcatgtggtgttttaaatgacaagagggtaccacagaagctaaaaggcaaattttataggacgatgattatacctgctatgttgtatgatgcagaatgttggcctaaaaaaagacatgtttaatagacaagtgttgcggaaatgtgtgcgttgcgttgggtttgtggccgtataagaaagtaatgagtttggaacgatgatatatgtggtatggtaagggtagtgccaattgaagaaaagaggtcgagatggtttggatatatccaatgaagtcctctagaggcaccaatgcattttggattctaaggtgtgatagcaatgaaaagtgggacaggagaagactgaaattgatatgggacgatacaataaaaggagacttgaatggacagaatatagcacaaaaattagtttgaacaagagtgcatgtaaaacaagatatccacgtgtctaaatcttgtggttttctgttgggtttgaactctaaactatccaacttgcgataaaaagcttcgttgttgtggataagatgtctagcgtggaataaatagtttgttggacacgagaagtgattccatccaggggaaatcagtgtgcccatatttcatgcattgtggaaagtgcaaaaaatattgtattgtattccttctaatgtgagtgtgcatttgtattgtttttgtttcttgcaactattacgcaaatatccagggtctcggaaaggatggcagcggtatcaaggaaccagtccaggcaaaatccgtggacgtcagggctggactaggaagtcagcagcggaaggctgatccaatcctggaggccaaagccggagacagctacaaaaccatcatccagaagaaggccatggcaagattcaaggagatgtcctagctagaccttttttttttgtatattcggttgtcgtattttgtcgtccgtatacttttttttttacaatctgtgcactgttttgcttgtgttttttttcttcacaaacctagccactgaattgtgatttattatcctcaaaggggcaccgtgtttatcttattattactatgtagttcgagacctggatgctttttttttcatgtgtgttggggttttcatttgcacgacgaatgtgcccgatcagttgctttgccacacatgatgtggcggtactgcctctacatcttatcgtggcacaggttgttttt

SEQ ID NO: 77636 - DNA, 4075 bp, Zea Mays
actcgcgactccgcccgcctgcccagcgatagcgccatagcggcgaccggcgagctccaatatcacgcggatcggcggcggcgcccttgccccggagccccgcggcggcgcggccctgtccccgttccccgccccggcggtaggcagccccgtctcctgtcgagcgctcccaccaccccagccccggcgcccccgctcccagcccgaccgctgtatccgcggcgaccggcgtcccgaacggacgcggcccgagcgcctggctcacagaaaatctgcacacaaaactacaaaagtttaaggtcaccaagaaccttgcaggataacacaagtgctggattttggaaatggaccatgggctttatgctccacaacatggatgggagaacaacagtgtaattgcagtcttttcctttactaactactgaagatgatgaaatagcagaattttggccatgtgattggcctctgtgtatccagcctttagttgtaaaggagttcaagaagaggccgttgcttaaatggaatggatttacctgcctgttctgtagaatttgttgctgactccacttattctgttgaatctacaggcatcaaatgggtatggtgcaatcaatgagccagattttaggtctggtggatcctacaatggtaggagatctgtggatgaaggttttcctagagattcatatgggaggggtgcatactgtcaggatacacatgatagaaatatgtatgcaccaccgccatctgttggtggaatatggtctcagcctcgaaggaatcatgatgaggaatatgcaactgcaagagatcacagaaggcacaatactgattatcacaatgatggaaaacatcatgagtttgattcatacagagttgatagactccatgataattatcatgctactgacagctattatgaatctggcagtcgccctgattttggtgttgataggagcaaaaggattggaagcagagaaagtgcggagtttcatggtgagtttgaagaccggtaccacagttctaaccaaagcagagatgacagctatgagagagatcatgaatatggtcattatgattatgattcggaccatgagagaggcaggagagatagtagctggaaaagacgcgattcatgcgagagcaaacgtgaaagaagtggattaagtcgtgaaagagaggaaagtccatacatgcgccatagccgttctcgatcacatggacgtgatgaccgatcaagatcatggtctagatcaagatctcctcgtgcgagaagtcatggtcggaaccaaagagatggcctgtatgatgataatcgatttgacagaagaagggaatatgattgggatgataggaggcatggtgattcagtggtattgacatactgcatacatacatacatttgtagcagtggctttggaatttacaaaccatgagtttgcattcatgtttgcaggccccatctgccactgttgttgtcaagggactgtctatgaagactaatgatgatgacctatatcagattctttctcagtggggccctctacgcagtgtacgtgtgatcaaggaacggaattctggcatgtctcgtggatttgcttttattgacttctccactgtggaagctgcctgtagaatgatggaagctactggaaagagtggtctccaaattgatggcaggaatgtgttctttcagtacagtagtaaaccaaccggtgtaatgggtgggtcttctcctggacaagaaaatcttacaaggcctacttatgggccccgcactgttgctgcactctgtgactggatttgttctatatgcggatgtatgaatttcgcccgcaggacctcctgttttcagtgcaatgaacctcgtgctgaggatgctctaccagctgatgcgacaggttcctctccacactttgggagaaagggatctgaactaggtccaactcatgttttagttgttcgtggcttagatgaaaatgctgatgaggaaatgcttcggtacgaatttgctaagcacgcaccattaaaggacatccgccttgttcgggataagtttactcatgtgtctagaggttttgccttcgttcatttccattcggtggaagatgctacgaaagctctggaagctacaaatgggattacactcgagaaaaacggtcaggttttgcgtgtagcatatgctaaaagtacacatggacctgcatcagggggctcacagtcaaacagccttgctgcagctgccattgaggctgcatcatttgctcaacagtatgatgccataggttgggctccaaaagagtacaatcctgatgacaaacagaacagtaactttgaatctcaaaaagacgatggcagtggcacagcacagtcgggatttgtttgggatgaaaaatctggttactactatgattctgcatctggattctattatgacggaacaactggcctttactatgacagcaactctggagtttggtattcgtacgatcaacagactcaacagtatgtcccttgtactgaccagagcaatactaaggcagccggggagacgtccagtgaaaacatgatctcagatagtatttgtgggaaaaaggttgtgatctctgcgcctgctgccacaattaaacaaaacaagaaaacatcactccctgatgctgttcaagctgctgcaaatgcagccctggctgcagaaaagagagaaaaggagaaggcaaaagagattaagttggcctcaaaaagtagtctcatagctaataagaagaagatgaacaatgtcctagccatgtggaagcaaaggaatcaagaagggcaggccgcacggattgtcattgatgacaaagaaccaccaaattctgatgatagatttaatcattcacatagtggaactggtttctcttcgaaaagcaagccaaattttgaatttgaaaatgctatggataattctgttcgccaaggaattgcatcgacccaaatgttggattctgatgtaaagcctagacctgtcagtaacagcttaggtactacagttatgggtgtcataagaggttctactagaggagtgatcaagtcggatactacgtttcatgcattatctgatgccgggagcactgattcccgcaccactataatcacaagatcaaatgggttaatgacaagtcctgtggaacttgtaactcctgcaccctacaaaactgatgtgtctgccttagtctctaatacttcatcgggagtttctgggagtggtaaacgtcggttttctgaggcaccagggcaatcccagtacagggatcgagctgcagaaagacggaatctgtatggatcatctcttcgcactgatgctgttggattggattcaactttttattgattttctggaaattacctgttgtcaagctggtcactatccgtcccgaaagggtccaagtgagatagggtcgatgccatttcctcctggcgtgggtgaacgttctaatggtgaaattggcaacaacgaaaactatgaagttattaccgctgatagcgcaatcgacgaaagcaatgtgggtaaccgtattctacgcaacatgggttggcaagagggactgggtctcggaaaggatggcagcggtatcaaggaaccagtccaggcaaaatccgtggacgtcagggctggactaggaagtcagcagcggaaggctgatccaatcctggaggccaaagccggagacagctacaaaaccatcatccagaagaaggccatggcaagattcaaggagatgtcctagctagaccttttttttttgtatattcggttgtcgtattttgtcgtccgtatacttttttttttacaatctgtgcactgttttgcttgtgttttttttcttcacaaacctagccactgaattgtgatttattatcctcaaaggggcaccgtgtttatcttattattactatgtagttcgagacctggatgctttttttttcatgtgtgttggggttttcatttgcacgacgaatgtgcccgatcagttgctttgccacacatgatgtggcggtactgcctctacatcttatcgtggcacaggttgttttt

SEQ ID NO: 77637 - DNA, 7991 bp, Zea Mays
actcgcgactccgcccgcctgcccagcgatagcgccatagcggcgaccggcgagctccaatatcacgcggatcggcggcggcgcccttgccccggagccccgcggcggcgcggccctgtccccgttccccgccccggcggtaggcagccccgtctcctgtcgagcgctcccaccaccccagccccggcgcccccgctcccagcccgaccgctgtatccgcggcgaccggcgtcccgaacggacgcggcccgagcgcctggctcacagaaaatctgcacacaaaactacaaaagtttaaggtcaccaagaaccttgcaggataacacaagtgctggattttggaaatggaccatgggctttatgctccacaacatggatgggagaacaacagtgcatcaaatgggtatggtgcaatcaatgagccagattttaggtaaggcaactggtcatttagtgttctgttaactgggatattcatgtcctttattcctgtaaaaacgtcatttttttttctctagcaagctgatatatgtttttatttggtactgggttaactcttcaacaagttctcttcttttgtgatttgtgtcatgcatttaatatttatatagtgttctgtcatattaccatatcttcccctattaacttaatttgcaggtctggtggatcctacaatggtaggagatctgtggatgaaggttttcctagagattcatatgggaggggtgcatactgtcaggatacacatgatagaaatatgtatgcaccaccgccatctgttggtggaatatggtctcagcctcgaaggaatcatgatgaggaatatgcaactgcaagagatcacagaaggcacaatactgattatcacaatgatggaaaacatcatgagtttgattcatacagagttgatagactccatgataattatcatgctactgacagctattatgaatctggcagtcgccctgattttggtgttgataggagcaaaaggattggaagcagagaaagtgcggagtttcatggtgagtttgaagaccggtaccacagttctaaccaaagcagagatgacagctatgagagagatcatgaatatggtcattatgattatgattcggaccatgagagaggcaggagagatagtagctggaaaagacgcgattcatgcgagagcaaacgtgaaagaagtggattaagtcgtgaaagagaggaaagtccatacatgcgccatagccgttctcgatcacatggacgtgatgaccgatcaagatcatggtctagatcaagatctcctcgtgcgagaagtcatggtcggaaccaaagagatggcctgtatgatgataatcgatttgacagaagaagggaatatgattgggatgataggaggcatggtgattcagtggccccatctgccactgttgttgtcaagggactgtctatgaagactaatgatgatgacctatatcagattctttctcagtggggccctctacgcagtgtacgtgtgatcaaggaacggaattctggcatgtctcgtggatttgcttttattgacttctccactgtggaagctgcctgtagaatgatggaagctactggaaagagtggtctccaaattgatggcaggaatgtgttctttcagtacagtagtaaaccaaccggtgtaatgggtgggtcttctcctggacaagaaaatcttacaaggcctacttatgggccccgcactgttgctgcactctgtgactggatttgttctatatgcggatgtatgaatttcgcccgcaggacctcctgttttcagtgcaatgaacctcgtgctgaggatgctctaccagctgatgcgacaggttcctctccacactttgggagaaagggatctgaactaggtccaactcatgttttagttgttcgtggcttagatgaaaatgctgatgaggaaatgcttcggtacgaatttgctaagcacgcaccattaaaggacatccgccttgttcgggataagtttactcatgtgtctagaggttttgccttcgttcatttccattcggtggaagatgctacgaaagctctggaagctacaaatgggattacactcgagaaaaacggtcaggttttgcgtgtagcatatgctaaaagtacacatggacctgcatcagggggctcacagtcaaacagccttgctgcagctgccattgaggctgcatcatttgctcaacagtatgatgccataggttgggctccaaaagagtacaatcctgatgacaaacagaacagtaactttgaatctcaaaaagacgatggcagtggcacagcacagtcgggatttgtttgggatgaaaaatctggttactactatgattctgcatctggattctattatgacggaacaactggcctttactatgacagcaactctggagtttggtattcgtacgatcaacagactcaacagtatgtcccttgtactgaccagagcaatactaaggcagccggggagacgtccagtgaaaacatgatctcagatagtatttgtgggaaaaaggttgtgatctctgcgcctgctgccacaattaaacaaaacaagaaaacatcactccctgatgctgttcaagctgctgcaaatgcagccctggctgcagaaaagagagaaaaggagaaggcaaaagagattaagttggcctcaaaaagtagtctcatagctaataagaagaagatgaacaatgtcctagccatgtggaagcaaaggaatcaagaagggcaggccgcacggattgtcattgatgacaaagaaccaccaaattctgatgatagatttaatcattcacatagtggaactggtttctcttcgaaaagcaagccaaattttgaatttgaaaatgctatggataattctgttcgccaaggaattgcatcgacccaaatgttggattctgatgtaaagcctagacctgtcagtaacagcttaggtactacagttatgggtgtcataagaggttctactagaggagtgatcaagtcggatactacgtttcatgcattatctgatgccgggagcactgattcccgcaccactataatcacaagatcaaatgggttaatgacaagtcctgtggaacttgtaactcctgcaccctacaaaactgatgtgtctgccttagtctctaatacttcatcgggagtttctgggagtggtaaacgtcggttttctgaggcaccagggcaatcccagtacagggatcgagctgcagaaagacggaatctgtatggatcatctcttcgcactgatgctgttggattggattcaactggtcactatccgtcccgaaagggtccaagtgagatagggtcgatgccatttcctcctggcgtgggtgaacgttctaatggtgaaattggcaacaacgaaaactatgaagttattaccgctgatagcgcaatcgacgaaagcaatgtgggtaaccgtattctacgcaacatgggttggcaagagggactggtaagttcatgtcccacatatttctcagtttgagatgctctcaggcttgatagcattttccatgagtgtttatgcctcttctttatttctcttgctaatgcaattgcatctgactttgcaatctaatttatgtaagttttttatgagaaaaaggtaaatatgcctatttgtaataaggcagttgtatcaaatttattttaatgcagctctctggttttaaccggagtactttggagcttggtacgctattagtatgttagcaaatcttaagcttgtcttgttgatctctttacagaaataattaatgaagtatacctctgtgtcttgacttgattctgagtccatgtgcttcctttgtgtctagactctacaatgtaggaatcagaagtcactgacatacttagtctgagtgagaagatgcctagtttttagcctaagtgagaagatgtctagtttttaggtgcgtgcctgtagggaaacatcgctttgagaacaaagtggtggaaactgaaaggaaagacgacagaagccttcaaggaaagggtcatcaaagagggcactcggaagaagacaaacaataattgggagaagatggcaacctgcattcggaaggtggctttaaaggtgcgtggagcaagtgagcaaccaaagggagtggaggcgaagctaaagttttttggtggtggaatgaggaagtctaaagggacctattaaggagaagaaagcatgctatagacgtttgtaccatgacaggagtggacaacatagagaagtataaggtagtaaaaaagactcgtggcaaagggtagggcgtacgaggatttttatcaaacgtgaaggaaggagggtgaaaggagaggacatatattgggattgttagggttcatgagaggaagacaagggacttcaaccaagttgagtgtattaaggacaaaacagagtaccttttcatggagtatgaggtcatatgtagatggtgagggtattttaacaaagtatttaatggggacaatggggatgtaacctttactactctttcgatgacaccaataagcactttgtgcgtagtatccaagaatccaagggtagagaggcattgaaatggatgaagggggtaagatgatggaccctaatgatatctgagacatggatatgccttggggacatagctatactatagttaaccaagttgtttaaccatatcttttggtcaaacaagatgtctgacaagtggagaaatatttaagggagatattcaaagttgtattaggtatcgggaattaagtttatgagccatactacgaagctatgagagagttatcgagcatcatctcaagggaataacaacaatctctgtgaaaccaatttggtttcgtgtctaaaaagtcaaccatggaagccattttctcaataagacaagttatggagtgatgtagggagcacaacctacccatggttttaatttacttggagaaggcctacgataaaataccaaggaatgttatgtggtgggtttggtcagacataatgttttagggtgtgcttggttctgcttttaacacctgtttctgcttaaaaaagtagaaagttggaccataggtctcccacccagcccttgcttttcccaccgcagttgcttttccgtagttgaactcatgaaggagacagattcttgcttttccaacggtggcaacaaagtcaagttcgaagaatttacccacctgacatcggttaaggggcactagactgttatttctctttctttcaccttttctctttcatcgttttcttcacactgttcaatccaaaagcttaagctattatagaagaaggtagtcaattcacttatacatttcaacatcttcacgcacgtgcagccagagaggcgcatacgtggaaataaaggggcggaggcacaaacttctgtaggttttgaacttgaaacctctgattccgatactatgttagagtggatgcagtaaccagttcaactcaaaagtttaatctattaggagaaggtagtcaatcaacttatacactttaatttttcaacacacatcgagtagggaccaaacaaaacccagagaaaagctagggttcggccgcatgccctcccaccatcccagtaccatatcactgtcctctacagtagccttggcggcttccgtatgcgcgaccccctctccaggaagacgctgtttagttatttagttgtttttaagttattttgtagttatttatatgtatgaaatgttataataggggttgaagtagacatctgaattattaggataaatttaatattttgaaatagatacgtataggatttggcgctaatatttagttatgttgttaaacacattataaaaacaagaaaaaatgtcgcatattttttgtgcattatttgcttcccacaacgaaaaacatgaaaaaacatttgaatccatattcaaattttatatatatatcatttgagaagatatatgacaaaatttgacgttttctttttatgaatcttaacaagttcaatgctaaaaacaagaatacggatttacacaacagattagcagattctttattcacaatcgaagcaaaaacaaaaaattaacatatgaaccaatatccgcttgcatctctaactataatggtgaaaattatgtcaatcatcacgaataatgttgcatgttgcaccacggtcaatttgcatataaacagtcttgcaatagatcatatgaagtctacattctcacatcagtttgaaccaaacgacttttagctttttcacaacaaacaactctcagcagacatcataagcaatttttctcaaagcagacaactgaacccagcgcacctttaatgaagtatgttggactcattaaggacatatacaacaatgttgtgatgatggagacacggatgacttttcggttagaataggactacatcaaggatcaactttgagcccttgttgcattagtgatgtgttacaaggggcatataaggggagatgccttagtgtatgtttttttatgtagtgctagatgacaaaagccgggcagaaaaataggaaattagagttgtcacgggagactctagagcccaaaggttttagactctttagaactaaaactgaatatatgagatatgaatttggcactactacacatgagcaagatgtttggaggccaagtagtgcccatgaaagatatctttaagtatttaggaccaatgctataaagcgacgtggatatcgattaagatgttagccatgaatcaaacctgtgtggatgaagtggcttcaagcatgtggtgttttaaatgacaagagggtaccacagaagctaaaaggcaaattttataggacgatgattatacctgctatgttgtatgatgcagaatgttggcctaaaaaaagacatgtttaatagacaagtgttgcggaaatgtgtgcgttgcgttgggtttgtggccgtataagaaagtaatgagtttggaacgatgatatatgtggtatggtaagggtagtgccaattgaagaaaagaggtcgagatggtttggatatatccaatgaagtcctctagaggcaccaatgcattttggattctaaggtgtgatagcaatgaaaagtgggacaggagaagactgaaattgatatgggacgatacaataaaaggagacttgaatggacagaatatagcacaaaaattagtttgaacaagagtgcatgtaaaacaagatatccacgtgtctaaatcttgtggttttctgttgggtttgaactctaaactatccaacttgcgataaaaagcttcgttgttgtggataagatgtctagcgtggaataaatagtttgttggacacgagaagtgattccatccaggggaaatcagtgtgcccatatttcatgcattgtggaaagtgcaaaaaatattgtattgtattccttctaatgtgagtgtgcatttgtattgtttttgtttcttgcaactattacgcaaatatccagggtctcggaaaggatggcagcggtatcaaggaaccagtccaggcaaaatccgtggacgtcagggctggactaggaagtcagcagcggaaggctgatccaatcctggaggccaaagccggagacagctacaaaaccatcatccagaagaaggccatggcaagattcaaggagatgtcctagctagaccttttttttttgtatattcggttgtcgtattttgtcgtccgtatacttttttttttacaatctgtgcactgttttgcttgtgttttttttcttcacaaacctagccactgaattgtgatttattatcctcaaaggggcaccgtgtttatcttattattactatgtagttcgagacctggatgctttttttttcatgtgtgttggggttttcatttgcacgacgaatgtgcccgatcagttgctttgccacacatgatgtggcggtactgcctctacatcttatcgtggcacaggttgttttt

SEQ ID NO: 77638 - DNA, 3894 bp, Zea Mays
actcgcgactccgcccgcctgcccagcgatagcgccatagcggcgaccggcgagctccaatatcacgcggatcggcggcggcgcccttgccccggagccccgcggcggcgcggccctgtccccgttccccgccccggcggtaggcagccccgtctcctgtcgagcgctcccaccaccccagccccggcgcccccgctcccagcccgaccgctgtatccgcggcgaccggcgtcccgaacggacgcggcccgagcgcctggctcacagaaaatctgcacacaaaactacaaaagtttaaggtcaccaagaaccttgcaggataacacaagtgctggattttggaaatggaccatgggctttatgctccacaacatggatgggagaacaacagtgcatcaaatgggtatggtgcaatcaatgagccagattttaggtctggtggatcctacaatggtaggagatctgtggatgaaggttttcctagagattcatatgggaggggtgcatactgtcaggatacacatgatagaaatatgtatgcaccaccgccatctgttggtggaatatggtctcagcctcgaaggaatcatgatgaggaatatgcaactgcaagagatcacagaaggcacaatactgattatcacaatgatggaaaacatcatgagtttgattcatacagagttgatagactccatgataattatcatgctactgacagctattatgaatctggcagtcgccctgattttggtgttgataggagcaaaaggattggaagcagagaaagtgcggagtttcatggtgagtttgaagaccggtaccacagttctaaccaaagcagagatgacagctatgagagagatcatgaatatggtcattatgattatgattcggaccatgagagaggcaggagagatagtagctggaaaagacgcgattcatgcgagagcaaacgtgaaagaagtggattaagtcgtgaaagagaggaaagtccatacatgcgccatagccgttctcgatcacatggacgtgatgaccgatcaagatcatggtctagatcaagatctcctcgtgcgagaagtcatggtcggaaccaaagagatggcctgtatgatgataatcgatttgacagaagaagggaatatgattgggatgataggaggcatggtgattcagtggtattgacatactgcatacatacatacatttgtagcagtggctttggaatttacaaaccatgagtttgcattcatgtttgcaggccccatctgccactgttgttgtcaagggactgtctatgaagactaatgatgatgacctatatcagattcttgtacaagttcttcataacttcttgcaccggttttaagtgtattgtctattgtctcgttcgttttaatcatttcgcctgttctcttgtagtctcagtggggccctctacgcagtgtacgtgtgatcaaggaacggaattctggcatgtctcgtggatttgcttttattgacttctccactgtggaagctgcctgtagaatgatggaagctactggaaagagtggtctccaaattgatggcaggaatgtgttctttcagtacagtaaaccaaccggtgtaatgggtgggtcttctcctggacaagaaaatcttacaaggcctacttatgggccccgcactgttgctgcactctgtgactggatttgttctatatgcggattgcaatgaacctcgtgctgaggatgctctaccagctgatgcgacaggttcctctccacactttgggagaaagggatctgaactaggtccaactcatgttttagttgttcgtggcttagatgaaaatgctgatgaggaaatgcttcggtacgaatttgctaagcacgcaccattaaaggacatccgccttgttcgggataagtttactcatgtgtctagaggttttgccttcgttcatttccattcggtggaagatgctacgaaagctctggaagctacaaatgggattacactcgagaaaaacggtcaggttttgcgtgtagcatatgctaaaagtacacatggacctgcatcagggggctcacagtcaaacagccttgctgcagctgccattgaggctgcatcatttgctcaacagtatgatgccataggttgggctccaaaagagtacaatcctgatgacaaacagaacagtaactttgaatctcaaaaagacgatggcagtggcacagcacagtcgggatttgtttgggatgaaaaatctggttactactatgattctgcatctggattctattatgacggaacaactggcctttactatgacagcaactctggagtttggtattcgtacgatcaacagactcaacagtatgtcccttgtactgaccagagcaatactaaggcagccggggagacgtccagtgaaaacatgatctcagatagtatttgtgggaaaaaggttgtgatctctgcgcctgctgccacaattaaacaaaacaagaaaacatcactccctgatgctgttcaagctgctgcaaatgcagccctggctgcagaaaagagagaaaaggagaaggcaaaagagattaagttggcctcaaaaagtagtctcatagctaataagaagaagatgaacaatgtcctagccatgtggaagcaaaggaatcaagaagggcaggccgcacggattgtcattgatgacaaagaaccaccaaattctgatgatagatttaatcattcacatagtggaactggtttctcttcgaaaagcaagccaaattttgaatttgaaaatgctatggataattctgttcgccaaggaattgcatcgacccaaatgttggattctgatgtaaagcctagacctgtcagtaacagcttaggtactacagttatgggtgtcataagaggttctactagaggagtgatcaagtcggatactacgtttcatgcattatctgatgccgggagcactgattcccgcaccactataatcacaagatcaaatgggttaatgacaagtcctgtggaacttgtaactcctgcaccctacaaaactgatgtgtctgccttagtctctaatacttcatcgggagtttctgggagtggtaaacgtcggttttctgaggcaccagggcaatcccagtacagggatcgagctgcagaaagacggaatctgtatggatcatctcttcgcactgatgctgttggattggattcaactggtcactatccgtcccgaaagggtccaagtgagatagggtcgatgccatttcctcctggcgtgggtgaacgttctaatggtgaaattggcaacaacgaaaactatgaagttattaccgctgatagcgcaatcgacgaaagcaatgtgggtaaccgtattctacgcaacatgggttggcaagagggactgggtctcggaaaggatggcagcggtatcaaggaaccagtccaggcaaaatccgtggacgtcagggctggactaggaagtcagcagcggaaggctgatccaatcctggaggccaaagccggagacagctacaaaaccatcatccagaagaaggccatggcaagattcaaggagatgtcctagctagaccttttttttttgtatattcggttgtcgtattttgtcgtccgtatacttttttttttacaatctgtgcactgttttgcttgtgttttttttcttcacaaacctagccactgaattgtgatttattatcctcaaaggggcaccgtgtttatcttattattactatgtagttcgagacctggatgctttttttttcatgtgtgttggggttttcatttgcacgacgaatgtgcccgatcagttgctttgccacacatgatgtggcggtactgcctctacatcttatcgtggcacaggttgttttt

SEQ ID NO: 77639 - DNA, 7970 bp, Zea Mays
actcgcgactccgcccgcctgcccagcgatagcgccatagcggcgaccggcgagctccaatatcacgcggatcggcggcggcgcccttgccccggagccccgcggcggcgcggccctgtccccgttccccgccccggcggtaggcagccccgtctcctgtcgagcgctcccaccaccccagccccggcgcccccgctcccagcccgaccgctgtatccgcggcgaccggcgtcccgaacggacgcggcccgagcgcctggctcacagaaaatctgcacacaaaactacaaaagtttaaggtcaccaagaaccttgcaggataacacaagtgctggattttggaaatggaccatgggctttatgctccacaacatggatgggagaacaacagtgcatcaaatgggtatggtgcaatcaatgagccagattttaggtctggtggatcctacaatggtaggagatctgtggatgaaggttttcctagagattcatatgggaggggtgcatactgtcaggatacacatgatagaaatatgtatgcaccaccgccatctgttggtggaatatggtctcagcctcgaaggaatcatgatgaggaatatgcaactgcaagagatcacagaagtcgccctgattttggtgttgataggagcaaaaggattggaagcagagaaagtgcggagtttcatggtgagtttgaagaccggtaccacagttctaaccaaagcagagatgacagctatgagagagatcatgaatatggtcattatgattatgattcggaccatgagagaggcaggagagatagtagctggaaaagacgcgattcatgcgagagcaaacgtgaaagaagtggattaagtcgtgaaagagaggaaagtccatacatgcgccatagccgttctcgatcacatggacgtgatgaccgatcaagatcatggtctagatcaagatctcctcgtgcgagaagtcatggtcggaaccaaagagatggcctgtatgatgataatcgatttgacagaagaagggaatatgattgggatgataggaggcatggtgattcagtggccccatctgccactgttgttgtcaagggactgtctatgaagactaatgatgatgacctatatcagattctttctcagtggggccctctacgcagtgtacgtgtgatcaaggaacggaattctggcatgtctcgtggatttgcttttattgacttctccactgtggaagctgcctgtagaatgatggaagctactggaaagagtggtctccaaattgatggcaggaatgtgttctttcagtacagtagtaaaccaaccggtgtaatgggtgggtcttctcctggacaagaaaatcttacaaggcctacttatgggccccgcactgttgctgcactctgtgactggatttgttctatatgcggatgtatgaatttcgcccgcaggacctcctgttttcagtgcaatgaacctcgtgctgaggatgctctaccagctgatgcgacaggttcctctccacactttgggagaaagggatctgaactaggtccaactcatgttttagttgttcgtggcttagatgaaaatgctgatgaggaaatgcttcggtacgaatttgctaagcacgcaccattaaaggacatccgccttgttcgggataagtttactcatgtgtctagaggttttgccttcgttcatttccattcggtggaagatgctacgaaagctctggaagctacaaatgggattacactcgagaaaaacggtcaggttttgcgtgtagcatatgctaaaagtacacatggacctgcatcagggggctcacagtcaaacagccttgctgcagctgccattgaggctgcatcatttgctcaacagtatgatgccataggttgggctccaaaagagtacaatcctgatgacaaacagaacagtaactttgaatctcaaaaagacgatggcagtggcacagcacagtcgggatttgtttgggatgaaaaatctggttactactatgattctgcatctggattctattatgacggaacaactggcctttactatgacagcaactctggagtttggtattcgtacgatcaacagactcaacagtatgtcccttgtactgaccagagcaatactaaggcagccggggagacgtccagtgaaaacatgatctcagatagtatttgtgggaaaaaggttgtgatctctgcgcctgctgccacaattaaacaaaacaagaaaacatcactccctgatgctgttcaagctgctgcaaatgcagccctggctgcagaaaagagagaaaaggagaaggcaaaagagattaagttggcctcaaaaagtagtctcatagctaataagaagaagatgaacaatgtcctagccatgtggaagcaaaggaatcaagaagggcaggccgcacggattgtcattgatgacaaagaaccaccaaattctgatgatagatttaatcattcacatagtggaactggtttctcttcgaaaagcaagccaaattttgaatttgaaaatgctatggataattctgttcgccaaggaattgcatcgacccaaatgttggattctgatgtaaagcctagacctgtcagtaacagcttaggtactacagttatgggtgtcataagaggttctactagaggagtgatcaagtcggatactacgtttcatgcattatctgatgccgggagcactgattcccgcaccactataatcacaagatcaaatgggttaatgacaagtcctgtggaacttgtaactcctgcaccctacaaaactgatgtgtctgccttagtctctaatacttcatcgggagtttctgggagtggtaaacgtcggttttctgaggcaccagggcaatcccagtacagggatcgagctgcagaaagacggaatctgtatggatcatctcttcgcactgatgctgttggattggattcaagtaagaatacactttcttaagtttttctttatcgcgtacaattgttgtcattttcccattgtcattccttcagcacgatgtgttagtaacagcaacatactgtccgttcagattttttttgttattctcatcattatcattttgctgaagcatcattgtcagtattagtgttggtataaggctgacttggtatttctgggagtctttttgttaccataggaatatgtccttgaccaacatacagttcaggaatcttattttttgttttgtttgtaagctttttattgattttctggaaattacctgttgtcaagctggtcactatccgtcccgaaagggtccaagtgagatagggtcgatgccatttcctcctggcgtgggtgaacgttctaatggtgaaattggcaacaacgaaaactatgaagttattaccgctgatagcgcaatcgacgaaagcaatgtgggtaaccgtattctacgcaacatgggttggcaagagggactggtaagttcatgtcccacatatttctcagtttgagatgctctcaggcttgatagcattttccatgagtgtttatgcctcttctttatttctcttgctaatgcaattgcatctgactttgcaatctaatttatgtaagttttttatgagaaaaaggtaaatatgcctatttgtaataaggcagttgtatcaaatttattttaatgcagctctctggttttaaccggagtactttggagcttggtacgctattagtatgttagcaaatcttaagcttgtcttgttgatctctttacagaaataattaatgaagtatacctctgtgtcttgacttgattctgagtccatgtgcttcctttgtgtctagactctacaatgtaggaatcagaagtcactgacatacttagtctgagtgagaagatgcctagtttttagcctaagtgagaagatgtctagtttttaggtgcgtgcctgtagggaaacatcgctttgagaacaaagtggtggaaactgaaaggaaagacgacagaagccttcaaggaaagggtcatcaaagagggcactcggaagaagacaaacaataattgggagaagatggcaacctgcattcggaaggtggctttaaaggtgcgtggagcaagtgagcaaccaaagggagtggaggcgaagctaaagttttttggtggtggaatgaggaagtctaaagggacctattaaggagaagaaagcatgctatagacgtttgtaccatgacaggagtggacaacatagagaagtataaggtagtaaaaaagactcgtggcaaagggtagggcgtacgaggatttttatcaaacgtgaaggaaggagggtgaaaggagaggacatatattgggattgttagggttcatgagaggaagacaagggacttcaaccaagttgagtgtattaaggacaaaacagagtaccttttcatggagtatgaggtcatatgtagatggtgagggtattttaacaaagtatttaatggggacaatggggatgtaacctttactactctttcgatgacaccaataagcactttgtgcgtagtatccaagaatccaagggtagagaggcattgaaatggatgaagggggtaagatgatggaccctaatgatatctgagacatggatatgccttggggacatagctatactatagttaaccaagttgtttaaccatatcttttggtcaaacaagatgtctgacaagtggagaaatatttaagggagatattcaaagttgtattaggtatcgggaattaagtttatgagccatactacgaagctatgagagagttatcgagcatcatctcaagggaataacaacaatctctgtgaaaccaatttggtttcgtgtctaaaaagtcaaccatggaagccattttctcaataagacaagttatggagtgatgtagggagcacaacctacccatggttttaatttacttggagaaggcctacgataaaataccaaggaatgttatgtggtgggtttggtcagacataatgttttagggtgtgcttggttctgcttttaacacctgtttctgcttaaaaaagtagaaagttggaccataggtctcccacccagcccttgcttttcccaccgcagttgcttttccgtagttgaactcatgaaggagacagattcttgcttttccaacggtggcaacaaagtcaagttcgaagaatttacccacctgacatcggttaaggggcactagactgttatttctctttctttcaccttttctctttcatcgttttcttcacactgttcaatccaaaagcttaagctattatagaagaaggtagtcaattcacttatacatttcaacatcttcacgcacgtgcagccagagaggcgcatacgtggaaataaaggggcggaggcacaaacttctgtaggttttgaacttgaaacctctgattccgatactatgttagagtggatgcagtaaccagttcaactcaaaagtttaatctattaggagaaggtagtcaatcaacttatacactttaatttttcaacacacatcgagtagggaccaaacaaaacccagagaaaagctagggttcggccgcatgccctcccaccatcccagtaccatatcactgtcctctacagtagccttggcggcttccgtatgcgcgaccccctctccaggaagacgctgtttagttatttagttgtttttaagttattttgtagttatttatatgtatgaaatgttataataggggttgaagtagacatctgaattattaggataaatttaatattttgaaatagatacgtataggatttggcgctaatatttagttatgttgttaaacacattataaaaacaagaaaaaatgtcgcatattttttgtgcattatttgcttcccacaacgaaaaacatgaaaaaacatttgaatccatattcaaattttatatatatatcatttgagaagatatatgacaaaatttgacgttttctttttatgaatcttaacaagttcaatgctaaaaacaagaatacggatttacacaacagattagcagattctttattcacaatcgaagcaaaaacaaaaaattaacatatgaaccaatatccgcttgcatctctaactataatggtgaaaattatgtcaatcatcacgaataatgttgcatgttgcaccacggtcaatttgcatataaacagtcttgcaatagatcatatgaagtctacattctcacatcagtttgaaccaaacgacttttagctttttcacaacaaacaactctcagcagacatcataagcaatttttctcaaagcagacaactgaacccagcgcacctttaatgaagtatgttggactcattaaggacatatacaacaatgttgtgatgatggagacacggatgacttttcggttagaataggactacatcaaggatcaactttgagcccttgttgcattagtgatgtgttacaaggggcatataaggggagatgccttagtgtatgtttttttatgtagtgctagatgacaaaagccgggcagaaaaataggaaattagagttgtcacgggagactctagagcccaaaggttttagactctttagaactaaaactgaatatatgagatatgaatttggcactactacacatgagcaagatgtttggaggccaagtagtgcccatgaaagatatctttaagtatttaggaccaatgctataaagcgacgtggatatcgattaagatgttagccatgaatcaaacctgtgtggatgaagtggcttcaagcatgtggtgttttaaatgacaagagggtaccacagaagctaaaaggcaaattttataggacgatgattatacctgctatgttgtatgatgcagaatgttggcctaaaaaaagacatgtttaatagacaagtgttgcggaaatgtgtgcgttgcgttgggtttgtggccgtataagaaagtaatgagtttggaacgatgatatatgtggtatggtaagggtagtgccaattgaagaaaagaggtcgagatggtttggatatatccaatgaagtcctctagaggcaccaatgcattttggattctaaggtgtgatagcaatgaaaagtgggacaggagaagactgaaattgatatgggacgatacaataaaaggagacttgaatggacagaatatagcacaaaaattagtttgaacaagagtgcatgtaaaacaagatatccacgtgtctaaatcttgtggttttctgttgggtttgaactctaaactatccaacttgcgataaaaagcttcgttgttgtggataagatgtctagcgtggaataaatagtttgttggacacgagaagtgattccatccaggggaaatcagtgtgcccatatttcatgcattgtggaaagtgcaaaaaatattgtattgtattccttctaatgtgagtgtgcatttgtattgtttttgtttcttgcaactattacgcaaatatccagggtctcggaaaggatggcagcggtatcaaggaaccagtccaggcaaaatccgtggacgtcagggctggactaggaagtcagcagcggaaggctgatccaatcctggaggccaaagccggagacagctacaaaaccatcatccagaagaaggccatggcaagattcaaggagatgtcctagctagaccttttttttttgtatattcggttgtcgtattttgtcgtccgtatacttttttttttacaatctgtgcactgttttgcttgtgttttttttcttcacaaacctagccactgaattgtgatttattatcctcaaaggggcaccgtgtttatcttattattactatgtagttcgagacctggatgctttttttttcatgtgtgttggggttttcatttgcacgacgaatgtgcccgatcagttgctttgccacacatgatgtggcggtactgcctctacatcttatcgtggcacaggttgttttt

SEQ ID NO: 77640 - DNA, 3963 bp, Zea Mays
actcgcgactccgcccgcctgcccagcgatagcgccatagcggcgaccggcgagctccaatatcacgcggatcggcggcggcgcccttgccccggagccccgcggcggcgcggccctgtccccgttccccgccccggcggtaggcagccccgtctcctgtcgagcgctcccaccaccccagccccggcgcccccgctcccagcccgaccgctgtatccgcggcgaccggcgtcccgaacggacgcggcccgagcgcctggctcacagaaaatctgcacacaaaactacaaaagtttaaggtcaccaagaaccttgcaggataacacaagtgctggattttggaaatggaccatgggctttatgctccacaacatggatgggagaacaacagtgcatcaaatgggtatggtgcaatcaatgagccagattttaggtctggtggatcctacaatggtaggagatctgtggatgaaggttttcctagagattcatatgggaggggtgcatactgtcaggatacacatgatagaaatatgtatgcaccaccgccatctgttggtggaatatggtctcagcctcgaaggaatcatgatgaggaatatgcaactgcaagagatcacagaagtcgccctgattttggtgttgataggagcaaaaggattggaagcagagaaagtgcggagtttcatggtgagtttgaagaccggtaccacagttctaaccaaagcagagatgacagctatgagagagatcatgaatatggtcattatgattatgattcggaccatgagagaggcaggagagatagtagctggaaaagacgcgattcatgcgagagcaaacgtgaaagaagtggattaagtcgtgaaagagaggaaagtccatacatgcgccatagccgttctcgatcacatggacgtgatgaccgatcaagatcatggtctagatcaagatctcctcgtgcgagaagtcatggtcggaaccaaagagatggcctgtatgatgataatcgatttgacagaagaagggaatatgattgggatgataggaggcatggtgattcagtggccccatctgccactgttgttgtcaagggactgtctatgaagactaatgatgatgacctatatcagattctttctcagtggggccctctacgcagtgtacgtgtgatcaaggaacggaattctggcatgtctcgtggatttgcttttattgacttctccactgtggaagctgcctgtagaatgatggaagctactggaaagagtggtctccaaattgatggcaggaatgtgttctttcagtacagtagtaaaccaaccggtgtaatgggtgggtcttctcctggacaagaaaatcttacaaggcctacttatgggccccgcactgttgctgcactctgtgactggatttgttctatatgcggatgtatgaatttcgcccgcaggacctcctgttttcagtgcaatgaacctcgtgctgaggatgctctaccagctgatgcgacaggttcctctccacactttgggagaaagggatctgaactaggtccaactcatgttttagttgttcgtggcttagatgaaaatgctgatgaggaaatgcttcggtacgaatttgctaagcacgcaccattaaaggacatccgccttgttcgggataagtttactcatgtgtctagaggttttgccttcgttcatttccattcggtggaagatgctacgaaagctctggaagctacaaatgggattacactcgagaaaaacggtcaggttttgcgtgtagcatatgctaaaagtacacatggacctgcatcagggggctcacagtcaaacagccttgctgcagctgccattgaggctgcatcatttgctcaacagtatgatgccataggttgggctccaaaagagtacaatcctgatgacaaacagaacagtaactttgaatctcaaaaagacgatggcagtggcacagcacagtcgggatttgtttgggatgaaaaatctggttactactatgattctgcatctggattctattatgacggaacaactggcctttactatgacagcaactctggagtttggtattcgtacgatcaacagactcaacagtatgtcccttgtactgaccagagcaatactaaggcagccggggagacgtccagtgaaaacatgatctcagatagtatttgtgggaaaaaggttgtgatctctgcgcctgctgccacaattaaacaaaacaagaaaacatcactccctgatgctgttcaagctgctgcaaatgcagccctggctgcagaaaagagagaaaaggagaaggcaaaagagattaagttggcctcaaaaagtagtctcatagctaataagaagaagatgaacaatgtcctagccatgtggaagcaaaggaatcaagaagggcaggccgcacggattgtcattgatgacaaagaaccaccaaattctgatgatagatttaatcattcacatagtggaactggtttctcttcgaaaagcaagccaaattttgaatttgaaaatgctatggataattctgttcgccaaggaattgcatcgacccaaatgttggattctgatgtaaagcctagacctgtcagtaacagcttaggtactacagttatgggtgtcataagaggttctactagaggagtgatcaagtcggatactacgtttcatgcattatctgatgccgggagcactgattcccgcaccactataatcacaagatcaaatgggttaatgacaagtcctgtggaacttgtaactcctgcaccctacaaaactgatgtgtctgccttagtctctaatacttcatcgggagtttctgggagtggtaaacgtcggttttctgaggcaccagggcaatcccagtacagggatcgagctgcagaaagacggaatctgtatggatcatctcttcgcactgatgctgttggattggattcaagtaagaatacactttcttaagtttttctttatcgcgtacaattgttgtcattttcccattgtcattccttcagcacgatgtgttagtaacagcaacatactgtccgttcagattttttttgttattctcatcattatcattttgctgaagcatcattgtcagtattagtgttggtataaggctgacttggtatttctgggagtctttttgttaccataggaatatgtccttgaccaacatacagttcaggaatcttattttttgttttgtttgtaagctttttattgattttctggaaattacctgttgtcaagctggtcactatccgtcccgaaagggtccaagtgagatagggtcgatgccatttcctcctggcgtgggtgaacgttctaatggtgaaattggcaacaacgaaaactatgaagttattaccgctgatagcgcaatcgacgaaagcaatgtgggtaaccgtattctacgcaacatgggttggcaagagggactgggtctcggaaaggatggcagcggtatcaaggaaccagtccaggcaaaatccgtggacgtcagggctggactaggaagtcagcagcggaaggctgatccaatcctggaggccaaagccggagacagctacaaaaccatcatccagaagaaggccatggcaagattcaaggagatgtcctagctagaccttttttttttgtatattcggttgtcgtattttgtcgtccgtatacttttttttttacaatctgtgcactgttttgcttgtgttttttttcttcacaaacctagccactgaattgtgatttattatcctcaaaggggcaccgtgtttatcttattattactatgtagttcgagacctggatgctttttttttcatgtgtgttggggttttcatttgcacgacgaatgtgcccgatcagttgctttgccacacatgatgtggcggtactgcctctacatcttatcgtggcacaggttgttttt

SEQ ID NO: 77641 - DNA, 3880 bp, Zea Mays
actcgcgactccgcccgcctgcccagcgatagcgccatagcggcgaccggcgagctccaatatcacgcggatcggcggcggcgcccttgccccggagccccgcggcggcgcggccctgtccccgttccccgccccggcggtaggcagccccgtctcctgtcgagcgctcccaccaccccagccccggcgcccccgctcccagcccgaccgctgtatccgcggcgaccggcgtcccgaacggacgcggcccgagcgcctggctcacagaaaatctgcacacaaaactacaaaagtttaaggtcaccaagaaccttgcaggataacacaagtgctggattttggaaatggaccatgggctttatgctccacaacatggatgggagaacaacagtgtaattgcagtcttttcctttactaactactgaagatgatgaaatagcagaattttggccatgtgattggcctctgtgtatccagcctttagttgtaaaggagttcaagaagaggccgttgcttaaatggaatggatttacctgcctgttctgtagaatttgttgctgactccacttattctgttgaatctacaggcatcaaatgggtatggtgcaatcaatgagccagattttaggtctggtggatcctacaatggtaggagatctgtggatgaaggttttcctagagattcatatgggaggggtgcatactgtcaggatacacatgatagaaatatgtatgcaccaccgccatctgttggtggaatatggtctcagcctcgaaggaatcatgatgaggaatatgcaactgcaagagatcacagaaggcacaatactgattatcacaatgatggaaaacatcatgagtttgattcatacagagttgatagactccatgataattatcatgctactgacagctattatgaatctggcagtcgccctgattttggtgttgataggagcaaaaggattggaagcagagaaagtgcggagtttcatggtgagtttgaagaccggtaccacagttctaaccaaagcagagatgacagctatgagagagatcatgaatatggtcattatgattatgattcggaccatgagagaggcaggagagatagtagctggaaaagacgcgattcatgcgagagcaaacgtgaaagaagtggattaagtcgtgaaagagaggaaagtccatacatgcgccatagccgttctcgatcacatggacgtgatgaccgatcaagatcatggtctagatcaagatctcctcgtgcgagaagtcatggtcggaaccaaagagatggcctgtatgatgataatcgatttgacagaagaagggaatatgattgggatgataggaggcatggtgattcagtggtattgacatactgcatacatacatacatttgtagcagtggctttggaatttacaaaccatgagtttgcattcatgtttgcaggccccatctgccactgttgttgtcaagggactgtctatgaagactaatgatgatgacctatatcagattctttctcagtggggccctctacgcagtgtacgtgtgatcaaggaacggaattctggcatgtctcgtggatttgcttttattgacttctccactgtgctgcctgtagaatgatggaagctactggaaagagtggtctccaaattgatggcaggaatgtgttctttcagtacagtgcaatgaacctcgtgctgaggatgctctaccagctgatgcgacaggttcctctccacactttgggagaaagggatctgaactaggtccaactcatgttttagttgttcgtggcttagatgaaaatgctgatgaggaaatgcttcggtacgaatttgctaagcacgcaccattaaaggacatccgccttgttcgggataagtttactcatgtgtctagaggttttgccttcgttcatttccattcggtggaagatgctacgaaagctctggaagctacaaatgggattacactcgagaaaaacggtcaggttttgcgtgtagcatatgctaaaagtacacatggacctgcatcagggggctcacagtcaaacagccttgctgcagctgccattgaggctgcatcatttgctcaacagtatgatgccataggttgggctccaaaagagtacaatcctgatgacaaacagaacagtaactttgaatctcaaaaagacgatggcagtggcacagcacagtcgggatttgtttgggatgaaaaatctggttactactatgattctgcatctggattctattatgacggaacaactggcctttactatgacagcaactctggagtttggtattcgtacgatcaacagactcaacagtatgtcccttgtactgaccagagcaatactaaggcagccggggagacgtccagtgaaaacatgatctcagatagtatttgtgggaaaaaggttgtgatctctgcgcctgctgccacaattaaacaaaacaagaaaacatcactccctgatgctgttcaagctgctgcaaatgcagccctggctgcagaaaagagagaaaaggagaaggcaaaagagattaagttggcctcaaaaagtagtctcatagctaataagaagaagatgaacaatgtcctagccatgtggaagcaaaggaatcaagaagggcaggccgcacggattgtcattgatgacaaagaaccaccaaattctgatgatagatttaatcattcacatagtggaactggtttctcttcgaaaagcaagccaaattttgaatttgaaaatgctatggataattctgttcgccaaggaattgcatcgacccaaatgttggattctgatgtaaagcctagacctgtcagtaacagcttaggtactacagttatgggtgtcataagaggttctactagaggagtgatcaagtcggatactacgtttcatgcattatctgatgccgggagcactgattcccgcaccactataatcacaagatcaaatgggttaatgacaagtcctgtggaacttgtaactcctgcaccctacaaaactgatgtgtctgccttagtctctaatacttcatcgggagtttctgggagtggtaaacgtcggttttctgaggcaccagggcaatcccagtacagggatcgagctgcagaaagacggaatctgtatggatcatctcttcgcactgatgctgttggattggattcaactggtcactatccgtcccgaaagggtccaagtgagatagggtcgatgccatttcctcctggcgtgggtgaacgttctaatggtgaaattggcaacaacgaaaactatgaagttattaccgctgatagcgcaatcgacgaaagcaatgtgggtaaccgtattctacgcaacatgggttggcaagagggactgggtctcggaaaggatggcagcggtatcaaggaaccagtccaggcaaaatccgtggacgtcagggctggactaggaagtcagcagcggaaggctgatccaatcctggaggccaaagccggagacagctacaaaaccatcatccagaagaaggccatggcaagattcaaggagatgtcctagctagaccttttttttttgtatattcggttgtcgtattttgtcgtccgtatacttttttttttacaatctgtgcactgttttgcttgtgttttttttcttcacaaacctagccactgaattgtgatttattatcctcaaaggggcaccgtgtttatcttattattactatgtagttcgagacctggatgctttttttttcatgtgtgttggggttttcatttgcacgacgaatgtgcccgatcagttgctttgccacacatgatgtggcggtactgcctctacatcttatcgtggcacaggttgttttt

SEQ ID NO: 77642 - DNA, 3804 bp, Zea Mays
ggatgtttcacttacggtcgcgactcgcgactccgcccgcctgcccagcgatagcgccatagcggcgaccggcgagctccaatatcacgcggatcggcggcggcgcccttgccccggagccccgcggcggcgcggccctgtccccgttccccgccccggcggtaggcagccccgtctcctgtcgagcgctcccaccaccccagccccggcgcccccgctcccagcccgaccgctgtatccgcggcgaccggcgtcccgaacggacgcggcccgagcgcctggctcacagaaaatctgcacacaaaactacaaaagtttaaggtcaccaagaaccttgcaggataacacaagtgctggattttggaaatggaccatgggctttatgctccacaacatggatgggagaacaacagtgtaattgcagtcttttcctttactaactactgaagatgatgaaatagcagaattttggccatgtgattggcctctgtgtatccagcctttagttgtaaaggagttcaagaagaggccgttgcttaaatggaatggatttacctgcctgttctgtagaatttgttgctgactccacttattctgttgaatctacaggcatcaaatgggtatggtgcaatcaatgagccagattttaggtctggtggatcctacaatggtaggagatctgtggatgaaggttttcctagagattcatatgggaggggtgcatactgtcaggatacacatgatagaaatatgtatgcaccaccgccatctgttggtggaatatggtctcagcctcgaaggaatcatgatgaggaatatgcaactgcaagagatcacagaaggcacaatactgattatcacaatgatggaaaacatcatgagtttgattcatacagagttgatagactccatgataattatcatgctactgacagctattatgaatctggcagtcgccctgattttggtgttgataggagcaaaaggattggaagcagagaaagtgcggagtttcatggtgagtttgaagaccggtaccacagttctaaccaaagcagagatgacagctatgagagagatcatgaatatggtcattatgattatgattcggaccatgagagaggcaggagagatagtagctggaaaagacgcgattcatgcgagagcaaacgtgaaagaagtggattaagtcgtgaaagagaggaaagtccatacatgcgccatagccgttctcgatcacatggacgtgatgaccgatcaagatcatggtctagatcaagatctcctcgtgcgagaagtcatggtcggaaccaaagagatggcctgtatgatgataatcgatttgacagaagaagggaatatgattgggatgataggaggcatggtgattcagtggtattgacatactgcatacatacatacatttgtagcagtggctttggaatttacaaaccatgagtttgcattcatgtttgcaggccccatctgccactgttgttgtcaagggactgtctatgaagactaatgatgatgacctatatcagattcttgtacaagttcttcataacttcttgcaccggttttaagtgtattgtctattgtctcgttcgttttaatcatttcgcctgttctcttgtagtctcagtggggccctctacgcagtgtacgtgtgatcaaggaacggaattctggcatgtctcgtggatttgcttttattgacttctccactgtggaagctgcctgtagaatgatggaagctactggaaagagtggtctccaaattgatggcaggaatgtgttctttcagtacagtgcaatgaacctcgtgctgaggatgctctaccagctgatgcgacaggttcctctccacactttgggagaaagggatctgaactaggtccaactcatgttttagttgttcgtggcttagatgaaaatgctgatgaggaaatgcttcggtacgaatttgctaagcacgcaccattaaaggacatccgccttgttcgggataagtttactcatgtgtctagaggttttgccttcgttcatttccattcggtggaagatgctacgaaagctctggaagctacaaatgggattacactcgagaaaaacggtcaggttttgcgtgtagcatatgctaaaagtacacatggacctgcatcagggggctcacagtcaaacagccttgctgcagctgccattgaggctgcatcatttgctcaacagtatgatgccataggttgggctccaaaagagtacaatcctgatgacaaacagaacagtaactttgaatctcaaaaagacgatggcagtggcacagcacagtcgggatttgtttgggatgaaaaatctggttactactatgattctgcatctggattctattatgacggaacaactggcctttactatgacagcaactctggagtttggtattcgtacgatcaacagactcaacagtatgtcccttgtactgaccagagcaatactaaggcagccggggagacgtccagtgaaaacatgatctcagatagtatttgtgggaaaaaggttgtgatctctgcgcctgctgccacaattaaacaaaacaagaaaacatcactccctgatgctgttcaagctgctgcaaatgcagccctggctgcagaaaagagagaaaaggagaaggcaaaagagattaagttggcctcaaaaagtagtctcatagctaataagaagaagatgaacaatgtcctagccatgtggaagcaaaggaatcaagaagggcaggccgcacggattgtcattgatgacaaagaaccaccaaattctgatgatagatttaatcattcacatagtggaactggtttctcttcgaaaagcaagccaaattttgaatttgaaaatgctatggataattctgttcgccaaggaattgcatcgacccaaatgttggattctgatgtaaagcctagacctgtcagtaacagcttaggtactacagttatgggtgtcataagaggttctactagaggagtgatcaagtcggatactacgtttcatgcattatctgatgccgggagcactgattcccgcaccactataatcacaagatcaaatgggttaatgacaagtcctgtggaacttgtaactcctgcaccctacaaaactgatgtgtctgccttagtctctaatacttcatcgggagtttctgggagtggtaaacgtcggttttctgaggcaccagggcaatcccagtacagggatcgagctgcagaaagacggaatctgtatggatcatctcttcgcactgatgctgttggattggattcaaggtctcggaaaggatggcagcggtatcaaggaaccagtccaggcaaaatccgtggacgtcagggctggactaggaagtcagcagcggaaggctgatccaatcctggaggccaaagccggagacagctacaaaaccatcatccagaagaaggccatggcaagattcaaggagatgtcctagctagaccttttttttttgtatattcggttgtcgtattttgtcgtccgtatacttttttttttacaatctgtgcactgttttgcttgtgttttttttcttcacaaacctagccactgaattgtgatttattatcctcaaaggggcaccgtgtttatcttattattactatgtagttcgagacctggatgctttttttttcatgtgtgttggggttttcatttgcacgacgaatgtgcccgatcagttgctttgccacacatgatgtggcggtactgcctctacatcttatcgtggcacaggttgttttt

SEQ ID NO: 77643 - DNA, 3952 bp, Zea Mays
gtttgaagcccgccgtagacagtgtcatgtttgcaaaattctcccctcccgcaccctggatgtttcacttacggtcgcgactcgcgactccgcccgcctgcccagcgatagcgccatagcggcgaccggcgagctccaatatcacgcggatcggcggcggcgcccttgccccggagccccgcggcggcgcggccctgtccccgttccccgccccggcggtaggcagccccgtctcctgtcgagcgctcccaccaccccagccccggcgcccccgctcccagcccgaccgctgtatccgcggcgaccggcgtcccgaacggacgcggcccgagcgcctggctcacagaaaatctgcacacaaaactacaaaagtttaaggtcaccaagaaccttgcaggataacacaagtgctggattttggaaatggaccatgggctttatgctccacaacatggatgggagaacaacagtgcatcaaatgggtatggtgcaatcaatgagccagattttaggtaaggcaactggtcatttagtgttctgttaactgggatattcatgtcctttattcctgtaaaaacgtcatttttttttctctagcaagctgatatatgtttttatttggtactgggttaactcttcaacaagttctcttcttttgtgatttgtgtcatgcatttaatatttatatagtgttctgtcatattaccatatcttcccctattaacttaatttgcaggtctggtggatcctacaatggtaggagatctgtggatgaaggttttcctagagattcatatgggaggggtgcatactgtcaggatacacatgatagaaatatgtatgcaccaccgccatctgttggtggaatatggtctcagcctcgaaggaatcatgatgaggaatatgcaactgcaagagatcacagaagtcgccctgattttggtgttgataggagcaaaaggattggaagcagagaaagtgcggagtttcatggtgagtttgaagaccggtaccacagttctaaccaaagcagagatgacagctatgagagagatcatgaatatggtcattatgattatgattcggaccatgagagaggcaggagagatagtagctggaaaagacgcgattcatgcgagagcaaacgtgaaagaagtggattaagtcgtgaaagagaggaaagtccatacatgcgccatagccgttctcgatcacatggacgtgatgaccgatcaagatcatggtctagatcaagatctcctcgtgcgagaagtcatggtcggaaccaaagagatggcctgtatgatgataatcgatttgacagaagaagggaatatgattgggatgataggaggcatggtgattcagtggccccatctgccactgttgttgtcaagggactgtctatgaagactaatgatgatgacctatatcagattctttctcagtggggccctctacgcagtgtacgtgtgatcaaggaacggaattctggcatgtctcgtggatttgcttttattgacttctccactgtggaagctgcctgtagaatgatggaagctactggaaagagtggtctccaaattgatggcaggaatgtgttctttcagtacagtagtaaaccaaccggtgtaatgggtgggtcttctcctggacaagaaaatcttacaaggcctacttatgggccccgcactgttgctgcactctgtgactggatttgttctatatgcggatgtatgaatttcgcccgcaggacctcctgttttcagtgcaatgaacctcgtgctgaggatgctctaccagctgatgcgacaggttcctctccacactttgggagaaagggatctgaactaggtccaactcatgttttagttgttcgtggcttagatgaaaatgctgatgaggaaatgcttcggtacgaatttgctaagcacgcaccattaaaggacatccgccttgttcgggataagtttactcatgtgtctagaggttttgccttcgttcatttccattcggtggaagatgctacgaaagctctggaagctacaaatgggattacactcgagaaaaacggtcaggttttgcgtgtagcatatgctaaaagtacacatggacctgcatcagggggctcacagtcaaacagccttgctgcagctgccattgaggctgcatcatttgctcaacagtatgatgccataggttgggctccaaaagagtacaatcctgatgacaaacagaacagtaactttgaatctcaaaaagacgatggcagtggcacagcacagtcgggatttgtttgggatgaaaaatctggttactactatgattctgcatctggattctattatgacggaacaactggcctttactatgacagcaactctggagtttggtattcgtacgatcaacagactcaacagtatgtcccttgtactgaccagagcaatactaaggcagccggggagacgtccagtgaaaacatgatctcagatagtatttgtgggaaaaaggttgtgatctctgcgcctgctgccacaattaaacaaaacaagaaaacatcactccctgatgctgttcaagctgctgcaaatgcagccctggctgcagaaaagagagaaaaggagaaggcaaaagagattaagttggcctcaaaaagtagtctcatagctaataagaagaagatgaacaatgtcctagccatgtggaagcaaaggaatcaagaagggcaggccgcacggattgtcattgatgacaaagaaccaccaaattctgatgatagatttaatcattcacatagtggaactggtttctcttcgaaaagcaagccaaattttgaatttgaaaatgctatggataattctgttcgccaaggaattgcatcgacccaaatgttggattctgatgtaaagcctagacctgtcagtaacagcttaggtactacagttatgggtgtcataagaggttctactagaggagtgatcaagtcggatactacgtttcatgcattatctgatgccgggagcactgattcccgcaccactataatcacaagatcaaatgggttaatgacaagtcctgtggaacttgtaactcctgcaccctacaaaactgatgtgtctgccttagtctctaatacttcatcgggagtttctgggagtggtaaacgtcggttttctgaggcaccagggcaatcccagtacagggatcgagctgcagaaagacggaatctgtatggatcatctcttcgcactgatgctgttggattggattcaactggtcactatccgtcccgaaagggtccaagtgagatagggtcgatgccatttcctcctggcgtgggtgaacgttctaatggtgaaattggcaacaacgaaaactatgaagttattaccgctgatagcgcaatcgacgaaagcaatgtgggtaaccgtattctacgcaacatgggttggcaagagggactgggtctcggaaaggatggcagcggtatcaaggaaccagtccaggcaaaatccgtggacgtcagggctggactaggaagtcagcagcggaaggctgatccaatcctggaggccaaagccggagacagctacaaaaccatcatccagaagaaggccatggcaagattcaaggagatgtcctagctagaccttttttttttgtatattcggttgtcgtattttgtcgtccgtatacttttttttttacaatctgtgcactgttttgcttgtgttttttttcttcacaaacctagccactgaattgtgatttattatcctcaaaggggcaccgtgtttatcttattattactatgtagttcgagacctggatgctttttttttcatgtgtgttggggttttcatttgcacgacgaatgtgcccgatcagttgctttgccacacatgatgtggcggtactgcctctacatcttatcgtggcacaggttgttttt

SEQ ID NO: 77644 - DNA, 3727 bp, Zea Mays
gtttgaagcccgccgtagacagtgtcatgtttgcaaaattctcccctcccgcaccctggatgtttcacttacggtcgcgactcgcgactccgcccgcctgcccagcgatagcgccatagcggcgaccggcgagctccaatatcacgcggatcggcggcggcgcccttgccccggagccccgcggcggcgcggccctgtccccgttccccgccccggcggtaggcagccccgtctcctgtcgagcgctcccaccaccccagccccggcgcccccgctcccagcccgaccgctgtatccgcggcgaccggcgtcccgaacggacgcggcccgagcgcctggctcacagaaaatctgcacacaaaactacaaaagtttaaggtcaccaagaaccttgcaggataacacaagtgctggattttggaaatggaccatgggctttatgctccacaacatggatgggagaacaacaggcatcaaatgggtatggtgcaatcaatgagccagattttaggtctggtggatcctacaatggtaggagatctgtggatgaaggttttcctagagattcatatgggaggggtgcatactgtcaggatacacatgatagaaatatgtatgcaccaccgccatctgttggtggaatatggtctcagcctcgaaggaatcatgatgaggaatatgcaactgcaagagatcacagaagtcgccctgattttggtgttgataggagcaaaaggattggaagcagagaaagtgcggagtttcatggtgagtttgaagaccggtaccacagttctaaccaaagcagagatgacagctatgagagagatcatgaatatggtcattatgattatgattcggaccatgagagaggcaggagagatagtagctggaaaagacgcgattcatgcgagagcaaacgtgaaagaagtggattaagtcgtgaaagagaggaaagtccatacatgcgccatagccgttctcgatcacatggacgtgatgaccgatcaagatcatggtctagatcaagatctcctcgtgcgagaagtcatggtcggaaccaaagagatggcctgtatgatgataatcgatttgacagaagaagggaatatgattgggatgataggaggcatggtgattcagtggccccatctgccactgttgttgtcaagggactgtctatgaagactaatgatgatgacctatatcagattctttctcagtggggccctctacgcagtgtacgtgtgatcaaggaacggaattctggcatgtctcgtggatttgcttttattgacttctccactgtggaagctgcctgtagaatgatggaagctactggaaagagtggtctccaaattgatggcaggaatgtgttctttcagtacagtagtaaaccaaccggtgtaatgggtgggtcttctcctggacaagaaaatcttacaaggcctacttatgggccccgcactgttgctgcactctgtgactggatttgttctatatgcggatgtatgaatttcgcccgcaggacctcctgttttcagtgcaatgaacctcgtgctgaggatgctctaccagctgatgcgacaggttcctctccacactttgggagaaagggatctgaactaggtccaactcatgttttagttgttcgtggcttagatgaaaatgctgatgaggaaatgcttcggtacgaatttgctaagcacgcaccattaaaggacatccgccttgttcgggataagtttactcatgtgtctagaggttttgccttcgttcatttccattcggtggaagatgctacgaaagctctggaagctacaaatgggattacactcgagaaaaacggtcaggttttgcgtgtagcatatgctaaaagtacacatggacctgcatcagggggctcacagtcaaacagccttgctgcagctgccattgaggctgcatcatttgctcaacagtatgatgccataggttgggctccaaaagagtacaatcctgatgacaaacagaacagtaactttgaatctcaaaaagacgatggcagtggcacagcacagtcgggatttgtttgggatgaaaaatctggttactactatgattctgcatctggattctattatgacggaacaactggcctttactatgacagcaactctggagtttggtattcgtacgatcaacagactcaacagtatgtcccttgtactgaccagagcaatactaaggcagccggggagacgtccagtgaaaacatgatctcagatagtatttgtgggaaaaaggttgtgatctctgcgcctgctgccacaattaaacaaaacaagaaaacatcactccctgatgctgttcaagctgctgcaaatgcagccctggctgcagaaaagagagaaaaggagaaggcaaaagagattaagttggcctcaaaaagtagtctcatagctaataagaagaagatgaacaatgtcctagccatgtggaagcaaaggaatcaagaagggcaggccgcacggattgtcattgatgacaaagaaccaccaaattctgatgatagatttaatcattcacatagtggaactggtttctcttcgaaaagcaagccaaattttgaatttgaaaatgctatggataattctgttcgccaaggaattgcatcgacccaaatgttggattctgatgtaaagcctagacctgtcagtaacagcttaggtactacagttatgggtgtcataagaggttctactagaggagtgatcaagtcggatactacgtttcatgcattatctgatgccgggagcactgattcccgcaccactataatcacaagatcaaatgggttaatgacaagtcctgtggaacttgtaactcctgcaccctacaaaactgatgtgtctgccttagtctctaatacttcatcgggagtttctgggagtggtaaacgtcggttttctgaggcaccagggcaatcccagtacagggatcgagctgcagaaagacggaatctgtatggatcatctcttcgcactgatgctgttggattggattcaactggtcactatccgtcccgaaagggtccaagtgagatagggtcgatgccatttcctcctggcgtgggtgaacgttctaatggtgaaattggcaacaacgaaaactatgaagttattaccgctgatagcgcaatcgacgaaagcaatgtgggtaaccgtattctacgcaacatgggttggcaagagggactgggtctcggaaaggatggcagcggtatcaaggaaccagtccaggcaaaatccgtggacgtcagggctggactaggaagtcagcagcggaaggctgatccaatcctggaggccaaagccggagacagctacaaaaccatcatccagaagaaggccatggcaagattcaaggagatgtcctagctagaccttttttttttgtatattcggttgtcgtattttgtcgtccgtatacttttttttttacaatctgtgcactgttttgcttgtgttttttttcttcacaaacctagccactgaattgtgatttattatcctcaaaggggcaccgtgtttatcttattattactatgtagttcgagacctggatgctttttttttcatgtgtgttggggttttcatttgcacgacgaatgtgcccgatcagttgctttgccacacatgatgtggcggtactgcctctacatcttatcgtggcacaggttgttttt

SEQ ID NO: 77645 - DNA, 3528 bp, Zea Mays
gtcaaattttaagaacaccactgcgtttcagagatacctcaaggcttcctctgccattttccagaggggagagacaggaagcccggcaccacagcggtggcgtctgctaaagtcgtcctcaccaatgccgagggtagtagtatctggccggttgcgctagagtcgaccgacggccgcgtgtttctcaccacggggtggccaaagttcgtggaggacaaccgtttggggaagggcgagatccttatcttcaagtaccacgggagaatgcgtttcgtggtctcgatttttggcgtggatgccgtcgagaaggcaggtcgctggtctgcaaggagtggcgcccaggccgcggagaaggtaccatgcaacgaaacactaaaggggatgaacacatttcatcccagggcacagctggtttccttgactcacatgaagtagtttgctccaaagattacttggagacgtacttgtcagaggagacaatggaggatgataaggctaaagcagtagcggaagtaatgaagactttgcgtgttgacaaattgacagtagacttattctgtgctatactctgtttgtgtgaatggaaagtcgaggcagctgcagaatattttaatttttgtaggggcaaaccacaaatcccggaaaaatctctgaagcagaaatttgtttttcagtttgactttgtaaagggacaactacaacgcttcttccctgaagattatgattctgagaaaatcaagaagaacaatattgagtcacctaatttgtctgatcaaccactacaacgtgaccttatagtggcgccggtgaaacgaaggctagttgatgaatttaaatcttgtgacttgtctcaccgacagaagagaaaagttaagttgcagggaaactcactgcaaactcagacaccaagaagatcaccacgattggtaaacgtgaacaatacttgtaataagaacaaaaaagtgtcgaaaggaagagccaaagtgctgaaaacaccaccagatgcaacagatcaggtgaaggatagagcacataaatcatgtttgcttgatgagaaactagataatgccttgaaagctgttcatgaagaagcgacaggttccttatctcaggatctcaggaaactggattccccacggtgtgaggttggcttaagtaaagagcatggacatgatcaaggagatactggaaaaatgttggatgaagtcagtgatgtagaaaacagtaaagaacatgtgggaagcgatgctatggggaattctgaatcatatatgagtacatactgtgtagagccattgccaaccaactctaggttgacagcatattcaagaataaatgagctatcatttacatggaagcactcacaacatgccagttcccttgagaaagttttacttgacattcaaagagataacttcgtgaacaccattgcacgcatccagaaaatcgtccgggatgatccttcagatgtgcttagtgcagatgtaattgaagccactgtacagatagaaattcttaaatggggtttatgccttcaggacaagtgcgcccacaagatagtaaatacaatgttggattatgctaaaaaggtcaaggggagacacaatttcaatactgagatgaggaaggaagagttctctgcaaagctgcaggatctcctgaagtggcagcttaaagaactagaatttaaatacacttccttggaatcagattacaagaaagcaatggctgatgctagcaattttttctcgacatttgaagagcacaggaaaaagttgcatgccattaaggacggtatcaaggacctgcagcaggcctgtatgactaaggacgatgaaatgcaaaaattggcacttcaagtcgctgagcatgcgaccgcatatcagaagtctataatggaaaaggttagggtcaagatggctctgaagagccatgagcagactcttggttacataaaagagcagctagcctctgcggaatctggatcaattgatgtaggggcattggttaagatagagatggataatatgagtagggagattgaactctccaagcaaaatcttctaaatatcaacttcaagaaagagtaaagaaggtgtaagtgtttgcttgaaaaccagattaggaatgctgcttatgtgctataataacctagctatcatatcaattactgcgggagtttgattagatatagggggtgtttgaatgcactagaattaatagttagccgctaaaattagttgagacatccaaacaccctagctaatagttcaactattagctatttttagtaaattagttaatagttacataattatttgttagctagctaatcccactaataatttttagccagctaactattagttttagtggattcaaacaccccataatagtttacatgacatacaaaggttatagaatgccccttgttgttcatgagctgcgggtaagagccacggcccatgggtaaaagccactcccaggaacgcaattgactctacattcttgattgtgtttagtcgatgtgccaccacaattgtggtcctccctgacattattcgatcaagagcctagcaattgctctgactgtgcatcaagcacacttgttgcttcatcaagtagtagtattgagggattccggattattgcccttgcaattgcgattctttgcttctgccccctgagagctgtataccgtgctctccacaatcagtattttttatggagtcattactgtaggtgaactatgtacatgttacatgtacatacggtatatgtttacagttgttgcagccagttctgcacctgttcagctagcaatggcttcaatctatggcagattagtatcatttctctcctaaacatgtctttgcacgcggctattgttggcgggatattttcaaatatctagctgttccggtattttcatatgcaccaagtcatggttatgatgacctctattttccaaggatttgccaattgaagcctcattcatcgcatcgcaaggagtcgatcagaggtgcggggtggcgtgactccaattatctgccaacatcttcgtacgaagctgcaccgcaagaacaagtggacagttttctcctccctttgtcggatgcaattttcacatgtgaacaattcaagatccatgttctttctccttagcagtgacctagtattcagtccagcttccaatagaagccagaagaacactttttgttttggttgacatttcgatgcccacaaccacatgtatgcggggtgtgctagctcttctgcaatcatgtgtttatatgtttttgtgacgaaaatttcagatttccctagatatatgaccatgtgttagtttgaccaatggttggttgtccttgcaaatgggtaatgaggagttggtattgtgggaaagctgtcacggacatgggtgtgtagaacatttgttgagggtgttcaatagcctttgcttgtaatattgttatttccttatgaatggcatacgacaacagttctgaatacatttctgcatgcatt

SEQ ID NO: 77646 - DNA, 5711 bp, Zea Mays
atggaggacgcggtgtcagggctgcgatcttccaactccgccacctccttcgtcgccgcgccggtgtacgacgacgacgtgttcagctcttcggcgacctcgcagcacaacgccagcatcctaggacggcgccagcatctcagtcgcagcgcgcggctgcagcgccgaccgctacagcacctgaccgtcgaccccgtcagcgccgtccatggcagcgacgactctgagttgtcccacagtgaggtcgacagggtccttgcgaccgtcgtgctctccaacccgcgcgagaaggtccatgacgggctcgtcggcgtgacggagttcgcgcatcgtcctctcgccgtctacgacagctacgtcgagcacgacctctacagcttcatcccgctgctcttctacaccgagcaagccaaagaggagcaggtacccgtcgacacgcccaccaggtgttcgatgagagtcctcaactgcagaacctttcctcgacaagggcttcaaggacatccgtccagcctggtgtgtccactcgtgcgtcgccacgatggcaggttccacctctggttcgaaccctccgtgctggtcgcaccgcacaccaggggccgcgctgagcagatgacgctttcctacgacgctgatgccgaagctgacgactactacaatgcgcccgatgtcgagatcatggtgtccaacttcggctccacctccaccctcagctacctcgagcctgatctcatgctacccacgcggtacaggaacattctagcgggcatgctggagaaggccgtctacgaggaaggccatgacctgttcggtgtgctgtatgaatcccgatcgcttgttggaaccattggtagtatcgacttcagttttgaggagaatgatgaattagttgatcgaaaagaaactgtcgtcacctctcagttgcaggaagagatgggcagcaaggaacataccacgggtcagtttcagacactggacaagcccattgcagataacagcagtgcagcggtcgaattcagcaacaggaattgctgggtctcattgattcaaggttcttcggtgtacacgccatatcctagcaatcgagtggagcagggactggttgcaacactacagtccgatgaagatggatgtgaccaacaaagggatggtgagtccctaccagggagcgacaatttgtttgcaagagctgctatcgtcttttcccactggtggagtagtgcagctgctgatgatttcagaggacaacaactcagccgactggtcaatttggctccacgagtgcagcagtctccaggttgtcttcgttgtctggtcttggggctcatggaagagccgaggaggcctcgattcttcaaggtcctcgttgtcgacttcgcgcgacgaatagagatacctcaaggcttcctctgccattttccagaggggagagacaggaagcccggcaccacagcggtggcgtctgctaaagtcgtcctcaccaatgccgagggtagtagtatctggccggttgcgctagagtcgaccgacggccgcgtgtttctcaccacggggtggccaaagttcgtggaggacaaccgtttggggaagggcgagatccttatcttcaagtaccacgggagaatgcgtttcgtggtctcgatttttggcgtggatgccgtcgagaaggcaggtcgctggtctgcaaggagtggcgcccaggccgcggagaaggtacgcggaaatagttagatcgattcatataaggttctttatttgagtacatgatgcatccttccatctttcagtttctagttcacgttgagtaagcttgttgttagcaattagcatggtcttagataagttagttctgcatgttttgtaagtctaatttaaatttagagtcatatatactccacaaaaggacacaattctcacttttcgtgatttgaactttgaccaaagttatataagaaatcactaacttttataatacaaaataactacgactggatttactatggaatatgtttctgtactaaacatagttacagccgtaaacatcaataccatccactataaacttggtcaaaattactagcacgaattccatagctgcattgttttgtggatggagggagtattacacatgatgatcttcatgaaattgctgttggctagagaagcttattgttccaaagaattatttcacataacttttagactgctaccctagcttcagtttttttttattatcatacctcatgtttgttttcatacagcataatccaaccagtgacaaatatcaagaaagttaacgaggagatgaaagttttgtatttgttctggcataactctgtaggcaatataactgaactagtatggcatgtacctgcatcttttatgattcccatcagatagacaaacatgccttatggaaggaaacgaatggagcacctttttggttcaacagggagcattcatttttaaaatgttgatagtgccttgctctaatcttgtccacttaactgatagttttgtatccaactcctagacaggtaccatgcaacgaaacactaaaggggatgaacacatttcatcccagggcacagctggtttccttgactcacatgaagtagtttgctccaaagattacttggagacgtacttgtcagaggagacaatggaggatgataaggctaaagcagtagcggaagtaatgaagactttgcgtgttgacaaattgacagtagacttattctgtgctatactctgtttgtgtgaatggaaagtcgaggcagctgcagaatattttaatttttgtaggggcaaaccacaaatcccggaaaaatctctgaagcagaaatttgtttttcagtttgactttgtaaagggacaactacaacgcttcttccctgaagattatgattctgagaaaatcaagaagaacaatattgagtcacctaatttgtctgatcaaccactacaacgtgaccttatagtggcgccggtgaaacgaaggctagttgatgaatttaaatcttgtgacttgtctcaccgacagaagagaaaagttaagttgcagggaaactcactgcaaactcagacaccaagaagatcaccacgattggtaaacgtgaacaatacttgtaataagaacaaaaaagtgtcgaaaggaagagccaaagtgctgaaaacaccaccagatgcaacagatcaggtgaaggatagagcacataaatcatgtttgcttgatgagaaactagataatgccttgaaagctgttcatgaagaagcgacaggttccttatctcaggatctcaggaaactggattccccacggtgtgaggttggcttaagtaaagagcatggacatgatcaaggagatactggaaaaatgttggatgaagtcagtgatgtagaaaacagtaaagaacatgtgggaagcgatgctatggggaattctgaatcatatatgagtacatactgtgtagagccattgccaaccaactctaggttgacagcatattcaagaataaatgagctatcatttacatggaagcactcacaacatgccagttcccttgagaaagttttacttgacattcaaagagataacttcgtgaacaccattgcacgcatccagaaaatcgtccgggatgatccttcagatgtgcttagtgcagatgtaattgaagccactgtacagatagaaattcttaaatggggtttatgccttcaggacaagtgcgcccacaagatagtaaatacaatgttggattatgctaaaaaggtcaaggggagacacaatttcaatactgagatgaggaaggaagagttctctgcaaagctgcaggatctcctgaagtggcagcttaaagaactagaatttaaatacacttccttggaatcagattacaagaaagcaatggctgatgctagcaattttttctcgacatttgaagagcacaggaaaaagttgcatgccattaaggacggtatcaaggacctgcagcaggcctgtatgactaaggacgatgaaatgcaaaaattggcacttcaagtcgctgagcatgcgaccgcatatcagaagtctataatggaaaaggttagggtcaagatggctctgaagagccatgagcagactcttggttacataaaagagcagctagcctctgcggaatctggatcaattgatgtaggggcattggttaagatagagatggataatatgagtagggagattgaactctccaagcaaaatcttctaaatatcaacttcaagaaagagtaaagaaggtgtaagtgtttgcttgaaaaccagattaggaatgctgcttatgtgctataataacctagctatcatatcaattactgcgggagtttgattagatatagggggtgtttgaatgcactagaattaatagttagccgctaaaattagttgagacatccaaacaccctagctaatagttcaactattagctatttttagtaaattagttaatagttacataattatttgttagctagctaatcccactaataatttttagccagctaactattagttttagtggattcaaacaccccataatagtttacatgacatacaaaggttatagaatgccccttgttgttcatgagctgcgggtaagagccacggcccatgggtaaaagccactcccaggaacgcaattgactctacattcttgattgtgtttagtcgatgtgccaccacaattgtggtcctccctgacattattcgatcaagagcctagcaattgctctgactgtgcatcaagcacacttgttgcttcatcaagtagtagtattgagggattccggattattgcccttgcaattgcgattctttgcttctgccccctgagagctgtataccgtgctctccacaatcagtattttttatggagtcattactgtaggtgaactatgtacatgttacatgtacatacggtatatgtttacagttgttgcagccagttctgcacctgttcagctagcaatggcttcaatctatggcagattagtatcatttctctcctaaacatgtctttgcacgcggctattgttggcgggatattttcaaatatctagctgttccggtattttcatatgcaccaagtcatggttatgatgacctctattttccaaggatttgccaattgaagcctcattcatcgcatcgcaaggagtcgatcagaggtgcggggtggcgtgactccaattatctgccaacatcttcgtacgaagctgcaccgcaagaacaagtggacagttttctcctccctttgtcggatgcaattttcacatgtgaacaattcaagatccatgttctttctccttagcagtgacctagtattcagtccagcttccaatagaagccagaagaacactttttgttttggttgacatttcgatgcccacaaccacatgtatgcggggtgtgctagctcttctgcaatcatgtgtttatatgtttttgtgacgaaaatttcagatttccctagatatatgaccatgtgttagtttgaccaatggttggttgtccttgcaaatgggtaatgaggagttggtattgtgggaaagctgtcacggacatgggtgtgtagaacatttgttgagggtgttcaatagcctttgcttgtaatattgttatttccttatgaatggcatacgacaacagttctgaatacatttctgcatgcatt

SEQ ID NO: 77647 - DNA, 4891 bp, Zea Mays
atggaggacgcggtgtcagggctgcgatcttccaactccgccacctccttcgtcgccgcgccggtgtacgacgacgacgtgttcagctcttcggcgacctcgcagcacaacgccagcatcctaggacggcgccagcatctcagtcgcagcgcgcggctgcagcgccgaccgctacagcacctgaccgtcgaccccgtcagcgccgtccatggcagcgacgactctgagttgtcccacagtgaggtcgacagggtccttgcgaccgtcgtgctctccaacccgcgcgagaaggtccatgacgggctcgtcggcgtgacggagttcgcgcatcgtcctctcgccgtctacgacagctacgtcgagcacgacctctacagcttcatcccgctgctcttctacaccgagcaagccaaagaggagcaggtacccgtcgacacgcccaccaggtgttcgatgagagtcctcaactgcagaacctttcctcgacaagggcttcaaggacatccgtccagcctggtgtgtccactcgtgcgtcgccacgatggcaggttccacctctggttcgaaccctccgtgctggtcgcaccgcacaccaggggccgcgctgagcagatgacgctttcctacgacgctgatgccgaagctgacgactactacaatgcgcccgatgtcgagatcatggtgtccaacttcggctccacctccaccctcagctacctcgagcctgatctcatgctacccacgcggtacaggaacattctagcgggcatgctggagaaggccgtctacgaggaaggccatgacctgttcggtgtgctgtatgaatcccgatcgcttgttggaaccattggtagtatcgacttcagttttgaggagaatgatgaattagttgatcgaaaagaaactgtcgtcacctctcagttgcaggaagagatgggcagcaaggaacataccacgggtcagtttcagacactggacaagcccattgcagataacagcagtgcagcggtcgaattcagcaacaggaattgctgggtctcattgattcaaggttcttcggtgtacacgccatatcctagcaatcgagtggagcagggactggttgcaacactacagtccgatgaagatggatgtgaccaacaaagggatggtgagtccctaccagggagcgacaatttgtttgcaagagctgctatcgtcttttcccactggtggagtagtgcagctgctgatgatttcagaggacaacaactcagccgactggtcaatttggctccacgagtgcagcagtctccaggttgtcttcgttgtctggtcttggggctcatggaagagccgaggaggcctcgattcttcaaggtcctcgttgtcgacttcgcgcgacgaatagagatacctcaaggcttcctctgccattttccagaggggagagacaggaagcccggcaccacagcggtggcgtctgctaaagtcgtcctcaccaatgccgagggtagtagtatctggccggttgcgctagagtcgaccgacggccgcgtgtttctcaccacggggtggccaaagttcgtggaggacaaccgtttggggaagggcgagatccttatcttcaagtaccacgggagaatgcgtttcgtggtctcgatttttggcgtggatgccgtcgagaaggcaggtcgctggtctgcaaggagtggcgcccaggccgcggagaagacaggtaccatgcaacgaaacactaaaggggatgaacacatttcatcccagggcacagctggtttccttgactcacatgaagtagtttgctccaaagattacttggagacgtacttgtcagaggagacaatggaggatgataaggctaaagcagtagcggaagtaatgaagactttgcgtgttgacaaattgacagtagacttattctgtgctatactctgtttgtgtgaatggaaagtcgaggcagctgcagaatattttaatttttgtaggggcaaaccacaaatcccggaaaaatctctgaagcagaaatttgtttttcagtttgactttgtaaagggacaactacaacgcttcttccctgaagattatgattctgagaaaatcaagaagaacaatattgagtcacctaatttgtctgatcaaccactacaacgtgaccttatagtggcgccggtgaaacgaaggctagttgatgaatttaaatcttgtgacttgtctcaccgacagaagagaaaagttaagttgcagggaaactcactgcaaactcagacaccaagaagatcaccacgattggtaaacgtgaacaatacttgtaataagaacaaaaaagtgtcgaaaggaagagccaaagtgctgaaaacaccaccagatgcaacagatcaggtgaaggatagagcacataaatcatgtttgcttgatgagaaactagataatgccttgaaagctgttcatgaagaagcgacaggttccttatctcaggatctcaggaaactggattccccacggtgtgaggttggcttaagtaaagagcatggacatgatcaaggagatactggaaaaatgttggatgaagtcagtgatgtagaaaacagtaaagaacatgtgggaagcgatgctatggggaattctgaatcatatatgagtacatactgtgtagagccattgccaaccaactctaggttgacagcatattcaagaataaatgagctatcatttacatggaagcactcacaacatgccagttcccttgagaaagttttacttgacattcaaagagataacttcgtgaacaccattgcacgcatccagaaaatcgtccgggatgatccttcagatgtgcttagtgcagatgtaattgaagccactgtacagatagaaattcttaaatggggtttatgccttcaggacaagtgcgcccacaagatagtaaatacaatgttggattatgctaaaaaggtcaaggggagacacaatttcaatactgagatgaggaaggaagagttctctgcaaagctgcaggatctcctgaagtggcagcttaaagaactagaatttaaatacacttccttggaatcagattacaagaaagcaatggctgatgctagcaattttttctcgacatttgaagagcacaggaaaaagttgcatgccattaaggacggtatcaaggacctgcagcaggcctgtatgactaaggacgatgaaatgcaaaaattggcacttcaagtcgctgagcatgcgaccgcatatcagaagtctataatggaaaaggttagggtcaagatggctctgaagagccatgagcagactcttggttacataaaagagcagctagcctctgcggaatctggatcaattgatgtaggggcattggttaagatagagatggataatatgagtagggagattgaactctccaagcaaaatcttctaaatatcaacttcaagaaagagtaaagaaggtgtaagtgtttgcttgaaaaccagattaggaatgctgcttatgtgctataataacctagctatcatatcaattactgcgggagtttgattagatatagggggtgtttgaatgcactagaattaatagttagccgctaaaattagttgagacatccaaacaccctagctaatagttcaactattagctatttttagtaaattagttaatagttacataattatttgttagctagctaatcccactaataatttttagccagctaactattagttttagtggattcaaacaccccataatagtttacatgacatacaaaggttatagaatgccccttgttgttcatgagctgcgggtaagagccacggcccatgggtaaaagccactcccaggaacgcaattgactctacattcttgattgtgtttagtcgatgtgccaccacaattgtggtcctccctgacattattcgatcaagagcctagcaattgctctgactgtgcatcaagcacacttgttgcttcatcaagtagtagtattgagggattccggattattgcccttgcaattgcgattctttgcttctgccccctgagagctgtataccgtgctctccacaatcagtattttttatggagtcattactgtaggtgaactatgtacatgttacatgtacatacggtatatgtttacagttgttgcagccagttctgcacctgttcagctagcaatggcttcaatctatggcagattagtatcatttctctcctaaacatgtctttgcacgcggctattgttggcgggatattttcaaatatctagctgttccggtattttcatatgcaccaagtcatggttatgatgacctctattttccaaggatttgccaattgaagcctcattcatcgcatcgcaaggagtcgatcagaggtgcggggtggcgtgactccaattatctgccaacatcttcgtacgaagctgcaccgcaagaacaagtggacagttttctcctccctttgtcggatgcaattttcacatgtgaacaattcaagatccatgttctttctccttagcagtgacctagtattcagtccagcttccaatagaagccagaagaacactttttgttttggttgacatttcgatgcccacaaccacatgtatgcggggtgtgctagctcttctgcaatcatgtgtttatatgtttttgtgacgaaaatttcagatttccctagatatatgaccatgtgttagtttgaccaatggttggttgtccttgcaaatgggtaatgaggagttggtattgtgggaaagctgtcacggacatgggtgtgtagaacatttgttgagggtgttcaatagcctttgcttgtaatattgttatttccttatgaatggcatacgacaacagttctgaatacatttctgcatgcatt

SEQ ID NO: 77648 - DNA, 1173 bp, Zea Mays
ccctccaatttttaaggggtttgagtttcgaaactagttcggaaacttattccagtttagaagccacaaaatagagaggattgaacgagctaaaatcatttttcatatttaggctcccatactaacccataaataaaaaaaataccgctactgctaatcaactcgacgcggactacagtctctctccatcttctcccccatgccggaagctcaacaaaaacaggcaatgggcaacgcataggcatagcttggctcgcacggtgtcgctggctcccctccccttccctccccactgttacatccagcgagctgttcacggccgtgccgagctcagtgaggcagcgtttgcgagtccgggacgaggggagcggcgggcgacatggggaggggccgcagcgagataaagcggatcgagaaccccacgcagcggcagtccaccttctacaagcgcagggacggcctcttcaagaaggctagggagctctccgttctgtgcgacgtggacctgctgctgctcctcttctccacctccggcaagctctaccactacctctcgcccaccgtcccctccgtcaaggacctggtcgagaggtacgaggccacgacgcacaccaaggtctggaccgacatccgccaggagcggcgcgcggagctggagaaggcggagcagatgtgcgagctgatggagaaggagctgcgggtcatgacggtggacgacggggagcagtacacggtgccgtcgctggagctgctggaacacagcctggaggcggccgtgcgcaaggtgcgctccgagaaggaccgcaagatcggcggcgagatcaactacctcgagaacattatcagaggacgccacgaggagcgctacgggttgtgcaacaagcttgcgcactctcaggcatcgaacaacgagggaggaggagggtcgaccccaccaagcagcggcctggaactcaaactgggtctcaactgacgctggctggctggaaagctcgaggactatgctctgttccttgggtgggatcaagtacctttgctgctccgattgaagtatattgtttttgttggccgcagaaaaaaaagggctacttttgacaactccatttttacagagattcctattttcataagagaaaatgaaaaaaaataaaatcctttggaaaaaaaataaaa

SEQ ID NO: 77649 - DNA, 4771 bp, Zea Mays
tttgtttttccttttcgccgcctcctctattcttttcccttctcctcaactctcctcccccgaggcccgagctgccatcccctctcgtcagaggcattaacccccatccccatctctcgccggctgagaagcagctgtgccccgggtgcgaggaagccaggatggccaagcccgctcccgctgagccattctccatacggggttacgccatgaggatgcgagctgtcgacgcggccgagtgctacccgttcgtcggtggctgccgcagcgatgtggagggggaatcaccgccgcggttccgtccgatggacccgaagccgctgtcacggtggtggaagcacgaactcgcggcggggcaggcccgacttttggctggcgccaagggcggagaggctgcggcatccggcggtgggctgcggaaggggaccaagaggaagggctctcgctcgagttccacgggcgagagggccaggaaacggcgacacgtgcttcaatttaggtcctttctgacgaaaaaggagataactgctaagcctcagtcaacatcttgtttgcatgagcacaagttgcatatggcatttccgagaaagcataaaagttccactgtccatccaagtacagaacttcaaccaaggaagaaacgggaagaggcacgtgatcacatgccaactcatggaaacagcatgaataaacgaaacagagaaagagcgggcccttctagtgaaatgaatagtgacctaattgggataaaggaagtgacctcagctgtaaataagcaaagcatagaagtcaatggttcgactaataatcctacaaatactggctatgaattggtgaaaactcccacagggcccaaagatgatatctttggagatctccctctcctggaattagaaagctccaagactatgtttcgcactggtgttcatgaacttccaactgttattgaggaatcattaataacaaatcaaaccgaagcagattctataccagaagcggtacccttgaagttgatagatgcatctgacattactgctcagacaccatctcctcttgaagacttggtgaaaagtgaagctactgagccaccatgtatctcccacaatgatgtggcagggagtcacccttccactgttgagattgatggtcttccaaatcatatgaacatcaatatggtgaaaccaggtcttggtgatatgcaattgaaatttactgacgtgtctgctttaggttctcattctgttctcaggtcaaaacgtggttctggtaaccctatgcagggttgttttgatgtgaacaaaaactgttctcaggaaatgaaaaaacatggtacaaattctattagcagtccacctgccatgagaaccagacctgaagagactaaatttaaagatgcaccagttaaaggcaagaagagtactgatatcactggtgcagtggttacactacctacgcttgccaaccaactttcctatcaagctagtgtgttgccctctgcagtatcacatacagttttcagcataagagttgattcaaatgacttgtcttcattgagaagtatgcctgccgaggaatgcatcccaactaccagacctggtaacttcagaactaatgtgtgccatggaagtagggaacatgtggatccatatgcggcacaatctactgataaccagggtagctcacactcaaaacttcacccaatttgcagtcctgctaacattggaatggcttttatgaagctaccgggccttgaaagaatggagatctcaaactgcaatgcaaggataggtgaaaacaggtttagtaatgcagagtcaatgaacacagtaagatgtcagaaacaacagttgttgagtggcatgacctatgtaatggaaggtcagaaacagattggtctaagcagctctcaagttgggaaaccaggtctggatggttatgggggccaaggtgatcatcatctgcagcaacccacagttcgtttgatgggtaagaccgtctcagtgtgctcacatggcaaggatcataatgtatggaccatggataaagtcagtcctgacaatgttgccattgaaacaagccgcctatccaatagcacgtcagggcaaaatactactttcagtggccttcataaccaaaggccagaaccaataagtagtgttccaatagtgaaagattgcacttggaattttggtaatcagtttgttcgtcaagctgaactcaataaggcagctataggcagttccaactctcagaccaggcatcttgagctacatcaaccacctcatttgataagcattcctcagaatcaacagtctcatttgtggacacctgcagcacacatgagtaggaaagatcagtgttttgtgggtccagcagcgaaccaatcttctctggttccaaaatcactgctaaatgcaagcatgcaggaaaagtatcagaaatccactttgttgtcttacgatgatcctagttctatgcctattcgccaaccctaccagacacctggtgtaaagtcatcttctggatctgtcatatccttttttgagtatggtgcgaataattctttgtccagaagctcttctcctggactgactctttctcttacaactggtttggctaatgactctatttcagcaggcagagcagcttgtgcaggcagccttacaaatgcagatggtaggaaagctgctagctttgccgaaccaataggcaatagatcagtttatgcagataatgtttcacagcaacctgcgaggccaataagcaacagaacagcttatgcgacagataatgtttcacaacaacctgcaaagagacaagttgttacagatagacatgattttatgtctatgggcccaaacattgtgaaccattcacctggctggtcacttagtgatgcagttggtcctcaggtacttgattttagtaaaagagtagcaagagatgctgttcaaacgtcaagaaatgaaagcaacaatccaagggccagttccggtccagttctgcctattgaaacatggtctaggcctggcgtggttgcaggggctaataacatgttgaagccaggtcaaaacctgaacgatcattccaaactgctatactccacgaaatttcctgttgatagtgctatcaattcagttgtattatagcggaaagcaagaataataataataaggcgtccttgttgaagatagatctggagtttttcaggattcaaacagtcaggcacaggacacttgtaagaggtctacgtttctgaacatgttagtttagcaattgatagattgctttattcttgtaatttccccggtcaaatgtgcaaggttatttgattgtttgattacatgtcatgccatatctgacaaaagctggaggacagatcaactgtacagattgtaactagttgagtgcttttttggggcacttgatttctaagactaagcagcatttgctacgaacccacttgatgggcagcagttcaatttcagagatgatgtattgtactgtttgatcttgaaagcaaagcataaagtttactttcagccagtttctgtaaaccatcatacaaactttcggatgctgcacttgattggtttgcaattattagccactgctgttacaaagctgcatgtttcacctttttttggctttcttacatctgaaagatagtcgaaaagaacattcagaacgaaatggtccttttaccagattcatcagtcctggcctttatggttaaaaaaaatcagcttcggtgcaagtgatagctgctggcttcttgattcccactgttgggagccctctgaccctacaacctagggaaaaaggttactggtgaacgcagttgcttcagacctttgcaactgcaatgttcttggctttccttgaaccaagagtaaagaaggctttgcatgaagcacagatccacctgcgcatcccttgtcatatacaccgtcgcgaaacaaacaacgggggaaggagatcaagaaacgtacgtcaggccgagcttgtcgccatctggtggcgagccgtcgacaacggatcatgggtgtcctcggtacccttgctagaaatctggacgccctcgttgggccaggggtgatgctgctttatcctctctacgcgtccatgcgcgccatcgagagcccttcttccctggacgaccagcagtggctcacctactgggtcctgtactcgctgatcaccctcttcgagctctcaagctggaaagtcctgcagtggtttcccctgtggccgtacatgaagctgctcttgtgctgctggctggtgctgcccgtcttcaacggcgcggcctacatctacgaggcgcacgtccggcgctacttcaagatgggcacctacgtgagccccagctacggcgagcgccagcgccgggtgctgcagatgatgagcctcgacgcgcgcaagtccgtcgagcgcttcatcgacacgcacgggcccgacgcgctcgacaggatcatccgagccgctgaagaggaagccaagagggagaaacctgaattgttccgggtggaaaccgaagcaagtctcccatcggttgggtagtcacttgtgcagaaatcgtatcgtatgcgtgtgtgtggttgatcattacgtcgggcttgcccagcagttggagaagagatgcccggcgcccatgagagcatgcatgcatatatgactttgaaagaagccgcgaatttggtgtacttgttaatgaaaatttggcttggacctgtgaaatccgtatcagctaaaatacgtctggtctgat

SEQ ID NO: 77650 - DNA, 1618 bp, Zea Mays
atggtgtctccttcactagtcgatactcaactcatccaagcgctggagcaccaaacatgggttatcctcgccgagctcgatgccggtgctctagagtctcaggcggtggactccgatcagcaccgcgatgaattctcatcagccctccgcgcagacgtcgaggcacatctcttggcggacgacgcggatctcttggatcggatttactgggaggcctctacgggtagatccagggactccgttcgccccacacctgcgcggattccaggtggtgccgcctctcgacatgacatggccttcgaagactgtgacatcaatgaacagctcgccggagcctgtggctgcctcgacaacctcaccaccacgtcctgtgcccgaggaggtggacgtggttcctgcatcgcccaccaagtgtttgattaattgcttcagctgcaactgtggctctgtgttgcatgatgacattaagattggagctcaaaagtctatgagcgctataggtagagaaaataaggaagtttgatttgagttgaaaacacatggttccaagaggaatggtgaaagggaaatgtgcccttgggtcatttctaagtattttggtgattgagtgccaacacaagtggtcatgtgttaatctatgtcaaataatggacaaagtgcaaatcaagagtaaaggtatgtttctaagacttagtacactgtttttaagactaatgtattgtgtctaagtgctagaaacaggaaaagaccaatttggaaaagacttggctgggcagccaagactctgtgcagtctgggtgcaccggacaatgtccggtgcgccaggctggctctggcgaactggctgctctcgggtttcgtcggtggcgtacggctataaatcaccagactgtccggtggtgcaccggactgtccggtgagccaacagtcggtcgggccaacggtcggccgcgtaatccgcgcgcgacgcgtggcaaagccaacggtcagaagggggcaccggacagtgtccggtgcgccaacgactctgaatctccaacggtcggctgcaccagaataggaaagaaatccgcaccggacagtgtccggcggtgcaccggactgtcaggtgcaccaggcgacagaaggcaagaattgccttcctggaatgctctcaacgactcctagctgccttggggctataaaagggacccctaggcgcatggaggagtacatcaagcattctctaagcattcctaagcaccaagactccaattccgcgcatttgattctttgtgatagcaactagagctccatttgagtagaaaactctttgggttgtgttgtgagctcgagttgtgacttgtgtgcgtgttgtgctctgattttgtgtcttgtgtgcgttgctcatcccatccttacttctgtgcttctttgtgaacatcaaattgtaagggcgagaggctccaagttgtggagattcctcgcaagcgggatatagtaaagtgaaagcaaaacaccgtggtattcaagtgggtctttggaccgcttgaaaggggttgagtgcaaccctcgtccgttgggacgccacaacgtggagtaggcaagtgttggacttggccgaaccacgagataaacc

SEQ ID NO: 77651 - DNA, 1491 bp, Zea Mays
gtttttcctgctgccaagtgatgctgggaatattgcgcaagggctttgagcaattcgtggcttgtgtttgccgaatgcgatgagatcacaacatattcttcacagatgcttcggataagtgagatgcgtccgtcttcgcagcgttggtagcgtttgggcacaagctaaatccaagaagctcattaagctttggactatcctagtttttcgagaaattcatgaacttctgggcacaatatggctgtccaaaaatatgtttcataattatggttcctggtaaatggtattcatatttatggttccaaattctttaatataaaaatatgtttcataattaatctaacaatatttattttgatataataaaaaatgttgatactttttctatctatagttaataaaatttatagcttactaaaacatgggcttgtgttagttttatttttttgaaatagcatgacataattctattttttttttgaaacagacgaagtacatatttaattaattttgaaatgtgggtgattggctttataagggtacgtttgggatctaactaaaagtgacaaatgatatcattttattattcaagtcacctttaactttgtctgtttggatatttagcctctataaaatgactcacttttattttatctcatgtcatccaaacatgccctagttagaccatctcagagtagaggcattcacaaacctatttttaaaatacctcccatgtgttgaaatagtaggctccaacagataagctatttttggtaggcccaacgcgtacaatacatctccgaaaacatacgtccctaactacgtaactcccaaccaactgtttttctacttccgtgcgctcgaggaagggggtggacggcgtcctatgtgtggaagtcaagacgcagccgccgagcgagtgcatccgcttgaagctcttggcggcgttcagcttcttcatgttcaggaccgatgaaatggaagatggtgtcgtggctgatgtttctgttggtgggccgcgtccgcctcgtatgcatcatccgaacgctcgtgtggatgggccggattgaagaaagtgatccattggccgcctacgtgcacgagaatagctaggtctggtttgctagcttgtaagcaagcaatacttatgcactgtatgatggaaggggcagggattatcgaaaacatgaataactattttctcactgaataagatactccatctttcctgtgaccttcccttcctcttctcatgtatcttccttcactcctgttatatatcttcctccactcatgttgttctgttagggggtgtttggtttaaagaatcactaaatccaaattgaggtgatgtatcatgggttcatttctcaaatttggtgggatgaccccattcctcatattagtactaactaactatgaggaatgaggtggtgatggatcaactcattccattacacaaaccaaacaaaaatagtgaggagtgagaag

SEQ ID NO: 77652 - DNA, 3324 bp, Zea Mays
gcgccgtgccgccccgcaatggcggcgcccgaccgtgccggtgccggtgccgggggccacctccgcggccacgcgcacctcaccaactgcatccacctccgccaccaccacgggcacgcgcacgggggagcgggggcgggaggcgcgtcgtcgtcgggctggcggcggagccccgcatccgtggcgtctgcgacgctgatgcgcgaccttctcgcgctgcagcgctcgcgatcgctccgggacccgtccacgcgccgctccgtcgagtcgtccagggtggcggccgaccccgacgccggctccggggatgacgtcgatctccccgccaagtcccgccgcagcgccggggcgctcaaggcgctcctggaccagctcgccgagaacccccacccgcatccgaaacccggccgacgcccgccccgccgcttcaaacgccgggccggccgccgcgccaccgctgtcagtaagcctccagaccgcgcggccgcgctctccgtcaactccagctcccaggaggccgtctgcggcaacaagtacttgttccatggaggcggcgatgacgacgatggcgcggaggagctgcagcagcatttgccgcaggacttgcgcaacgtctgtggcattccatggaactggtcgcgtctgcaccaccgcggcaagtctatcatcgacatggccggccgcagcctttcgtgcggcctttctgactccaggtcggcggcggggcgaaagtctgaggctggcgccgcgtcaggtggccacgtcaatgcctcgcgtccccttttccccgctaaatccgagaggctggcctcgtcgaccagttcggactcggacgcgctgccgctgcttgttggggctgcgacctccggtgcgcgcaaccacattggcgccatttctggaagctactctggagagcttgggattttctctaaccagaccagccagatggactccgacctgctctctgagtctcagtcagggcagaagtcacaggcctcgcagcatggccgtggtcgtcaccgtagcctgacgcagaaattcgcaccaaagacgttcaaggacgttgttgggcagagcttggtggtgcaggcgctgtccaacgccatcctaaggaggaagattgggttggtgtatgtgttctatgggccacacggcacgggcaagacttcatgcgcgcgtgtcttcgccaaggcgctcaattgcctctcctctgagcaccccaggccctgtgactcgtgcacggtgtgcatcgcccacaatcttggcaagagcaggagcctgatggagattgggcctgttggcaacatcgacatagatggcattgtggacgtccttgataatgtgatgctttcaccagcaccatcacactacagggtgtttatatttgatgactgtgatactctgccagctgacacttggagtgctatctctaaagttgtggaccgggcgccccgccgtgttgtgtttatccttgtcagtccaaaccttgaacttcctcatatcatcctgtcgagatgccagaagttcttttttccaaagcatagggagtccgacattgtcaatacattgcagtggatttgcaccagcgagagtctagatgttgataaagatgcactgaagctaattgcatcccgttccgatggatctttgagggatgctgagatgactcttgatcaactcagtttgctgggacaaaggatttccttgactcttgtccaagaattattcctcgtttgttttacaggttggcctggtgtctgatgataaactggttgatttgcttgatttggcactatctgccgacacggtgaagacagtgaagacactacgagacatcacagaaaccggtgttgagcctttagcactgatgtctcagcttgccacaataattactgatattcttgctggttcctatgcatttaatcgagaaaggcccaagagaaagttcttcaaacgtcctaccttgtctaaggaagatatgggaaaactacgtcaggccttgaaaatactatctgaaactgaaaagcagttgagggtttctagtgacaagacaacctggcttacagctgctctgcttcagcttgctcctgataaacagtacttgctgcctagttcatcaactagtacaagtttgaaccatggtttgctggttggttcctttcctgataggggtatagggaggtcgtcagcagttgagcataaatgtaacctggcaggcacgtcttatggggaaggaactgttgaacacacagaaaatggtcatgtgttatcaaccagttctgtcaaaggaaatgagggaactaaaaacagaaaagcggacaatgaaatgatctggcaagctgtgcttgagagtatccaatcagatacattgagaaaaatgatggctaaagaggccaggctaaactctgtcagcctaggaacagcaccaacagtgcaactaatatttagttcacgtatcaataagttcaaagccgaaaactacagagctcagattctgcaggcatttgagtctgttcttcattctgcaataatacttgaaatccgatatgaatcaaagaatgacacaaaagcaggtcacgttccatcaatgtttccttaccctgagaatgactcctccaatgtgacactgaggtcctttactaaacatagtccgctctcgtctagagaaggtgaaataattgaagttggaccttctcacatgcattggcatgctcaaacaaatagtggtgttcttgacataaatggaagaaaaaaggagaatgtatgggaggaagaagcttcatcatcaccaaaccaagagagtgtaacaaatcaaaaaggaagaaatgggaacagacagcgtcaacagaacagcatagtaaaaggaaaggtatctcttgctcatgttattgggagggcagaagcttgttctcaacaaggaggctggtctagacgaaaagctatatcgattgctcaaaagctagagcaagaaaatttgagattggagcctaaatcgagtctactttgttggagaacctcaaggactcgtcggaaggtaatctttcatatttgtatttttgtattataccataatctgtgaatacccccaacgaattcagtgttactggatccaaactttcattttagcttgtatgtattttcatctctgagactgactcgtttacgtattagtctggcaaaaaccgagacaactcattttgcttattagtctgtcaaaatttgagacaactcatttgcatatactctaaaaaagaaacttgtctgaaaaatactgtggatgtatcagagtaacagaccatggttaaccatgtattttcactggat

SEQ ID NO: 77653 - DNA, 3729 bp, Zea Mays
cgaaatctccgaaccacaccgccataatcacacacgccaatcggcggcccaggtccggcctccctggttccctcctcaaatggatcaccggaggcgggtgtctcttttctctcccctcgcgcctcagtaagggcgaggtagtggtactgggagacacgcgccgtgccgccccgcaatggcggcgcccgaccgtgccggtgccggtgccgggggccacctccgcggccacgcgcacctcaccaactgcatccacctccgccaccaccacgggcacgcgcacgggggagcgggggcgggaggcgcgtcgtcgtcgggctggcggcggagccccgcatccgtggcgtctgcgacgctgatgcgcgaccttctcgcgctgcagcgctcgcgatcgctccgggacccgtccacgcgccgctccgtcgagtcgtccagggtggcggccgaccccgacgccggctccggggatgacgtcgatctccccgccaagtcccgccgcagcgccggggcgctcaaggcgctcctggaccagctcgccgagaacccccacccgcatccgaaacccggccgacgcccgccccgccgcttcaaacgccgggccggccgccgcgccaccgctgtcagtaagcctccagaccgcgcggccgcgctctccgtcaactccagctcccaggaggccgtctgcggcaacaagtacttgttccatggaggcggcgatgacgacgatggcgcggaggagctgcagcagcatttgccgcaggacttgcgcaacgtctgtggcattccatggaactggtcgcgtctgcaccaccgcggcaagtctatcatcgacatggccggccgcagcctttcgtgcggcctttctgactccaggtcggcggcggggcgaaagtctgaggctggcgccgcgtcaggtggccacgtcaatgcctcgcgtccccttttccccgctaaatccgagaggctggcctcgtcgaccagttcggactcggacgcgctgccgctgcttgttggggctgcgacctccggtgcgcgcaaccacattggcgccatttctggaagctactctggagagcttgggattttctctaaccagaccagccagatggactccgacctgctctctgagtctcagtcagggcagaagtcacaggcctcgcagcatggccgtggtcgtcaccgtagcctgacgcagaaattcgcaccaaagacgttcaaggacgttgttgggcagagcttggtggtgcaggcgctgtccaacgccatcctaaggaggaagattgggttggtgtatgtgttctatgggccacacggcacgggcaagacttcatgcgcgcgtgtcttcgccaaggcgctcaattgcctctcctctgagcaccccaggccctgtgactcgtgcacggtgtgcatcgcccacaatcttggcaagagcaggagcctgatggagattgggcctgttggcaacatcgacatagatggcattgtggacgtccttgataatgtgatgctttcaccagcaccatcacactacagggtgtttatatttgatgactgtgatactctgccagctgacacttggagtgctatctctaaagttgtggaccgggcgccccgccgtgttgtgtttatccttgtcagtccaaaccttgaacttcctcatatcatcctgtcgagatgccagaagttcttttttccaaagcatagggagtccgacattgtcaatacattgcagtggatttgcaccagcgagagtctagatgttgataaagatgcactgaagctaattgcatcccgttccgatggatctttgagggatgctgagatgactcttgatcaactcagtttgctgggacaaaggatttccttgactcttgtccaagaattagttggcctggtgtctgatgataaactggttgatttgcttgatttggcactatctgccgacacggtgaagacagtgaagacactacgagacatcacagaaaccggtgttgagcctttagcactgatgtctcagcttgccacaataattactgatattcttgctggttcctatgcatttaatcgagaaaggcccaagagaaagttcttcaaacgtcctaccttgtctaaggaagatatgggaaaactacgtcaggccttgaaaatactatctgaaactgaaaagcagttgagggtttctagtgacaagacaacctggcttacagctgctctgcttcagcttgctcctgataaacagtacttgctgcctagttcatcaactagtacaagtttgaaccatggtttgctggttggttcctttcctgataggggtatagggaggtcgtcagcagttgagcataaatgtaacctggcaggcacgtcttatggggaaggaactgttgaacacacagaaaatggtcatgtgttatcaaccagttctgtcaaaggaaatgagggaactaaaaacagaaaagcggacaatgaaatgatctggcaagctgtgcttgagagtatccaatcagatacattgagaaaaatgatggctaaagaggccaggctaaactctgtcagcctaggaacagcaccaacagtgcaactaatatttagttcacgtatcaataagttcaaagccgaaaactacagagctcagattctgcaggcatttgagtctgttcttcattctgcaataatacttgaaatccgatatgaatcaaagaatgacacaaaagcaggtcacgttccatcaatgtttccttaccctgagaatgactcctccaatgtgacactgaggtcctttactaaacatagtccgctctcgtctagagaaggtgaaataattgaagttggaccttctcacatgcattggcatgctcaaacaaatagtggtgttcttgacataaatggaagaaaaaaggagaatgtatgggaggaagaagcttcatcatcaccaaaccaagagagtgtaacaaatcaaaaaggaagaaatgggaacagacagcgtcaacagaacagcatagtaaaaggaaaggtatctcttgctcatgttattgggagggcagaagcttgttctcaacaaggaggctggtctagacgaaaagctatatcgattgctcaaaagctagagcaagaaaatttgtaagtgttgttatcctgcaattaattgagtccaacttttatataagaactcatgcttgtgtgttttcacatataattaaaataaatctcgtataaaagaagttctgccaacatccaacagtctcgtaacaattttcctgaaatcacaaggaacattaaacatgtaggggtcaatactccccataccattgtagctgacatgttttgtttcatttgtcaattgaggttgtgcttttgtattctcactgggaaagtatttgtgcgcaggagattggagcctaaatcgagtctactttgttggagaacctcaaggactcgtcggaaggtaatctttcatatttgtatttttgtattataccataatctgtgaatacccccaacgaattcagtgttactggatccaaactttcattttagcttgtatgtattttcatctctgagactgactcgtttacgtattagtctggcaaaaaccgagacaactcattttgcttattagtctgtcaaaatttgagacaactcatttgcatatactctaaaaaagaaacttgtctgaaaaatactgtggatgtatcagagtaacagaccatggttaaccatgtattttcactggat

SEQ ID NO: 77654 - DNA, 3465 bp, Zea Mays
ggccactcgccacgccacccacccccgtcacccagctgactcgccctcccccctacctccgtcgctcttcccgtgaaaccctccaggatccaacgaaaaaggcgaaatctccgaaccacaccgccataatcacacacgccaatcggcggcccaggtccggcctccctggttccctcctcaaatggatcaccggaggcgggtgtctcttttctctcccctcgcgcctcagtaagggcgaggtagtggtactgggagacacgcgccgtgccgccccgcaatggcggcgcccgaccgtgccggtgccggtgccgggggccacctccgcggccacgcgcacctcaccaactgcatccacctccgccaccaccacgggcacgcgcacgggggagcgggggcgggaggcgcgtcgtcgtcgggctggcggcggagccccgcatccgtggcgtctgcgacgctgatgcgcgaccttctcgcgctgcagcgctcgcgatcgctccgggacccgtccacgcgccgctccgtcgagtcgtccagggtggcggccgaccccgacgccggctccggggatgacgtcgatctccccgccaagtcccgccgcagcgccggggcgctcaaggcgctcctggaccagctcgccgagaacccccacccgcatccgaaacccggccgacgcccgccccgccgcttcaaacgccgggccggccgccgcgccaccgctgtcagtaagcctccagaccgcgcggccgcgctctccgtcaactccagctcccaggaggccgtctgcggcaacaagtacttgttccatggaggcggcgatgacgacgatggcgcggaggagctgcagcagcatttgccgcaggacttgcgcaacgtctgtggcattccatggaactggtcgcgtctgcaccaccgcggcaagtctatcatcgacatggccggccgcagcctttcgtgcggcctttctgactccaggtcggcggcggggcgaaagtctgaggctggcgccgcgtcaggtggccacgtcaatgcctcgcgtccccttttccccgctaaatccgagaggctggcctcgtcgaccagttcggactcggacgcgctgccgctgcttgttggggctgcgacctccggtgcgcgcaaccacattggcgccatttctggaagctactctggagagcttgggattttctctaaccagaccagccagatggactccgacctgctctctgagtctcagtcagggcagaagtcacaggcctcgcagcatggccgtggtcgtcaccgtagcctgacgcagaaattcgcaccaaagacgttcaaggacgttgttgggcagagcttggtggtgcaggcgctgtccaacgccatcctaaggaggaagattgggttggtgtatgtgttctatgggccacacggcacgggcaagacttcatgcgcgcgtgtcttcgccaaggcgctcaattgcctctcctctgagcaccccaggccctgtgactcgtgcacggtgtgcatcgcccacaatcttggcaagagcaggagcctgatggagattgggcctgttggcaacatcgacatagatggcattgtggacgtccttgataatgtgatgctttcaccagcaccatcacactacagggtgtttatatttgatgactgtgatactctgccagctgacacttggagtgctatctctaaagttgtggaccgggcgccccgccgtgttgtgtttatcctttggatttgcaccagcgagagtctagatgttgataaagatgcactgaagctaattgcatcccgttccgatggatctttgagggatgctgagatgactcttgatcaactcagtttgctgggacaaaggatttccttgactcttgtccaagaattagttggcctggtgtctgatgataaactggttgatttgcttgatttggcactatctgccgacacggtgaagacagtgaagacactacgagacatcacagaaaccggtgttgagcctttagcactgatgtctcagcttgccacaataattactgatattcttgctggttcctatgcatttaatcgagaaaggcccaagagaaagttcttcaaacgtcctaccttgtctaaggaagatatgggaaaactacgtcaggccttgaaaatactatctgaaactgaaaagcagttgagggtttctagtgacaagacaacctggcttacagctgctctgcttcagcttgctcctgataaacagtacttgctgcctagttcatcaactagtacaagtttgaaccatggtttgctggttggttcctttcctgataggggtatagggaggtcgtcagcagttgagcataaatgtaacctggcaggcacgtcttatggggaaggaactgttgaacacacagaaaatggtcatgtgttatcaaccagttctgtcaaaggaaatgagggaactaaaaacagaaaagcggacaatgaaatgatctggcaagctgtgcttgagagtatccaatcagatacattgagaaaaatgatggctaaagaggccaggctaaactctgtcagcctaggaacagcaccaacagtgcaactaatatttagttcacgtatcaataagttcaaagccgaaaactacagagctcagattctgcaggcatttgagtctgttcttcattctgcaataatacttgaaatccgatatgaatcaaagaatgacacaaaagcaggtcacgttccatcaatgtttccttaccctgagaatgactcctccaatgtgacactgaggtcctttactaaacatagtccgctctcgtctagagaaggtgaaataattgaagttggaccttctcacatgcattggcatgctcaaacaaatagtggtgttcttgacataaatggaagaaaaaaggagaatgtatgggaggaagaagcttcatcatcaccaaaccaagagagtgtaacaaatcaaaaaggaagaaatgggaacagacagcgtcaacagaacagcatagtaaaaggaaaggtatctcttgctcatgttattgggagggcagaagcttgttctcaacaaggaggctggtctagacgaaaagctatatcgattgctcaaaagctagagcaagaaaatttgagattggagcctaaatcgagtctactttgttggagaacctcaaggactcgtcggaaggtaatctttcatatttgtatttttgtattataccataatctgtgaatacccccaacgaattcagtgttactggatccaaactttcattttagcttgtatgtattttcatctctgagactgactcgtttacgtattagtctggcaaaaaccgagacaactcattttgcttattagtctgtcaaaatttgagacaactcatttgcatatactctaaaaaagaaacttgtctgaaaaatactgtggatgtatcagagtaacagaccatggttaaccatgtattttcactggat

SEQ ID NO: 77655 - DNA, 1437 bp, Zea Mays
tcaggcactccggcttgccatttccttcccatctcttgccggcccgggcacggtcagacggtcaccatccgcccgtgcggtggctcggcgcttcccgcgcccgcatcgaagccacccacaccatccacgcgtccctctccggctctccctctcatataccgccccttgcctccgcttcgcccgcccgcccgttgccgtagcttccgtccggaaccgccgcggccggcacgcacccacccgctggcctgacccgctccggcgcatgcggcgagacgccgtcgccgccgcgcccacggcggccggcgcctcgccgccgatccctgccaccgtcctcccgacggatgctgttgtcatcgatgtcgagggagagccgcttccggcggaggcccccgggctggggtgccggatctgccacctcggccctgaggacgatgagtcagcggtgccaggttccgaggtgatgctgctaggctgcggctgcaaggacgagctcggcgccgcgcaccagcaatgcgccgaggcgtggtttaggatcaagggcgatagttgccatgcaggcgctgtgaaatatgtggttcagatgccaaaaacatcaccgggttggaagtgaaaaaattcatggagcagtggcatggccgaagagtggcacacgcacaaactactgaggagagggaaagccattgttggagacagcagcccttctgaactcaaactggaaagtgcagggtcgatggctgcttggtagaagaacaattccagaagtatggggcacccagtttgacggtctggcatctcagccatttgggattcagaaatctttactattaattatattgctgtgatccttttgtcaatcagcttctttgccggttaactattttgttctgtgtatacgaggatataagcttaaatccgatgagatgcatgagttcagaggaattttcatgtagtttggcagagaataaggtctcacaaatgcattatatttatgtttggcccaatgaagcagccctttgaactgctctgtttacctttattatgagcctggtacatatttctcgaagacctcttgtacttctctttgcttatatgactcttcagtcatcattgctgccatgagagaggttattgtgttctgaaaatgaagagtgatgtgactaggatatatccaaatgtcactctctcccttaccagagatttaggactctggtaattattttatgaaaaccatacgcaatatggcttactgccatgatgactttctttatccccttgggtttctctctgaaattatttcctggttgtgaaacaagaaaatgcagacataccgtttcttgttgctactagcaccagctggtatgttctttccaaaaaaaaaaaccccagtggtacatggttttactctgaaaagtgagctgcacaatcattagtgtaaat

SEQ ID NO: 77656 - DNA, 1280 bp, Zea Mays
tcaggcactccggcttgccatttccttcccatctcttgccggcccgggcacggtcagacggtcaccatccgcccgtgcggtggctcggcgcttcccgcgcccgcatcgaagccacccacaccatccacgcgtccctctccggctctccctctcatataccgccccttgcctccgcttcgcccgcccgcccgttgccgtagcttccgtccggaaccgccgcggccggcacgcacccacccgctggcctgacccgctccggcgcatgcggcgagacgccgtcgccgccgcgcccacggcggccggcgcctcgccgccgatccctgccaccgtcctcccgacggatgctgttgtcatcgatgtcgagggagagccgcttccggcggaggcccccgggctggggtgccggatctgccacctcggccctgaggacgatgagtcagcggtgccaggttccgaggtgatgctgctaggctgcggctgcaaggacgagctcggcgccgcgcaccagcaatgcgccgaggcgtggtttaggatcaagggcgataggaactcaaactggaaagtgcagggtcgatggctgcttggtagaagaacaattccagaagtatggggcacccagtttgacggtctggcatctcagccatttgggattcagaaatctttactattaattatattgctgtgatccttttgtcaatcagcttctttgccggttaactattttgttctgtgtatacgaggatataagcttaaatccgatgagatgcatgagttcagaggaattttcatgtagtttggcagagaataaggtctcacaaatgcattatatttatgtttggcccaatgaagcagccctttgaactgctctgtttacctttattatgagcctggtacatatttctcgaagacctcttgtacttctctttgcttatatgactcttcagtcatcattgctgccatgagagaggttattgtgttctgaaaatgaagagtgatgtgactaggatatatccaaatgtcactctctcccttaccagagatttaggactctggtaattattttatgaaaaccatacgcaatatggcttactgccatgatgactttctttatccccttgggtttctctctgaaattatttcctggttgtgaaacaagaaaatgcagacataccgtttcttgttgctactagcaccagctggtatgttctttccaaaaaaaaaaaccccagtggtacatggttttactctgaaaagtgagctgcacaatcattagtgtaaat

SEQ ID NO: 77657 - DNA, 1426 bp, Zea Mays
tcaggcactccggcttgccatttccttcccatctcttgccggcccgggcacggtcagacggtcaccatccgcccgtgcggtggctcggcgcttcccgcgcccgcatcgaagccacccacaccatccacgcgtccctctccggctctccctctcatataccgccccttgcctccgcttcgcccgcccgcccgttgccgtagcttccgtccggaaccgccgcggccggcacgcacccacccgctggcctgacccgctccggcgcatgcggcgagacgccgtcgccgccgcgcccacggcggccggcgcctcgccgccgatccctgccaccgtcctcccgacggatgctgttgtcatcgatgtcgagggagagccgcttccggcggaggcccccgggctggggtgccggatctgccacctcggccctgaggacgatgagtcagcggtgccaggttccgaggtgatgctgctaggctgcggctgcaaggacgagctcggcgccgcgcaccagcaatgcgccgaggcgtggtttaggatcaagggcgataggcgctgtgaaatatgtggttcagatgccaaaaacatcaccgggttggaagtgaaaaaattcatggagcagtggcatggccgaagagtggcacacgcacaaactactgaggagagggaaagccattgttggagacagcagcccttctgaactcaaactggaaagtgcagggtcgatggctgcttggtagaagaacaattccagaagtatggggcacccagtttgacggtctggcatctcagccatttgggattcagaaatctttactattaattatattgctgtgatccttttgtcaatcagcttctttgccggttaactattttgttctgtgtatacgaggatataagcttaaatccgatgagatgcatgagttcagaggaattttcatgtagtttggcagagaataaggtctcacaaatgcattatatttatgtttggcccaatgaagcagccctttgaactgctctgtttacctttattatgagcctggtacatatttctcgaagacctcttgtacttctctttgcttatatgactcttcagtcatcattgctgccatgagagaggttattgtgttctgaaaatgaagagtgatgtgactaggatatatccaaatgtcactctctcccttaccagagatttaggactctggtaattattttatgaaaaccatacgcaatatggcttactgccatgatgactttctttatccccttgggtttctctctgaaattatttcctggttgtgaaacaagaaaatgcagacataccgtttcttgttgctactagcaccagctggtatgttctttccaaaaaaaaaaaccccagtggtacatggttttactctgaaaagtgagctgcacaatcattagtgtaaat

SEQ ID NO: 77658 - DNA, 2196 bp, Zea Mays
tcaggcactccggcttgccatttccttcccatctcttgccggcccgggcacggtcagacggtcaccatccgcccgtgcggtggctcggcgcttcccgcgcccgcatcgaagccacccacaccatccacgcgtccctctccggctctccctctcatataccgccccttgcctccgcttcgcccgcccgcccgttgccgtagcttccgtccggaaccgccgcggccggcacgcacccacccgctggcctgacccgctccggcgcatgcggcgagacgccgtcgccgccgcgcccacggcggccggcgcctcgccgccgatccctgccaccgtcctcccgacggatgctgttgtcatcgatgtcgagggagagccgcttccggcggaggcccccgggctggggtgccggatctgccacctcggccctgaggacgatgagtcagcggtgccaggttccgaggtgatgctgctaggctgcggctgcaaggacgagctcggcgccgcgcaccagcaatgcgccgaggcgtggtttaggatcaagggcgataggtatctctcgctccatcctgtcctggaccctgttgctcgctagctttggtatatgcagtgatctggggttgggatgcgggataggtgtttgcgctaattccctaacgagtgctgcaagcctgcaacggtacaggggctgtaggggcgttgtgacttcacctacggtgaatagtgatgacttaactcgttgtaatttgtaaaggactattttgatctgaatattctagggctataccagtttctcagggaaactctagaattcacacggggcagccggaacaatataatgcagtttttactgcaaccctacactaacactagtatgccttttgtgcatcgactatttatttatatctgaagccgcagattcaaatatcgagcattcaagtatactgacgaaagcaaaaaaaaaattgtttttttttggggtgggggtggagaattgatggcgtagatgaagcaaagaactttattcgtgcgctttgtttgctgggcttgtacttttcagtttttgcatcggtgatctgtgactgccttaaggctttatgtcactctcttgtgcaagctgcttgccttttcacatgacactgttataagaccaactgattcagcaaggttttcgtagtttgcagctagcagcactttgctttattgctttatttattatcttcatgctttcacaatatcttattgatgtgtcgttgaatctctggaacttgtgagttgtgacaagtgacctaaagaattttaaagcttcagttgccatgcaggcgctgtgaaatatgtggttcagatgccaaaaacatcaccgggttggaagtgaaaaaattcatggagcagtggcatggccgaagagtggcacacgcacaaactactgaggagagggaaagccattgttggagacagcagcccttctgaactcaaactggaaagtgcagggtcgatggctgcttggtagaagaacaattccagaagtatggggcacccagtttgacggtctggcatctcagccatttgggattcagaaatctttactattaattatattgctgtgatccttttgtcaatcagcttctttgccggttaactattttgttctgtgtatacgaggatataagcttaaatccgatgagatgcatgagttcagaggaattttcatgtagtttggcagagaataaggtctcacaaatgcattatatttatgtttggcccaatgaagcagccctttgaactgctctgtttacctttattatgagcctggtacatatttctcgaagacctcttgtacttctctttgcttatatgactcttcagtcatcattgctgccatgagagaggttattgtgttctgaaaatgaagagtgatgtgactaggatatatccaaatgtcactctctcccttaccagagatttaggactctggtaattattttatgaaaaccatacgcaatatggcttactgccatgatgactttctttatccccttgggtttctctctgaaattatttcctggttgtgaaacaagaaaatgcagacataccgtttcttgttgctactagcaccagctggtatgttctttccaaaaaaaaaaaccccagtggtacatggttttactctgaaaagtgagctgcacaatcattagtgtaaat

SEQ ID NO: 77659 - DNA, 1202 bp, Zea Mays
gagacaaacgctacattccgccacctcctctcccaaaggctcgccctccccggctccccctcgtatcttcgccgtcggcgatcaaaatggcggtgcccatgtccgccatcgagtccgcgtggcagatctctgtctctctctgctcttcctcgccgggcgaaacgtaacggaaatgaatgcagctcctgatcgccaacttcaccgagttccagctcgccaccgtcatcaccttcctgctccacgagaccgtcttctttctctctggccttccctccctcctcttcgagcgcttcggactcttcgccaaatacaagatccagaagaggagcaacacctctgcttaccaaaacagatgtgtcttgcgtcttattctgtaccatgtctctgtgaacctgcctgtcatgattttgtcgtaccctgccttcaaattcatgggtcttaggagctctcttcctctaccacattggacggttgttgtatctcaagttcttttctactttgtccttgaggattttatattctactgggggcacagggcactgcatacgaaatggctatacaaacatgttcacagcgtccaccacgagtacgccacaccctttggtttaacttccgaatatgcccacccagctgaaattttgttcctgggattcgccacagttgttggtcctgctcttactggccctcatctgttcaccctgtggctgtggatggtgttgagggtattggagactgttgaagctcacagcggctatcacttcccatggagcccatcaaatttcctgccactgtacggtggctcggacttccatgactaccatcaccgagtgctgtacacaaagtcagggaactatgcctcgacatttgtttacatggactggttgttccggacggacaatggttatcgcaaggcaaagagaccattgaggagcaagaagtgaagaagaagaagaatctgtaaagtgttgaagctgctcatcaacaggactggcgatagagttgcgcctcagcatggaaggagagaaaatggacgcagtcagttattgcctcattgcctgacgaccgatactataggctcctgagatgttgatttctctgtgttttctatgatcaagaacgaggtcctggcgaccttggtctgtcatgaactgaatttgataaaaaaaattgtcatattttctcgggggttttgatctgcgttt

SEQ ID NO: 77660 - DNA, 1199 bp, Zea Mays
gagacaaacgctacattccgccacctcctctcccaaaggctcgccctccccggctccccctcgtatcttcgccgtcggcgatcaaaatggcggtgcccatgtccgccatcgagtccgcgtggcagatctctgtctctctctgctcttcctcgccgggcgaaacgtaacggaaatgaatgcagctcctgatcgccaacttcaccgagttccagctcgccaccgtcatcaccttcctgctccacgagaccgtcttctttctctctggccttccctccctcctcttcgagcgcttcggactcttcgccaaatacaagatccagaggagcaacacctctgcttaccaaaacagatgtgtcttgcgtcttattctgtaccatgtctctgtgaacctgcctgtcatgattttgtcgtaccctgccttcaaattcatgggtcttaggagctctcttcctctaccacattggacggttgttgtatctcaagttcttttctactttgtccttgaggattttatattctactgggggcacagggcactgcatacgaaatggctatacaaacatgttcacagcgtccaccacgagtacgccacaccctttggtttaacttccgaatatgcccacccagctgaaattttgttcctgggattcgccacagttgttggtcctgctcttactggccctcatctgttcaccctgtggctgtggatggtgttgagggtattggagactgttgaagctcacagcggctatcacttcccatggagcccatcaaatttcctgccactgtacggtggctcggacttccatgactaccatcaccgagtgctgtacacaaagtcagggaactatgcctcgacatttgtttacatggactggttgttccggacggacaatggttatcgcaaggcaaagagaccattgaggagcaagaagtgaagaagaagaagaatctgtaaagtgttgaagctgctcatcaacaggactggcgatagagttgcgcctcagcatggaaggagagaaaatggacgcagtcagttattgcctcattgcctgacgaccgatactataggctcctgagatgttgatttctctgtgttttctatgatcaagaacgaggtcctggcgaccttggtctgtcatgaactgaatttgataaaaaaaattgtcatattttctcgggggttttgatctgcgttt

SEQ ID NO: 77661 - DNA, 1076 bp, Zea Mays
gagacaaacgctacattccgccacctcctctcccaaaggctcgccctccccggctccccctcgtatcttcgccgtcggcgatcaaaatggcggtgcccatgtccgccatcgagtccgcgtggcagctcgccaccgtcatcaccttcctgctccacgagaccgtcttctttctctctggccttccctccctcctcttcgagcgcttcggactcttcgccaaatacaagatccagaagaggagcaacacctctgcttaccaaaacagatgtgtcttgcgtcttattctgtaccatgtctctgtgaacctgcctgtcatgattttgtcgtaccctgccttcaaattcatgggtcttaggagctctcttcctctaccacattggacggttgttgtatctcaagttcttttctactttgtccttgaggattttatattctactgggggcacagggcactgcatacgaaatggctatacaaacatgttcacagcgtccaccacgagtacgccacaccctttggtttaacttccgaatatgcccacccagctgaaattttgttcctgggattcgccacagttgttggtcctgctcttactggccctcatctgttcaccctgtggctgtggatggtgttgagggtattggagactgttgaagctcacagcggctatcacttcccatggagcccatcaaatttcctgccactgtacggtgggtaagtaagctggctaggggcggtgtctgtctttgtttgaaggttgttccggacggacaatggttatcgcaaggcaaagagaccattgaggagcaagaagtgaagaagaagaagaatctgtaaagtgttgaagctgctcatcaacaggactggcgatagagttgcgcctcagcatggaaggagagaaaatggacgcagtcagttattgcctcattgcctgacgaccgatactataggctcctgagatgttgatttctctgtgttttctatgatcaagaacgaggtcctggcgaccttggtctgtcatgaactgaatttgataaaaaaaattgtcatattttctcgggggttttgatctgcgttt

SEQ ID NO: 77662 - DNA, 1112 bp, Zea Mays
gagacaaacgctacattccgccacctcctctcccaaaggctcgccctccccggctccccctcgtatcttcgccgtcggcgatcaaaatggcggtgcccatgtccgccatcgagtccgcgtggcagctcgccaccgtcatcaccttcctgctccacgagaccgtcttctttctctctggccttccctccctcctcttcgagcgcttcggactcttcgccaaatacaagatccagaggagcaacacctctgcttaccaaaacagatgtgtcttgcgtcttattctgtaccatgtctctgtgaacctgcctgtcatgattttgtcgtaccctgccttcaaattcatgggtcttaggagctctcttcctctaccacattggacggttgttgtatctcaagttcttttctactttgtccttgaggattttatattctactgggggcacagggcactgcatacgaaatggctatacaaacatgttcacagcgtccaccacgagtacgccacaccctttggtttaacttccgaatatgcccacccagctgaaattttgttcctgggattcgccacagttgttggtcctgctcttactggccctcatctgttcaccctgtggctgtggatggtgttgagggtattggagactgttgaagctcacagcggctatcacttcccatggagcccatcaaatttcctgccactgtacggtggctcggacttccatgactaccatcaccgagtgctgtacacaaagtcagggaactatgcctcgacatttgtttacatggactggttgttccggacggacaatggttatcgcaaggcaaagagaccattgaggagcaagaagtgaagaagaagaagaatctgtaaagtgttgaagctgctcatcaacaggactggcgatagagttgcgcctcagcatggaaggagagaaaatggacgcagtcagttattgcctcattgcctgacgaccgatactataggctcctgagatgttgatttctctgtgttttctatgatcaagaacgaggtcctggcgaccttggtctgtcatgaactgaatttgataaaaaaaattgtcatattttctcgggggttttgatctgcgttt

SEQ ID NO: 77663 - DNA, 683 bp, Zea Mays
aaaagttatgcatcaatggccatgacatgggtatccgtgaagcacttatgagagctgaaaagcagcttaagttgagcaaaagaaaagactggtataaaatccttggtgtttcaaagacagcatcagctgcggagataaaacgcgcctacaaaaagctggcgttgcagtggcatccagataaaaacgtggataaccgggagaaagcagaaaacatgtttcgagaaattgctgctgcttatgaggtgcttggtgatgaagacaaacgtgtaaggtatgaccgtggagaggatgtggaggagatgaatatgggaggcgggggtggcttcaatccttttgggggaggcggccagcagtacacgtttcaatacgacggtggcttccccggcggcggcttccctggaggtggcggctttcagttcaactttggataaactgtgccatgcaccatgacattttcttggcactggaattgttttaggaattcttaacggcagctggtagctattcttaggcaggctgagactgttctactatgttacataataatgacaagtgttacgattttttccttcatcatttgtttcctgcttacatacacacgcacacattgtctctctgatacatcagttgaatgtaagaatggaaataaagttactttttttttcttggggaggatgccttct

SEQ ID NO: 77664 - DNA, 1654 bp, Zea Mays
ccctcccctgttcggcgccatcccttccctgttacgcgccatcaccctagcagctaggtgctcgtcgattcgattgcaaggacaagaaaaagaccctgctactttgttcgcacaagcctcagggatgatggacctgaggaagtatgatggggcgcttggcctgctaaatgctgtgttggaaattgacccaaatcattctgaggcttataggcagcgtgcatccgtgcttcggcataaatgcagatacgaggaagctgagagggactataacaaacacctggagctaagtcctgggtctgcttcagtggtgaaggaattatcccagcttctgcaggctcaaaattcattacaatctgcttatggccaattcgattctggagacttctcaaaagtcgtggaatacatcaacaaaattgtgctggttttttctccaggttgcttaaaggcaaagcttctcaaggctaaagcattgctagcactgaaagactactcaagtgttatttcagagaccggattcattctaaaggaagatgaagacaacttggatgcactgctattacgtggtcgtgcctactattaccttgctgatcatgatgtggcctccaggcactaccagaaagggcttcgtcttgatccagagcattccgaattgaagaaagcatatttcgggttaaaaaatcttttgaagaagaccaagagtgcagaagataatgctgccaagggtaagctacgtgtgtctgttgaggactacaaggcagctctagcaatggatccagaccatactgcttataatgtacatctttatcttgggctgtgtaaaactctggttagacttgggagaagtaaggaggcaatcagcacttgtacggaagcactgatcatagacagtgaacttgttgatgcgcttacacagagaggtgaagctaaacttctctcagaagattgggaaggagcagttcaggatttaaaagaggccgcccagaaatctccacaggacatgggtatccgtgaagcacttatgagagctgaaaagcagcttaagttgagcaaaagaaaagactggtataaaatccttggtgtttcaaagacagcatcagctgcggagataaaacgcgcctacaaaaagctggcgttgcagtggcatccagataaaaacgtggataaccgggagaaagcagaaaacatgtttcgagaaattgctgctgcttatgaggtgcttggtgatgaagacaaacgtgtaaggtatgaccgtggagaggatgtggaggagatgaatatgggaggcgggggtggcttcaatccttttgggggaggcggccagcagtacacgtttcaatacgacggtggcttccccggcggcggcttccctggaggtggcggctttcagttcaactttggataaactgtgccatgcaccatgacattttcttggcactggaattgttttaggaattcttaacggcagctggtagctattcttaggcaggctgagactgttctactatgttacataataatgacaagtgttacgattttttccttcatcatttgtttcctgcttacatacacacgcacacattgtctctctgatacatcagttgaatgtaagaatggaaataaagttactttttttttcttggggaggatgccttct

SEQ ID NO: 77665 - DNA, 2229 bp, Zea Mays
atatgtgcatgttctttcgctcgatgaagagttttctcagctggttccgtccgcccggatgttataacgcctagctatatatagagagaatcatacatgatgataatgaagggatgccaatgcatacccggtgccggtactgatgttataacgcccggttgtatcttgttgagattgagacgaactaaactgaaattcggaattaagcgataactagatttgattttttgcatccatccaaacaggaagggaagcgataactatcagtagttccattcctttccttccctttccctcctattagttacaagtactaatggcgcacggcagcgcggaagcggcgacgacgttgcagttgcagaggaggaggagagccgagcggccgagccgaggaggaggattccgatgggcgatggacacgggattgggctggaccgctgtagtaaatagtagttgtagaaatttcagccactggcccagcccatccgtagcaggcgtcagcgcaactcaggcaaacaacggaacggaaaccccggccgtcactgcgccagagctggagacagagatcatggtgcgggcatgggggcggcggacggcgctgcctccgctcctcatccttggcctcctccgcctgcactactcctcgctggtcgtcgcccaagaaggacaagaaaaagaccctgctactttgttcgcacaagcctcagggatgatggacctgaggaagtatgatggggcgcttggcctgctaaatgctgtgttggaaattgacccaaatcattctgaggcttataggcagcgtgcatccgtgcttcggcataaatgcagatacgaggaagctgagagggactataacaaacacctggagctaagtcctgggtctgcttcagtggtgaaggaattatcccagcttctgcaggctcaaaattcattacaatctgcttatggccaattcgattctggagacttctcaaaagtcgtggaatacatcaacaaaattgtgctggttttttctccaggttgcttaaaggcaaagcttctcaaggctaaagcattgctagcactgaaagactactcaagtgttatttcagagaccggattcattctaaaggaagatgaagacaacttggatgcactgctattacgtggtcgtgcctactattaccttgctgatcatgatgtggcctccagaaagggcttcgtcttgatccagagcattccgaattgaagaaagcatatttcgggttaaaaaatcttttgaagaagaccaagagtgcagaagataatgctgccaagggtaagctacgtgtgtctgttgaggactacaaggcagctctagcaatggatccagaccatactgcttataatgtacatctttatcttgggctgtgtaaaactctggttagacttgggagaagtaaggaggcaatcagcacttgtacggaagcactgatcatagacagtgaacttgttgatgcgcttacacagagaggtgaagctaaacttctctcagaagattgggaaggagcagttcaggatttaaaagaggccgcccagaaatctccacaggacatgggtatccgtgaagcacttatgagagctgaaaagcagcttaagttgagcaaaagaaaagactggtataaaatccttggtgtttcaaagacagcatcagctgcggagataaaacgcgcctacaaaaagctggcgttgcagtggcatccagataaaaacgtggataaccgggagaaagcagaaaacatgtttcgagaaattgctgctgcttatgaggtgcttggtgatgaagacaaacgtgtaaggtatgaccgtggagaggatgtggaggagatgaatatgggaggcgggggtggcttcaatccttttgggggaggcggccagcagtacacgtttcaatacgacggtggcttccccggcggcggcttccctggaggtggcggctttcagttcaactttggataaactgtgccatgcaccatgacattttcttggcactggaattgttttaggaattcttaacggcagctggtagctattcttaggcaggctgagactgttctactatgttacataataatgacaagtgttacgattttttccttcatcatttgtttcctgcttacatacacacgcacacattgtctctctgatacatcagttgaatgtaagaatggaaataaagttactttttttttcttggggaggatgccttct

SEQ ID NO: 77666 - DNA, 555 bp, Zea Mays
tacgatgctgcagtttccaaatcgatgcaaggtcaacatccatgcaacggtttactcctggtttcaacaaagagacgttgctgcatctggagattacagtcagtcaggtaaacattgcattgcataacggcattatactacattacacagctgagcaagtacatcacatgactgaatggatttgtcttgtccggcttcgctattgctactactaacttgcccaaaaaaactaaaagagagagagagagagagagagatagaggatggattaatttttcaagatagagagatagattgactgatgagtcaagcgatagattgattgatgagagtctagctagacctatcactacagtactactgatggatgacctaggaggaagaggaagatagggataggaagcagggggatgatgaatggaagggaaggcggatctatatctccatctgcaacggaacagttggaatcaggagagcggacttctcatgatgcatataagatgatgagcccgggactattgactatgatgataaataagtaaaacaaaacgaaag

SEQ ID NO: 77667 - DNA, 4554 bp, Zea Mays
ggagaagcgcttctgggtggcctccttcctcgtcgtatgggcagcagcgctgcagggccacatgatgtggatgcagcgccaggacaccttcaagcacaagtttggtatcgaccaagcagacggacccgatgctcaggattcctcatcttcgtcttcgtcttcctcttcttagtcagttaccttgtatcgtctgaagcggtttgttcggaacaaatgagacatccatcctttaataaagcgggcgggagagaaggcagatgacaagacaagtgcagtgtgtgtaaccactaccaggcgttcctttgatgaatgtcatttttcttctctttagtcctgaataaattctgataccatatcttttgggtgtgggatgcaaaactctgctagcttatcattgccacaaactcatgtatttgagttgtgttttatagattgaagtgcactttccagcaggtttcatagactggacagtggactgccgttggttgtctctcggtgagtgtggaacccactttcatcacaatccttaagcacatccatccctacaggatcagtcagcctgactattccataactcctgaaatatttgagaaacaagtggggcgatttcatatttcattctacaagtgtagtgtgcctgaatattacctggaaccagcaggtaggaccaaaagcaattaagaacaaaggaaccacagatggatgccaggcacaaggcactttatgtacaagtgtagtagctattagcaaaggacacttgcctggttggatctgtgggtgcgaccacaaatgcacagtctctggtagcatgacctatgggaatccatcatttttcattaataaaaaaagttaaagacacggcaaagtgtgataacaaatttaaaacaggtgaaatactcagttctaagttggcactgtgtcacacaagtatctaacaattctgcaatgggctaataggaccaagaaatgttaaatgcatgcagatgcatacattgtcgagaacaacattggcatcaatccccaagtctctcagcaattggcacaacacgttcaggtcgactgaaaacttcattaatttgtagacaaaatataaactcttgagagaatcagcttgacaaattactcccaaagatacaatgttcctttagtgtcaatgtaggcaaccttcccatttcccacatgcatgtggattggaagttgcattctcatcaatcagaaataggaaagtagttccgttgcttctttgtttctcaaattctattgcgtctatggtccacgtgctttctaaaaaaattgatacaggggtgaacctgagtggagacacatagggtatgagccaactgggtcttccctgacctgcaggacaaccaaataacatacattttaaactaaaaaaagccagaactgaactcagaaatatagttacagtagcatatcataagtcaccgttcactgtgactattcacagtaaatactcaagacagtttctttcatttgcatgtaagaggtatgtgcacaattgtgttgtatgcaatggcaattgctcctaataccagcgatactatacaacaaataattgtctcatgtactgttcactttacagatcccattttaatttcattgtcattaaagaatcactttgcatcaaagaaatggtgagaaattgtattcatgtggttaagttagcaaagcaaaaacatgattagaaactacaaggtgagaaattttgtcatctttagtatgtagttattgaaaatgttttttttatctatcacctttatagtatttgcgagccaactccagggaagagaagcgagatttatttattttttgtcgtttttgactatgtggtgcaccaaataaatgaaacacgcttggctggtggtattacgacctatacttatgatgatgcccagcgccccagccccttgcttcccttcttgcatttgctgatgctcctgaagccttctacatatccgtgaagcatggcgttgaaggtgccggaggaaaagctatatcagcagcattattgcagtctgctcattacgatcagttgaatgtggtactgtctactgcgtgtttgaattgcaagctatgtgtgcttcttttggctcttttcctccggttgtggctttttgcttacatgaaactctcgagtagacaatctagcgctaattgattcaggtgtagagccttcctcggatacctggctccttttggctttcatagaactgcagctgcaagtttatatcattgcatctcagtatgcggagtgaataagctgtatacacaaccataatgacttcaatatccaactgtttaatatgatatcagtattgatggaccccacacgcacatagaaacggccacttaagattggacattccctctgttttcacaactactctgtagatcaaaggttcttagcatgctgtatgtatagttcttgttctattttaataatgaaatgcatgtctagatcttttttgtagtagagattatgtaatgtgtggataacctggaaactgcacaaattttgtttttgagtatttgttttttatgcttttgatcaaaatttctatatatgtagcttctggacaaggttataacgaaacttgatggaactgcctgcacatttccaggattgacaatgagttttcttatatgattcaagtaacgaagtcatgcaagtgttttagcagcattatagattaatgtgatgatactgatgtcacacttagagccaggctttgctaggcagctttgcgttcacttcttcactcacagatttcatcatataggcaccatggctatatttggttagttgagttgctcctttcaaaaaacttgaagaaatagatggttctatatggtctaaaatccaaaagcttctagaggaaattggagttgccggtagccaagacctatcatgttcagaagtctctctgcctgtttgtatgctttgtggacttctaaagtcaaagcacaatttcattaggttgggattcctgtatgtgctggacaaatttcttatgcgttgcaaactattattggatgacagtgatatgcaagaccacacaacttctgatcatagcaagaattgtcttgataaagcttttgcagttatagatattatgaatagttctttgttacttgtggttcaggacaatgagacggaccatatcaacatcttaaagatgtgtgatatgctgttccctcaattatgcctgagaattccatccacaaatgcgatgcatgtcaggggccttcagtcccttggtcaactttttggttgtacatccaagaacatcgataatcatttggatgcccttgcatcacaccaaagtgttggaaacaagaatctttgccagagtgagacattgcaagatatgggcatggatcaatctggtcaacccactttattctgcgaagcatcaatggcaacactactgagaggacttgcaatagctcccattcagcttagcccgtgtaccaacttctttatttttctggccattgatacagcctgaaggggcagccagcgatgacattgcattgggtattgctgttggtagcacaggaagaggcaaccttcctggttctacatcagatattcgagcagcgcttcttttacttttgattggtaaatgcacagctgatcaggaggcactaaaggaggtagaaggcaatggggttcttcaggggccttctggatgacacagattcaagggtagcatatactattctgctgcttttcttttgaagagaatgatgacagaggaactagagatctaccaacggatgcttgaaagcctcatctcaaaagctcaacagatgctatgcgtgtgtttggttgcaggtcctgtggtagcctggcttactacatgccttcccgcatggagatggttgagcatacatgcatcgatgcaagttacgtatttgtgaaagtcttttacctgcatgcagggatacgcgtgaaatggccgtacgtgatgggccatgctcacatgagcccggctacacggacaggcatccaatcaccacctatgtgaatgatgtaaattatcgatgggggcatgtacatgcctctgaatttgtttgtttattctttgttagactagtcactgtccaagagagtcactgtggataatcctgtgttatggacagagacacaattctacaattttgtattgctgaaccattcattgagatcttgcatttgcatgtatggtaactgaccaaaggcgtgtatgtttgtaattgctgattttttttttgcaatttagccctttttcgaaacaattttacgtttggatctctaaatgatataatgttatttttggaccctttattcggctccatggctcatggtgctgaggtaacatatctcgctatcatagcctatggcgccgaggtatctggtgagctgacaactaggtacgcgctggcagctgatgtggcctacctcgatgccacggtatgtggcgccgagctaggagatggcgtcggccgtgtgatggtcattggcccctacttgctgccggccactaccgc

SEQ ID NO: 77668 - DNA, 6120 bp, Zea Mays
ggagaagcgcttctgggtggcctccttcctcgtcgtatgggcagcagcgctgcagggccacatgatgtggatgcagcgccaggacaccttcaagcacaagtttggtatcgaccaagcagacggacccgatgctcaggattcctcatcttcgtcttcgtcttcctcttcttagtcagttaccttgtatcgtctgaagcggtttgttcggaacaaatgagacatccatcctttaataaagcgggcgggagagaaggcagatgacaagacaagtgcagtgtgtgtaaccactaccaggcgttcctttgatgaatgtcatttttcttctctttagtcctgaataaattctgataccatatcttttgggtgtgggatgcaaaactctgctagcttatcattgccacaaactcatgtatttgagttgtgttttatagattgaagtgcactttccagcaggtttcatagactggacagtggactgccgttggttgtctctcggtgagtgtggaacccactttcatcacaatccttaagcacatccatccctacaggatcagtcagcctgactattccataactcctgaaatatttgagaaacaagtggggcgatttcatatttcattctacaagtgtagtgtgcctgaatattacctggaaccagcaggtaggaccaaaagcaattaagaacaaaggaaccacagatggatgccaggcacaaggcactttatgtacaagtgtagtagctattagcaaaggacacttgcctggttggatctgtgggtgcgaccacaaatgcacagtctctggtagcatgacctatgggaatccatcatttttcattaataaaaaaagttaaagacacggcaaagtgtgataacaaatttaaaacaggtgaaatactcagttctaagttggcactgtgtcacacaagtatctaacaattctgcaatgggctaataggaccaagaaatgttaaatgcatgcagatgcatacattgtcgagaacaacattggcatcaatccccaagtctctcagcaattggcacaacacgttcaggtcgactgaaaacttcattaatttgtagacaaaatataaactcttgagagaatcagcttgacaaattactcccaaagatacaatgttcctttagtgtcaatgtaggcaaccttcccatttcccacatgcatgtggattggaagttgcattctcatcaatcagaaataggaaagtagttccgttgcttctttgtttctcaaattctattgcgtctatggtccacgtgctttctaaaaaaattgatacaggggtgaacctgagtggagacacatagggtatgagccaactgggtcttccctgacctgcaggacaaccaaataacatacattttaaactaaaaaaagccagaactgaactcagaaatatagttacagtagcatatcataagtcaccgttcactgtgactattcacagtaaatactcaagacagtttctttcatttgcatgtaagaggtatgtgcacaattgtgttgtatgcaatggcaattgctcctaataccagcgatactatacaacaaataattgtctcatgtactgttcactttacagatcccattttaatttcattgtcattaaagaatcactttgcatcaaagaaatggtgagaaattgtattcatgtggttaagttagcaaagcaaaaacatgattagaaactacaaggtgagaaattttgtcatctttagtatgtagttattgaaaatgttttttttatctatcacctttatagtatttgcgagccaactccagggaagagaagcgagatttatttattttttgtcgtttttgactatgtggtgcaccaaataaatgaaacacgcttggctggtggtattacgacctatacttatgatgatgcccagcgccccagccccttgcttcccttcttgcatttgctgatgctcctgaagccttctacatatccgtgaagcatggcgttgaaggtgccggaggaaaagctatatcagcagcattattgcagtctgctcattacgatcagttgaatgtgcttctggacaaggttataacgaaacttgatggaactgcctgcacatttccaggattgacaatgagttttcttatatgattcaagtaacgaagtcatgcaagtgttttagcagcattatagattaatgtgatgatactgatgtcacacttagagcctggcttttttttctctcgaccgcgcgggagaactgcacatcttatatattaagtgtcggtgttttggacccgcggggaccctcaaccgactagtgaattttatgctgcgtgtccctgcccggatgggttgatgcaagatgaaacacaagagagaggatggggcttatattatcttgcaccggggtgcttgtagtaggggttacaagcttcgcgagagagagaacggatcctaggtctcttgagaggtctagtgctgtggagagaaggtttgccttgaagtgagccgtctgagttagccttcaaagcgtgccgtgggaaggctctcggcatctccttttatagatacaaggaggtgacccagctgtacatatgagagtgtagctatgtgctaacgtggccggcggagaagtgcttgagccctgtagaagcgtagctggcggtgcggccccaggtcctgctgacgtttttttgcctccgtagagagctgaggacagtcgacgtcatgggcgcattgccgggaatcatcattacttgttaccggagtaatttgatgtgacaccggtcttgttccttcgtagcctgaggtggctagctaggggaaggatagtgttgttttcccggttcgcgtagtcggtccggggccgtatcgggcgaggcggtgatctctctcgaagccgaggcctaggtcgggcgaggcgaagatctcctcccgaggccgaggctgaggccgagacctaggtcgggcgaggcgaagacctcctcccaaggccgaggctgaggccgaggctgaggccgaggcctgggtcgggcgtggcgacgattccttccggggccgaggctggggtcgggcgaggcggaacttcctgctgtgcctgaggctgatctcgggagaggcggtgacttactgttgtcagtcttaccccggtggttggcacagtggtctgaacggggtgaatagtgtcgtcatcctgtcagaacgatcagtgaaagggtgaagtgactgcggtcatttcgaccttgcccactgaggcgcgcgtgtcaggataaggtgtcaggtgaaccccgcattaaatgtgcacgtgatacggtcggtggcaaggcgatttggccgaggtcgctatacgacaaagtttgcccgagcttcgcctcgggcgagtcgggggtgcgcccactgcatgaggggaccctcgggtgagccgtgaatccgttcggtactactgttcttgcccgaggctgggctcaggtgagacgggatcgcgtccctcggtagatgaggccttaactttgaaccgtgcttaccagtctttatggtttattttaaagatgttctccagccacgcttaggagtactgggggtaccctaattatggtacccgacattaagaaaggagaaagggtctaaaatggacccaaaacaaggtgccaaaaagacctagacaataacagaaaaccagaaaagaaagaaaaacataaaacaatacaaagggggtgcaaaaaaccccagccccaccaaaggcctaaggccacatcctcctaagatctttagctcctgccaagccccacaagatgacatcctcctgaatgtgttgcatgatggtgcggatgcttagagccaggctttgctaggcagctttgcgttcacttcttcactcacagatttcatcatataggcaccatggctatatttggttagttgagttgctcctttcaaaaaacttgaagaaatagatggttctatatggtctaaaatccaaaagcttctagaggaaattggagttgccggtagccaagacctatcatgttcagaagtctctctgcctgtttgtatgctttgtggacttctaaagtcaaagcacaatttcattaggttgggattcctgtatgtgctggacaaatttcttatgcgttgcaaactattattggatgacagtgatatgcaagaccacacaacttctgatcatagcaagaattgtcttgataaagcttttgcagttatagatattatgaatagttctttgttacttgtggttcaggacaatgagacggaccatatcaacatcttaaaggtaaattccttattgtcttaaaatttcggtgcacatatcaagcatacatacaagtcagcatcatttacgtatggtatcagttgccttacaagttaaaggtgacttaagttttcaaaaaagtggatcggctacacccttctttcttttagtgttaaaaaacatatttgggttagtcctctttctgttcagtaggttttactgcatgcaacaatcgttcaatcacaaaggattttatgataaagttcgatgaattaggcttttcaagtttcaatgttcttaatctcagaattcaaaagtaattaataatgtacatactattactttcctttattattgattaaaaattagaaaagattgtttggaatcggttgaatttcttcaaatcggtttattattctggacctcctacataatgaggtactgaaatttacaccgatagcctaaaattgattatctgtgattcacaccttcctctttcagatgtgtgatatgctgttccctcaattatgcctgagaattccatccacaaatgcgatgcatgtcaggggccttcagtcccttggtcaactttttggttgtacatccaagaacatcgataatcatttggatgcccttgcatcacaccaaagtgttggaaacaagaatctttgccagagtgagacattgcaagatatgggcatggatcaatctggtcaacccactttattctgcgaagcatcaatggcaacactactgagaggacttgcaatagctcccattcagcttagcccgtgtaccaacttctttatttttctggccattgatacagcctgaaggggcagccagcgatgacattgcattgggtattgctgttggtagcacaggaagaggcaaccttcctggttctacatcagatattcgagcagcgcttcttttacttttgattggtaaatgcacagctgatcaggaggcactaaaggaggtagaaggcaatggggttcttcaggggccttctggatgacacagattcaagggtagcatatactattctgctgcttttcttttgaagagaatgatgacagaggaactagagatctaccaacggatgcttgaaagcctcatctcaaaagctcaacagatgctatgcgtgtgtttggttgcaggtcctgtggtagcctggcttactacatgccttcccgcatggagatggttgagcatacatgcatcgatgcaagttacgtatttgtgaaagtcttttacctgcatgcagggatacgcgtgaaatggccgtacgtgatgggccatgctcacatgagcccggctacacggacaggcatccaatcaccacctatgtgaatgatgtaaattatcgatgggggcatgtacatgcctctgaatttgtttgtttattctttgttagactagtcactgtccaagagagtcactgtggataatcctgtgttatggacagagacacaattctacaattttgtattgctgaaccattcattgagatcttgcatttgcatgtatggtaactgaccaaaggcgtgtatgtttgtaattgctgattttttttttgcaatttagccctttttcgaaacaattttacgtttggatctctaaatgatataatgttatttttggaccctttattcggctccatggctcatggtgctgaggtaacatatctcgctatcatagcctatggcgccgaggtatctggtgagctgacaactaggtacgcgctggcagctgatgtggcctacctcgatgccacggtatgtggcgccgagctaggagatggcgtcggccgtgtgatggtcattggcccctacttgctgccggccactaccgc

SEQ ID NO: 77669 - DNA, 5039 bp, Zea Mays
  misc_feature (1)..(1): n is a, c, g, or t
nggagaagcgcttctgggtggcctccttcctcgtcgtatgggcagcagcgctgcagggccacatgatgtggatgcagcgccaggacaccttcaagcacaagtttggtatcgaccaagcagacggacccgatgctcaggattcctcatcttcgtcttcgtcttcctcttcttagtaggtcagttaccttgtatcgtctgaagcggtttgttcggaacaaatgagacatccatcctttaataaagcgggcgggagagaaggcagatgacaagacaagtgcagtgtgtgtaaccactaccaggcgttcctttgatgaatgtcatttttcttctctttagtcctgaataaattctgataccatatcttttgggtgtgggatgcaaaactctgctagcttatcattgccacaaactcatgtatttgagttgtgttttatagattgaagtgcactttccagcaggtttcatagactggacagtggactgccgttggttgtctctcggtgagtgtggaacccactttcatcacaatccttaagcacatccatccctacaggatcagtcagcctgactattccataactcctgaaatatttgagaaacaagtggggcgatttcatatttcattctacaagtgtagtgtgcctgaatattacctggaaccagcaggtaggaccaaaagcaattaagaacaaaggaaccacagatggatgccaggcacaaggcactttatgtacaagtgtagtagctattagcaaaggacacttgcctggttggatctgtgggtgcgaccacaaatgcacagtctctggtagcatgacctatgggaatccatcatttttcattaataaaaaaagttaaagacacggcaaagtgtgataacaaatttaaaacaggtgaaatactcagttctaagttggcactgtgtcacacaagtatctaacaattctgcaatgggctaataggaccaagaaatgttaaatgcatgcagatgcatacattgtcgagaacaacattggcatcaatccccaagtctctcagcaattggcacaacacgttcaggtcgactgaaaacttcattaatttgtagacaaaatataaactcttgagagaatcagcttgacaaattactcccaaagatacaatgttcctttagtgtcaatgtaggcaaccttcccatttcccacatgcatgtggattggaagttgcattctcatcaatcagaaataggaaagtagttccgttgcttctttgtttctcaaattctattgcgtctatggtccacgtgctttctaaaaaaattgatacaggggtgaacctgagtggagacacatagggtatgagccaactgggtcttccctgacctgcaggacaaccaaataacatacattttaaactaaaaaaagccagaactgaactcagaaatatagttacagtagcatatcataagtcaccgttcactgtgactattcacagtaaatactcaagacagtttctttcatttgcatgtaagaggtatgtgcacaattgtgttgtatgcaatggcaattgctcctaataccagcgatactatacaacaaataattgtctcatgtactgttcactttacagatcccattttaatttcattgtcattaaagaatcactttgcatcaaagaaatggtgagaaattgtattcatgtggttaagttagcaaagcaaaaacatgattagaaactacaaggtgagaaattttgtcatctttagtatgtagttattgaaaatgttttttttatctatcacctttatagtatttgcgagccaactccagggaagagaagcgagatttatttattttttgtcgtttttgactatgtggtgcaccaaataaatgaaacacgcttggctggtggtattacgacctatacttatgatgatgcccagcgccccagccccttgcttcccttcttgcatttgctgatgctcctgaagccttctacatatccgtgaagcatggcgttgaaggtgccggaggaaaagctatatcagcagcattattgcagtctgctcattacgatcagttgaatgtggtactgtctactgcgtgtttgaattgcaagctatgtgtgcttcttttggctcttttcctccggttgtggctttttgcttacatgaaactctcgagtagacaatctagcgctaattgattcaggtgtagagccttcctcggatacctggctccttttggctttcatagaactgcagctgcaagtttatatcattgcatctcagtatgcggagtgaataagctgtatacacaaccataatgacttcaatatccaactgtttaatatgatatcagtattgatggaccccacacgcacatagaaacggccacttaagattggacattccctctgttttcacaactactctgtagatcaaaggttcttagcatgctgtatgtatagttcttgttctattttaataatgaaatgcatgtctagatcttttttgtagtagagattatgtaatgtgtggataacctggaaactgcacaaattttgtttttgagtatttgttttttatgcttttgatcaaaatttctatatatgtagcttctggacaaggttataacgaaacttgatggaactgcctgcacatttccaggattgacaatgagttttcttatatgattcaagtaacgaagtcatgcaagtgttttagcagcattatagattaatgtgatgatactgatgtcacacttagagccaggctttgctaggcagctttgcgttcacttcttcactcacagatttcatcatataggcaccatggctatatttggttagttgagttgctcctttcaaaaaacttgaagaaatagatggttctatatggtctaaaatccaaaagcttctagaggaaattggagttgccggtagccaagacctatcatgttcagaagtctctctgcctgtttgtatgctttgtggacttctaaagtcaaagcacaatttcattaggttgggattcctgtatgtgctggacaaatttcttatgcgttgcaaactattattggatgacagtgatatgcaagaccacacaacttctgatcatagcaagaattgtcttgataaagcttttgcagttatagatattatgaatagttctttgttacttgtggttcaggacaatgagacggaccatatcaacatcttaaaggtaaattccttattgtcttaaaatttcggtgcacatatcaagcatacatacaagtcagcatcatttacgtatggtatcagttgccttacaagttaaaggtgacttaagttttcaaaaaagtggatcggctacacccttctttcttttagtgttaaaaaacatatttgggttagtcctctttctgttcagtaggttttactgcatgcaacaatcgttcaatcacaaaggattttatgataaagttcgatgaattaggcttttcaagtttcaatgttcttaatctcagaattcaaaagtaattaataatgtacatactattactttcctttattattgattaaaaattagaaaagattgtttggaatcggttgaatttcttcaaatcggtttattattctggacctcctacataatgaggtactgaaatttacaccgatagcctaaaattgattatctgtgattcacaccttcctctttcagatgtgtgatatgctgttccctcaattatgcctgagaattccatccacaaatgcgatgcatgtcaggggccttcagtcccttggtcaactttttggttgtacatccaagaacatcgataatcatttggatgcccttgcatcacaccaaagtgttggaaacaagaatctttgccagagtgagacattgcaagatatgggcatggatcaatctggtcaacccactttattctgcgaagcatcaatggcaacactactgagaggacttgcaatagctcccattcagcttagcccgtgtaccaacttctttatttttctggccattgatacagcctgaaggggcagccagcgatgacattgcattgggtattgctgttggtagcacaggaagaggcaaccttcctggttctacatcagatattcgagcagcgcttcttttacttttgattggtaaatgcacagctgatcaggaggcactaaaggaggtagaaggcaatggggttcttcaggggccttctggatgacacagattcaagggtagcatatactattctgctgcttttcttttgaagagaatgatgacagaggaactagagatctaccaacggatgcttgaaagcctcatctcaaaagctcaacagatgctatgcgtgtgtttggttgcaggtcctgtggtagcctggcttactacatgccttcccgcatggagatggttgagcatacatgcatcgatgcaagttacgtatttgtgaaagtcttttacctgcatgcagggatacgcgtgaaatggccgtacgtgatgggccatgctcacatgagcccggctacacggacaggcatccaatcaccacctatgtgaatgatgtaaattatcgatgggggcatgtacatgcctctgaatttgtttgtttattctttgttagactagtcactgtccaagagagtcactgtggataatcctgtgttatggacagagacacaattctacaattttgtattgctgaaccattcattgagatcttgcatttgcatgtatggtaactgaccaaaggcgtgtatgtttgtaattgctgattttttttttgcaatttagccctttttcgaaacaattttacgtttggatctctaaatgatataatgttatttttggaccctttattcggctccatggctcatggtgctgaggtaacatatctcgctatcatagcctatggcgccgaggtatctggtgagctgacaactaggtacgcgctggcagctgatgtggcctacctcgatgccacggtatgtggcgccgagctaggagatggcgtcggccgtgtgatggtcattggcccctacttgctgccggccactaccgc

SEQ ID NO: 77670 - DNA, 5036 bp, Zea Mays
  misc_feature (1)..(2): n is a, c, g, or t
nnggagaagcgcttctgggtggcctccttcctcgtcgtatgggcagcagcgctgcagggccacatgatgtggatgcagcgccaggacaccttcaagcacaagtttggtatcgaccaagcagacggacccgatgctcaggattcctcatcttcgtcttcgtcttcctcttcttagtcagttaccttgtatcgtctgaagcggtttgttcggaacaaatgagacatccatcctttaataaagcgggcgggagagaaggcagatgacaagacaagtgcagtgtgtgtaaccactaccaggcgttcctttgatgaatgtcatttttcttctctttagtcctgaataaattctgataccatatcttttgggtgtgggatgcaaaactctgctagcttatcattgccacaaactcatgtatttgagttgtgttttatagattgaagtgcactttccagcaggtttcatagactggacagtggactgccgttggttgtctctcggtgagtgtggaacccactttcatcacaatccttaagcacatccatccctacaggatcagtcagcctgactattccataactcctgaaatatttgagaaacaagtggggcgatttcatatttcattctacaagtgtagtgtgcctgaatattacctggaaccagcaggtaggaccaaaagcaattaagaacaaaggaaccacagatggatgccaggcacaaggcactttatgtacaagtgtagtagctattagcaaaggacacttgcctggttggatctgtgggtgcgaccacaaatgcacagtctctggtagcatgacctatgggaatccatcatttttcattaataaaaaaagttaaagacacggcaaagtgtgataacaaatttaaaacaggtgaaatactcagttctaagttggcactgtgtcacacaagtatctaacaattctgcaatgggctaataggaccaagaaatgttaaatgcatgcagatgcatacattgtcgagaacaacattggcatcaatccccaagtctctcagcaattggcacaacacgttcaggtcgactgaaaacttcattaatttgtagacaaaatataaactcttgagagaatcagcttgacaaattactcccaaagatacaatgttcctttagtgtcaatgtaggcaaccttcccatttcccacatgcatgtggattggaagttgcattctcatcaatcagaaataggaaagtagttccgttgcttctttgtttctcaaattctattgcgtctatggtccacgtgctttctaaaaaaattgatacaggggtgaacctgagtggagacacatagggtatgagccaactgggtcttccctgacctgcaggacaaccaaataacatacattttaaactaaaaaaagccagaactgaactcagaaatatagttacagtagcatatcataagtcaccgttcactgtgactattcacagtaaatactcaagacagtttctttcatttgcatgtaagaggtatgtgcacaattgtgttgtatgcaatggcaattgctcctaataccagcgatactatacaacaaataattgtctcatgtactgttcactttacagatcccattttaatttcattgtcattaaagaatcactttgcatcaaagaaatggtgagaaattgtattcatgtggttaagttagcaaagcaaaaacatgattagaaactacaaggtgagaaattttgtcatctttagtatgtagttattgaaaatgttttttttatctatcacctttatagtatttgcgagccaactccagggaagagaagcgagatttatttattttttgtcgtttttgactatgtggtgcaccaaataaatgaaacacgcttggctggtggtattacgacctatacttatgatgatgcccagcgccccagccccttgcttcccttcttgcatttgctgatgctcctgaagccttctacatatccgtgaagcatggcgttgaaggtgccggaggaaaagctatatcagcagcattattgcagtctgctcattacgatcagttgaatgtggtactgtctactgcgtgtttgaattgcaagctatgtgtgcttcttttggctcttttcctccggttgtggctttttgcttacatgaaactctcgagtagacaatctagcgctaattgattcaggtgtagagccttcctcggatacctggctccttttggctttcatagaactgcagctgcaagtttatatcattgcatctcagtatgcggagtgaataagctgtatacacaaccataatgacttcaatatccaactgtttaatatgatatcagtattgatggaccccacacgcacatagaaacggccacttaagattggacattccctctgttttcacaactactctgtagatcaaaggttcttagcatgctgtatgtatagttcttgttctattttaataatgaaatgcatgtctagatcttttttgtagtagagattatgtaatgtgtggataacctggaaactgcacaaattttgtttttgagtatttgttttttatgcttttgatcaaaatttctatatatgtagcttctggacaaggttataacgaaacttgatggaactgcctgcacatttccaggattgacaatgagttttcttatatgattcaagtaacgaagtcatgcaagtgttttagcagcattatagattaatgtgatgatactgatgtcacacttagagccaggctttgctaggcagctttgcgttcacttcttcactcacagatttcatcatataggcaccatggctatatttggttagttgagttgctcctttcaaaaaacttgaagaaatagatggttctatatggtctaaaatccaaaagcttctagaggaaattggagttgccggtagccaagacctatcatgttcagaagtctctctgcctgtttgtatgctttgtggacttctaaagtcaaagcacaatttcattaggttgggattcctgtatgtgctggacaaatttcttatgcgttgcaaactattattggatgacagtgatatgcaagaccacacaacttctgatcatagcaagaattgtcttgataaagcttttgcagttatagatattatgaatagttctttgttacttgtggttcaggacaatgagacggaccatatcaacatcttaaaggtaaattccttattgtcttaaaatttcggtgcacatatcaagcatacatacaagtcagcatcatttacgtatggtatcagttgccttacaagttaaaggtgacttaagttttcaaaaaagtggatcggctacacccttctttcttttagtgttaaaaaacatatttgggttagtcctctttctgttcagtaggttttactgcatgcaacaatcgttcaatcacaaaggattttatgataaagttcgatgaattaggcttttcaagtttcaatgttcttaatctcagaattcaaaagtaattaataatgtacatactattactttcctttattattgattaaaaattagaaaagattgtttggaatcggttgaatttcttcaaatcggtttattattctggacctcctacataatgaggtactgaaatttacaccgatagcctaaaattgattatctgtgattcacaccttcctctttcagatgtgtgatatgctgttccctcaattatgcctgagaattccatccacaaatgcgatgcatgtcaggggccttcagtcccttggtcaactttttggttgtacatccaagaacatcgataatcatttggatgcccttgcatcacaccaaagtgttggaaacaagaatctttgccagagtgagacattgcaagatatgggcatggatcaatctggtcaacccactttattctgcgaagcatcaatggcaacactactgagaggacttgcaatagctcccattcagcttagcccgtgtaccaacttctttatttttctggccattgatacagcctgaaggggcagccagcgatgacattgcattgggtattgctgttggtagcacaggaagaggcaaccttcctggttctacatcagatattcgagcagcgcttcttttacttttgattggtaaatgcacagctgatcaggaggcactaaaggaggtagaaggcaatggggttcttcaggggccttctggatgacacagattcaagggtagcatatactattctgctgcttttcttttgaagagaatgatgacagaggaactagagatctaccaacggatgcttgaaagcctcatctcaaaagctcaacagatgctatgcgtgtgtttggttgcaggtcctgtggtagcctggcttactacatgccttcccgcatggagatggttgagcatacatgcatcgatgcaagttacgtatttgtgaaagtcttttacctgcatgcagggatacgcgtgaaatggccgtacgtgatgggccatgctcacatgagcccggctacacggacaggcatccaatcaccacctatgtgaatgatgtaaattatcgatgggggcatgtacatgcctctgaatttgtttgtttattctttgttagactagtcactgtccaagagagtcactgtggataatcctgtgttatggacagagacacaattctacaattttgtattgctgaaccattcattgagatcttgcatttgcatgtatggtaactgaccaaaggcgtgtatgtttgtaattgctgattttttttttgcaatttagccctttttcgaaacaattttacgtttggatctctaaatgatataatgttatttttggaccctttattcggctccatggctcatggtgctgaggtaacatatctcgctatcatagcctatggcgccgaggtatctggtgagctgacaactaggtacgcgctggcagctgatgtggcctacctcgatgccacggtatgtggcgccgagctaggagatggcgtcggccgtgtgatggtcattggcccctacttgctgccggccactaccgc

SEQ ID NO: 77671 - DNA, 4560 bp, Zea Mays
  misc_feature (1)..(2): n is a, c, g, or t
nnggagaagcgcttctgggtggcctccttcctcgtcgtatgggcagcagcgctgcagggccacatgatgtggatgcagcgccaggacaccttcaagcacaagtttggtatcgaccaagcagacggacccgatgctcaggattcctcatcttcgtcttcgtcttcctcttcttagtaggtcagttaccttgtatcgtctgaagcggtttgttcggaacaaatgagacatccatcctttaataaagcgggcgggagagaaggcagatgacaagacaagtgcagtgtgtgtaaccactaccaggcgttcctttgatgaatgtcatttttcttctctttagtcctgaataaattctgataccatatcttttgggtgtgggatgcaaaactctgctagcttatcattgccacaaactcatgtatttgagttgtgttttatagattgaagtgcactttccagcaggtttcatagactggacagtggactgccgttggttgtctctcggtgagtgtggaacccactttcatcacaatccttaagcacatccatccctacaggatcagtcagcctgactattccataactcctgaaatatttgagaaacaagtggggcgatttcatatttcattctacaagtgtagtgtgcctgaatattacctggaaccagcaggtaggaccaaaagcaattaagaacaaaggaaccacagatggatgccaggcacaaggcactttatgtacaagtgtagtagctattagcaaaggacacttgcctggttggatctgtgggtgcgaccacaaatgcacagtctctggtagcatgacctatgggaatccatcatttttcattaataaaaaaagttaaagacacggcaaagtgtgataacaaatttaaaacaggtgaaatactcagttctaagttggcactgtgtcacacaagtatctaacaattctgcaatgggctaataggaccaagaaatgttaaatgcatgcagatgcatacattgtcgagaacaacattggcatcaatccccaagtctctcagcaattggcacaacacgttcaggtcgactgaaaacttcattaatttgtagacaaaatataaactcttgagagaatcagcttgacaaattactcccaaagatacaatgttcctttagtgtcaatgtaggcaaccttcccatttcccacatgcatgtggattggaagttgcattctcatcaatcagaaataggaaagtagttccgttgcttctttgtttctcaaattctattgcgtctatggtccacgtgctttctaaaaaaattgatacaggggtgaacctgagtggagacacatagggtatgagccaactgggtcttccctgacctgcaggacaaccaaataacatacattttaaactaaaaaaagccagaactgaactcagaaatatagttacagtagcatatcataagtcaccgttcactgtgactattcacagtaaatactcaagacagtttctttcatttgcatgtaagaggtatgtgcacaattgtgttgtatgcaatggcaattgctcctaataccagcgatactatacaacaaataattgtctcatgtactgttcactttacagatcccattttaatttcattgtcattaaagaatcactttgcatcaaagaaatggtgagaaattgtattcatgtggttaagttagcaaagcaaaaacatgattagaaactacaaggtgagaaattttgtcatctttagtatgtagttattgaaaatgttttttttatctatcacctttatagtatttgcgagccaactccagggaagagaagcgagatttatttattttttgtcgtttttgactatgtggtgcaccaaataaatgaaacacgcttggctggtggtattacgacctatacttatgatgatgcccagcgccccagccccttgcttcccttcttgcatttgctgatgctcctgaagccttctacatatccgtgaagcatggcgttgaaggtgccggaggaaaagctatatcagcagcattattgcagtctgctcattacgatcagttgaatgtggtactgtctactgcgtgtttgaattgcaagctatgtgtgcttcttttggctcttttcctccggttgtggctttttgcttacatgaaactctcgagtagacaatctagcgctaattgattcaggtgtagagccttcctcggatacctggctccttttggctttcatagaactgcagctgcaagtttatatcattgcatctcagtatgcggagtgaataagctgtatacacaaccataatgacttcaatatccaactgtttaatatgatatcagtattgatggaccccacacgcacatagaaacggccacttaagattggacattccctctgttttcacaactactctgtagatcaaaggttcttagcatgctgtatgtatagttcttgttctattttaataatgaaatgcatgtctagatcttttttgtagtagagattatgtaatgtgtggataacctggaaactgcacaaattttgtttttgagtatttgttttttatgcttttgatcaaaatttctatatatgtagcttctggacaaggttataacgaaacttgatggaactgcctgcacatttccaggattgacaatgagttttcttatatgattcaagtaacgaagtcatgcaagtgttttagcagcattatagattaatgtgatgatactgatgtcacacttagagccaggctttgctaggcagctttgcgttcacttcttcactcacagatttcatcatataggcaccatggctatatttggttagttgagttgctcctttcaaaaaacttgaagaaatagatggttctatatggtctaaaatccaaaagcttctagaggaaattggagttgccggtagccaagacctatcatgttcagaagtctctctgcctgtttgtatgctttgtggacttctaaagtcaaagcacaatttcattaggttgggattcctgtatgtgctggacaaatttcttatgcgttgcaaactattattggatgacagtgatatgcaagaccacacaacttctgatcatagcaagaattgtcttgataaagcttttgcagttatagatattatgaatagttctttgttacttgtggttcaggacaatgagacggaccatatcaacatcttaaagatgtgtgatatgctgttccctcaattatgcctgagaattccatccacaaatgcgatgcatgtcaggggccttcagtcccttggtcaactttttggttgtacatccaagaacatcgataatcatttggatgcccttgcatcacaccaaagtgttggaaacaagaatctttgccagagtgagacattgcaagatatgggcatggatcaatctggtcaacccactttattctgcgaagcatcaatggcaacactactgagaggacttgcaatagctcccattcagcttagcccgtgtaccaacttctttatttttctggccattgatacagcctgaaggggcagccagcgatgacattgcattgggtattgctgttggtagcacaggaagaggcaaccttcctggttctacatcagatattcgagcagcgcttcttttacttttgattggtaaatgcacagctgatcaggaggcactaaaggaggtagaaggcaatggggttcttcaggggccttctggatgacacagattcaagggtagcatatactattctgctgcttttcttttgaagagaatgatgacagaggaactagagatctaccaacggatgcttgaaagcctcatctcaaaagctcaacagatgctatgcgtgtgtttggttgcaggtcctgtggtagcctggcttactacatgccttcccgcatggagatggttgagcatacatgcatcgatgcaagttacgtatttgtgaaagtcttttacctgcatgcagggatacgcgtgaaatggccgtacgtgatgggccatgctcacatgagcccggctacacggacaggcatccaatcaccacctatgtgaatgatgtaaattatcgatgggggcatgtacatgcctctgaatttgtttgtttattctttgttagactagtcactgtccaagagagtcactgtggataatcctgtgttatggacagagacacaattctacaattttgtattgctgaaccattcattgagatcttgcatttgcatgtatggtaactgaccaaaggcgtgtatgtttgtaattgctgattttttttttgcaatttagccctttttcgaaacaattttacgtttggatctctaaatgatataatgttatttttggaccctttattcggctccatggctcatggtgctgaggtaacatatctcgctatcatagcctatggcgccgaggtatctggtgagctgacaactaggtacgcgctggcagctgatgtggcctacctcgatgccacggtatgtggcgccgagctaggagatggcgtcggccgtgtgatggtcattggcccctacttgctgccggccactaccgc

SEQ ID NO: 77672 - DNA, 1515 bp, Zea Mays
aacaagaagaggcaccgacggacgcatcgcgtgcccttctcccctcccctcgtgcgttgacaaaaaagaaagtgaagtgaagaatcaaccaacaatggccggcggaatccaccgaccacaatgctgattttgtttgagccatctggactggactggaccctataaaaaacagatcagatctcccccaccctcgcttccccagcctgcaggttgtcgtcgccctcttcctcctccttcgctgttgctgttgctgttgcttccgcttccgccgccgccgccgcggaaatcaaactaatctgagagatcccccaaacaaaaaaagagcacgggatcgaaatggagctcgacggcaagtacagcaaggaccagagcctcaaatgcgaatgcctcctcttcgacctcgatgacacactatacccgttcaactccggcattgctgccgacataaagaagaacatccaagactatatggtgcacaagctcggcgttgacgaggccataagcttggacctatgcgtcctcctctacaagcagtacggaaccaccatggctggcttgagggctgttgggtaccagtttgattacgatgactaccacagctttgttcatgggaggttgtcttatgacaaaatcaagcctgatcctgtgcttaggaacatcctcctcagcttacccattcgcaaacttgtgttcacaaacggtgacagaacacatgcttcaagggccctcaagaggcttggcattgaggattgtttcgaaggagtcgtgtgctttgagacactgaacccgacatctcctcctcctcctgtcccagctcaggaacttgaaatctttgatctaatgaagcatctggctcatccacagcccgcggtgcagctaccaaaatcacctatcctatgcaaaccgtcaagggaggccatgctgcaggctctcaaggtcgcctccattaatccacagacaactatattgttcgatgacagcttcaggaacattgaagctgcaaagcaaattggaatgtgtactgtcctggttggaacatctgagcggaaaaagggtgctgaccatgccttggaaagcctccacaacatgaaggaagcactgccggagctgtgggaggaagctgagaaggatgaagatgtgaggaattcgagcaaagccggaatcgagacatctgtgatcgcgtaatcttttttgttccttggttacaaatgtagccccttctgttttccttggaggacaacacgaggtggtggtgtatgaaaaaagaggagacctcctcaaggggtgggggggactgactgatactacgaccactgatgttacaccccgtaaactattactatccaataagaatgttttcttcttcaactatctaggatggtcattttgttggtgtttagttaaagcagctatccaatatttttttggatccaaatgtgtatgtcctcgctacttggttcttcatgcttatgaatgtggagtgatgatgtcctgttgtccttggattcaccattt

SEQ ID NO: 77673 - DNA, 809 bp, Zea Mays
aaaaaaacaagaatgcaggtttggaaggcctggttttctaaccaaagtggcctgtttggccatctctaggtcgggcaagcagcaacagcctgcagccggcagtcctcgcctccgcctcctccaccctgaccgtcaacagaggaagacgaggatgtcgggatccaaggtgtacaccctcgaggaggtggctaagcacaacaccaaggacgactgctggctcgtcatcggcggcaaggtgtacaatgtgaccaagtttctggaggatcaccctggaggcgatgatgttctgctgtcttccactgccaaggatgctaccgatgatttcgaagatgtggggcacagcagcactgcccgtgcaatgatggacgagtacttagtgggtgagattgatgcagccacgatacccaccaaggtgaagtacacgccccccaagcagccgcactacaaccaggacaagacccaggagttcgtcatcaagatcctccagtttttggtccccctcgcaatactgggtctggccgtcgctgtaaggatgtacaccaagtcggaatctgcctagtctcttgtcatcaacgcttcaaacatcattcacaaactgaataagttagtgttgaaatgctgcaaagatcattaattctgaaacttgagtctttgctgtcgtgtgagacgtacgtctattagtataaaatcacttctatttttccttctttccttggaatgttttgatttaccttgttgttgtttgggtttggctaagctttttaacgttcaaaaatttatattacaatagtggcacgatccacatgatg

SEQ ID NO: 77674 - DNA, 3564 bp, Zea Mays
atcaaagtttcttttatattgaggaaagcattgatactagaatgataatggagcggtctagtattgcggtgatctctgtggttcaagggacagttggggaaaaacagattgagcaggagtttgtaaatctagttggaaaaaacgtttggaggtggactgccagatccattggtgaaaacaagtttttaatgaggtttccagaccctaaaatgattaaagacctgggatactttaggccactggggatgcgaacggcaaaagctcaaataactatcgatccttggtctccagctgtcagtgccaaaagctgtttacaaagaggttggtttagaatcagaggtatcccaattgagcagagatctataaaaaccattgctaaagtgggtggattagtgggaaaggtagttgaaattgatgaaaaaaccccgtgtgagaaatgaatatgtaagggtaaggattgcctgcagagatgtcagtgttgttcccatgcacggttgagagttctttgggtctctttatatatgattttcactttgaaaagggaaattcaggaagaggatccccatgacaatcgtggtagtggcatcaaaattgatgatcaagatcagaacaaatgctaagagaacaaagtttgaaggaaacccctggagtgtaagggaaaaacaaaaggcaagactcaagaagggtataacaataatcagcaaaaaaggaaaaaatggccagcccatgcagcatagatatatgaaggctccccctgctccaccagctgagaaaaacatgtggaatctgaataaaggaaaggatatcattcaagatatctcaactgaagagaatttgactaaagaaggaagagttcaaattacagacattgaagaagaggatacaagtgaccttttaggggaggaattgtttgctgcagattatatctataactgaacagatcctttcctaactgaacagatcctttcctatctttacacaggcgcatcaccctttccttactttacagatacattcttaatattatctaacatcccccctcaatcataacttgcataagttaagattgtctctgaacagatccatcttcttctttgtcagagcttttgtaaaaccatctgctatctggtcatttgtagaaatcactctcacatccaggagcttccttgccactctttcacgcacaaaatggaagtcaatttcaacatgcttaacacgaccatgaaagactggattggctgtgagataggtagctccaatattgtcacaccagattcttgctgtagagggacaagaaattttcagttccttcaatagagactgaatccacatcaactcagcagtggcatttgcaatagctttgtattcagcctcagtactagatcttgacacggttggttgtttgcgagcgctccaggataccaaattactgcccagaaaaacagcaaatccccctgtagagcgcctgtcatcaatatctccagcccaatctgcatcagtgaaggcactgaccagcagagaaggtgactttgaaatcttcaacccatggtgaagagtgtatcgaaggtaccttaagatacgcttgactgctgtccagtgatctgttgtaggtgaatgcaaatattggcacactttgttcactgcaaaactgagatccggacgagtcaaagttagatattgtagggcacctactatgcttctataccgtgttgaatcttcaggcccaaggggttcaccattgtgaaggcttaatttttctgaagtagagagtggtgtagtggtaggcttgcaatttatcataccaactcgactaagaacatctgaggcatactttctctgcgagaggtgaataccattatctaccttctgcacttctattccaagaaaataatgtagtgggccaaggtcttttagtgcaaaatcagttttcagatccttgagcaaagctgagacaacatcctgagatgaacttgcaacaattatgtcatcgacatatacaagcaagaagatggtgataccttccttgatgtaaaagaacagagaggtgtctcctttggatgcttgaaaacctagctgcaatagtttgtcactgagtctggaataccaggctctaggtgcctgcttcagaccataaatggccttgtcaagcttgcaaatgtggtgtggctgcagcttgtcttcgtaacctggtggttgcttcatatatacatcctcctcaagaatgccatgaagaaacgcattctgaacatcaagttgtcgtagtgaccacccttgtgaaacagctagagagagaataacccgaatagtggccgccttcactactggactgaatgtgtcctcatagtcaatcccgtacctttgcttgaagcctttagcgactaatctagccttgtatctatccagagtaccatctgccttctttttgaccttgtacacccatctacaatcaataatatttttgattccttctggtggaaccaagtgccaagtcttgttcttagccaaggcctcaaattcagcatccattgcatgcttccagttttcatcacccaaggcctccgctaaattttggggctcacttgtggcagccaaacagtcatacttgatgcgctgtattgtaccattctgaagccgagtacgaggtctcagatctatgtaaccacctgcagctgaagcactttcagttccttccatgagagacacatgttcttctgattctgaaagcactttgaaacgatggtgaaggagctgcagtaggttcctgtgaaggaacagcagaagaaaaaggtgttgtggcagtttctggtaatgcagctgaaggtggagttgatatgttcttctctcttctctggtacgtggtagtgataggtggtttcatatattgttttgttgcactcttgggctgaacctgctcttgttcatgcacttgaagctgctcagtacctatctcctgcattctgacatcagagaccacactaggaacaacatcatcaattgcattagcctcagtaacatcaggcaaagtgtgatcagctgtattaaaaatgcccctattgtcaaggttggatgaaggaaataaggtagaaggcaggagattaatttgtgctctaagacgtgctccagcatttgcatgaagttcagcaaagggaaaaatgtgctcatcaaacacaacatccctagagatgtagacacgaccagtagagacctctagacacttgtatcctttgtgcatattgctgtagcctagaaagacacatcttgtagagcggaaagccaattttcgagtattatagggccgcaggtttggccagcatgcacagccaaaaactttaagaaaattatagtcatgggactgtttgaacaactgctcaagaggtgtagagtaatcaagaagtttcgtgggggtgcgattaatgaggtatgcagctgtggcaaaagcctcatcccagaacttaagcggcatggatgcttgagcaaggatagacaacccaacttcaacaatatgtctatgtttgcgttcagcaggtccattttgctgatgcgcatgtgggcaggacacataat

SEQ ID NO: 77675 - DNA, 709 bp, Zea Mays
aaaactttattttagtttctatatttagcaatttatagactaaaaaggaataaaatgaatggactaaacattagtccctagaaaccaaacaccccctaagtctgtatggaagcctatggacaacttccttcaacgtatggaaggaattactctagatgatgtcgcaacatttgccaggaagatgctagcttcacgacccacaatggttagctggggagatgttgacaaagttcctccatatgaatctatttgcaagcggctacgataagtacccctacacaatgacctctggttgactttgaaggatccttccgttgaaaactaaacaatcgcttgtatgaagtgccctagctcaggaactgcttttctttggggcattcaatttagtgagcttaggatttcagcagctacgttcagttgtaactgttccatagtagattaggaagactggcgatcatttttatgtccattttctgcgactatggatagcaggagtattctgctggcctgaattcccggtgtaaacggcttctgaaattttgaatcattgataaactaatagtgtttggtttgaggaaatttttatttgtttcatatagaatggaaattgtaaaccatgacactgattagtcaaatgttccaagtgcaaatgacccaaaacactgttgggcagaagccgatggtgattgctatatactcgtttggcttt

SEQ ID NO: 77676 - DNA, 635 bp, Zea Mays
catgaatccctggtccatttctgcttcctgtcaggaagcctatggacaacttccttcaacgtatggaaggaattactctagatgatgtcgcaacatttgccaggaagatgctagcttcacgacccacaatggttagctggggagatgttgacaaagttcctccatatgaatctatttgcaagcggctacgataagtacccctacacaatgacctctggttgactttgaaggatccttccgttgaaaactaaacaatcgcttgtatgaagtgccctagctcaggaactgcttttctttggggcattcaatttagtgagcttaggatttcagcagctacgttcagttgtaactgttccatagtagattaggaagactggcgatcatttttatgtccattttctgcgactatggatagcaggagtattctgctggcctgaattcccggtgtaaacggcttctgaaattttgaatcattgataaactaatagtgtttggtttgaggaaatttttatttgtttcatatagaatggaaattgtaaaccatgacactgattagtcaaatgttccaagtgcaaatgacccaaaacactgttgggcagaagccgatggtgattgctatatactcgtttggcttt

SEQ ID NO: 77677 - DNA, 922 bp, Zea Mays
gttcaactctttggattgctatagaaaatctctacgtgtcctaaataaatatcactttgtcgagtccctttctgcatttagtaatgtatatgacaacactggcctctttggtatctacttgaccacgtcaccatatcatgtggcaaaggctgttgatatcgcaataagtgaattaattgctgttgcaactcccggagaagtgacagaggttgaactgcgacgagcaaaaaactcaacgatttcatctgtattaatgaacctcgaatctagggtagttgttgcagaagatattggaagacagatgttatcttacggtagcaggaagcctatggacaacttccttcaacgtatggaaggaattactctagatgatgtcgcaacatttgccaggaagatgctagcttcacgacccacaatggttagctggggagatgttgacaaagttcctccatatgaatctatttgcaagcggctacgataagtacccctacacaatgacctctggttgactttgaaggatccttccgttgaaaactaaacaatcgcttgtatgaagtgccctagctcaggaactgcttttctttggggcattcaatttagtgagcttaggatttcagcagctacgttcagttgtaactgttccatagtagattaggaagactggcgatcatttttatgtccattttctgcgactatggatagcaggagtattctgctggcctgaattcccggtgtaaacggcttctgaaattttgaatcattgataaactaatagtgtttggtttgaggaaatttttatttgtttcatatagaatggaaattgtaaaccatgacactgattagtcaaatgttccaagtgcaaatgacccaaaacactgttgggcagaagccgatggtgattgctatatactcgtttggcttt

SEQ ID NO: 77678 - DNA, 1797 bp, Zea Mays
tgacggcgaggaacggctccgtgggcgcctccgatgacgacgctctccaggatgctgccgcggttgcgctcctccgccacgcgcgccctccgcaaggtgttcggactggaacccgcggcgccgccgcgacggctccccgcccctgaagccttcgtcgcgtctgagagatcactcctgcgccctcttcctggcctggacctcccgccgtgcctccccgacaacctgagccgcagccccacccgggtcaccacgctccccaacggcctccgcgtcgccaccgaggacatcccgggtccttctgcgtgcatcggtttcttcgtcaactccggctccgtctacgagtccggggagaccaccggcgtgtcatacctgctggagaggatgggcttcaaggacaccaagcaccggagccacctcagcatcgtgagcgagctcgagcttgccggggccagcgtcagcgtctccgcctcccgggagcagatggtctacagctacgacacactcaagggatacatgcccgaggctctcgagatcctcatcgactgcatgcgcaacccgctcttcctccaggaagaagtccaacggcaggaaaattttactgctgatcgtgtggttctagcagcagcaggtgttgatcacgaacacatgctaggctatgcagattttttgttgaaagattggcacaggggggccccaatggaaaagccaaagtctacatatgttggtggatattccaaacacagagcttattcagatatgacagatgttgcattagcttttgaagtgccagggggctggtttcaagagagagacgccgcgattatgactgtcatacagactttaatgggtggtggtggttcattttccactggtggtcctggaaaagggatgcattcacggctttctctacgtgtcctaaataaatatcactttgtcgagtccctttctgcatttagtaatgtatatgacaacactggcctctttggtatctacttgaccacgtcaccatatcatgtggcaaaggctgttgatatcgcaataagtgaattaattgctgttgcaactcccggagaagtgacagaggttgaactgcgacgagcaaaaaactcaacgatttcatctgtattaatgaacctcgaatctagggtagttgttgcagaagatattggaagacagatgttatcttacggtagcaggaagcctatggacaacttccttcaacgtatggaaggaattactctagatgatgtcgcaacatttgccaggaagatgctagcttcacgacccacaatggttagctggggagatgttgacaaagttcctccatatgaatctatttgcaagcggctacgataagtacccctacacaatgacctctggttgactttgaaggatccttccgttgaaaactaaacaatcgcttgtatgaagtgccctagctcaggaactgcttttctttggggcattcaatttagtgagcttaggatttcagcagctacgttcagttgtaactgttccatagtagattaggaagactggcgatcatttttatgtccattttctgcgactatggatagcaggagtattctgctggcctgaattcccggtgtaaacggcttctgaaattttgaatcattgataaactaatagtgtttggtttgaggaaatttttatttgtttcatatagaatggaaattgtaaaccatgacactgattagtcaaatgttccaagtgcaaatgacccaaaacactgttgggcagaagccgatggtgattgctatatactcgtttggcttt

SEQ ID NO: 77679 - DNA, 1965 bp, Zea Mays
tgacggcgaggaacggctccgtgggcgcctccgatgacgacgctctccaggatgctgccgcggttgcgctcctccgccacgcgcgccctccgcaaggtgttcggactggaacccgcggcgccgccgcgacggctccccgcccctgaagccttcgtcgcgtctgagagatcactcctgcgccctcttcctggcctggacctcccgccgtgcctccccgacaacctgagccgcagccccacccgggtcaccacgctccccaacggcctccgcgtcgccaccgaggacatcccgggtccttctgcgtgcatcggtttcttcgtcaactccggctccgtctacgagtccggggagaccaccggcgtgtcatacctgctggagaggatgggcttcaaggacaccaagcaccggagccacctcagcatcgtgagcgagctcgagcttgccggggccagcgtcagcgtctccgcctcccgggagcagatggtctacagctacgacacactcaagggatacatgcccgaggctctcgagatcctcatcgactgcatgcgcaacccgctcttcctccaggaagaagtccaacggcagctggtccttgctcgagaaggattccaggagctgcagaggagccctgaaagatttctccatgaacagcttaacattgttggattttcgggtgctcttgcgaatccactaatagctcctgagcatgtccttgctagaattaatgacaggattattcaaaagttctatcatgaaaattttactgctgatcgtgtggttctagcagcagcaggtgttgatcacgaacacatgctaggctatgcagattttttgttgaaagattggcacaggggggccccaatggaaaagccaaagtctacatatgttggtggatattccaaacacagagcttattcagatatgacagatgttgcattagcttttgaagtgccagggggctggtttcaagagagagacgccgcgattatgactgtcatacagactttaatgggtggtggtggttcattttccactggtggtcctggaaaagggatgcattcacggctttctctacgtgtcctaaataaatatcactttgtcgagtccctttctgcatttagtaatgtatatgacaacactggcctctttggtatctacttgaccacgtcaccatatcatgtggcaaaggctgttgatatcgcaataagtgaattaattgctgttgcaactcccggagaagtgacagaggttgaactgcgacgagcaaaaaactcaacgatttcatctgtattaatgaacctcgaatctagggtagttgttgcagaagatattggaagacagatgttatcttacggtagcaggaagcctatggacaacttccttcaacgtatggaaggaattactctagatgatgtcgcaacatttgccaggaagatgctagcttcacgacccacaatggttagctggggagatgttgacaaagttcctccatatgaatctatttgcaagcggctacgataagtacccctacacaatgacctctggttgactttgaaggatccttccgttgaaaactaaacaatcgcttgtatgaagtgccctagctcaggaactgcttttctttggggcattcaatttagtgagcttaggatttcagcagctacgttcagttgtaactgttccatagtagattaggaagactggcgatcatttttatgtccattttctgcgactatggatagcaggagtattctgctggcctgaattcccggtgtaaacggcttctgaaattttgaatcattgataaactaatagtgtttggtttgaggaaatttttatttgtttcatatagaatggaaattgtaaaccatgacactgattagtcaaatgttccaagtgcaaatgacccaaaacactgttgggcagaagccgatggtgattgctatatactcgtttggcttt

SEQ ID NO: 77680 - DNA, 2187 bp, Zea Mays
tgacggcgaggaacggctccgtgggcgcctccgatgacgacgctctccaggatgctgccgcggttgcgctcctccgccacgcgcgccctccgcaaggtgttcggactggaacccgcggcgccgccgcgacggctccccgcccctgaagccttcgtcgcgtctgagagatcactcctgcgccctcttcctggcctggacctcccgccgtgcctccccgacaacctgagccgcagccccacccgggtcaccacgctccccaacggcctccgcgtcgccaccgaggacatcccgggtccttctgcgtgcatcggtttcttcgtcaactccggctccgtctacgagtccggggagaccaccggcgtgtcatacctgctggagaggatgggcttcaaggacaccaagcaccggagccacctcagcatcgtgagcgagctcgagcttgccggggccagcgtcagcgtctccgcctcccgggagcagatggtctacagctacgacacactcaagggatacatgcccgaggctctcgagatcctcatcgactgcatgcgcaacccgctcttcctccaggaagaagtccaacggcagctggtccttgctcgagaaggattccaggagctgcagaggagccctgaaagatttctccatgaacagcttaacattgttggattttcgggtgctcttgcgaatccactaatagctcctgagcatgtccttgctagaattaatgacaggattattcaaaagttctatcatgaaaattttactgctgatcgtgtggttctagcagcagcaggtgttgatcacgaacacatgctaggctatgcagattttttgttgaaagattggcacaggggggccccaatggaaaagccaaagtctacatatgttggtggatattccaaacacagagcttattcagatatgacagatgttgcattagcttttgaagtgccagggggctggtttcaagagagagacgccgcgattatgactgtcatacagactttaatgggtggtggtggttcattttccactggtggtcctggaaaagggatgcattcacggctttgtaaggcttgaactcttgatgattgttcaactctttggattgctatagaaaatgtactcgtaaaatctcaaaactgtgatgcacttcagaattatgtcacgtgctgcattatctatatttttgtttctttgtttgtttttctgtattagagacatagtttttttggtgggtgaaatatttctgatgaaggctatgctcaattcttgttcctttgtagctctacgtgtcctaaataaatatcactttgtcgagtccctttctgcatttagtaatgtatatgacaacactggcctctttggtatctacttgaccacgtctagtcaccatatcatgtggcaaaggctgttgatatcgcaataagtgaattaattgctgttgcaactcccggagaagtgacagaggttgaactgcgacgagcaaaaaactcaacgatttcatctgtattaatgaacctcgaatctagggtagttgttgcagaagatattggaagacagatgttatcttacggtagcaggaagcctatggacaacttccttcaacgtatggaaggaattactctagatgatgtcgcaacatttgccaggaagatgctagcttcacgacccacaatggttagctggggagatgttgacaaagttcctccatatgaatctatttgcaagcggctacgataagtacccctacacaatgacctctggttgactttgaaggatccttccgttgaaaactaaacaatcgcttgtatgaagtgccctagctcaggaactgcttttctttggggcattcaatttagtgagcttaggatttcagcagctacgttcagttgtaactgttccatagtagattaggaagactggcgatcatttttatgtccattttctgcgactatggatagcaggagtattctgctggcctgaattcccggtgtaaacggcttctgaaattttgaatcattgataaactaatagtgtttggtttgaggaaatttttatttgtttcatatagaatggaaattgtaaaccatgacactgattagtcaaatgttccaagtgcaaatgacccaaaacactgttgggcagaagccgatggtgattgctatatactcgtttggcttt

SEQ ID NO: 77681 - DNA, 2853 bp, Zea Mays
tgacggcgaggaacggctccgtgggcgcctccgatgacgacgctctccaggatgctgccgcggttgcgctcctccgccacgcgcgccctccgcaaggtgttcggactggaacccgcggcgccgccgcgacggctccccgcccctgaagccttcgtcgcgtctgagagatcactcctgcgccctcttcctggcctggacctcccgccgtgcctccccgacaacctgagccgcagccccacccgggtcaccacgctccccaacggcctccgcgtcgccaccgaggacatcccgggtccttctgcgtgcatcggtttcttcgtcaactccggctccgtctacgagtccggggagaccaccggcgtgtcatacctgctggagaggatgggcttcaaggacaccaagcaccggagccacctcagcatcgtgagcgagctcgagcttgccggggccagcgtcagcgtctccgcctcccgggagcagatggtctacagctacgacacactcaagggatacatgcccgaggctctcgagatcctcatcgactgcatgcgcaacccgctcttcctccaggaagaagtccaacggcagctggtccttgctcgagaaggattccaggagctgcagaggagccctgaaagatttctccatgaacagcttaacattgttggattttcgggtgctcttgcgaatccactaatagctcctgagcatgtccttgctagaattaatgacaggattattcaaaagttctatcatcagcaggtgttgatcacgaacacatgctaggctatgcagattttttgttgaaagattggcacaggggggccccaatggaaaagccaaagtctacatatgttggtggatattccaaacacagagcttattcagatatgacagatgttgcattagcttttgaagtgccagggggctggtttcaagagagagacgccgcgattatgactgtcatacagactttaatgggtggtggtggttcattttccactggtggtcctggaaaagggatgcattcacggctttgtaaggcttgaactcttgatgattgttcaactctttggattgctatagaaaatgtactcgtaaaatctcaaaactgtgatgcacttcagaattatgtcacgtgctgcattatctatatttttgtttctttgtttgtttttctgtattagagacatagtttttttggtgggtgaaatatttctgatgaaggctatgctcaattcttgttcctttgtagctctacgtgtcctaaataaatatcactttgtcgagtccctttctgcatttagtaatgtatatgacaacactggcctctttggtatctacttgaccacggtgagctaatcttttctacatgttctgtgtctcgtatgttttcttgattcaatttgtttcttctttcgactgaagtttgtaaatttgatattttttgtgtggtcgtgttcaatgattatgattttttgagtgggattaaggttagggatgaaattagaaatggggcatttcatttatcaggaatcgttcccataaaaatgatattgtttatgactgttgagaccataaccgtaattaaacttttgatcttctaatttcttttagcactgtatatagttaaattgaaaatgtggtgagggaatcatttctgtatagaaatatctttaccggccattttcatccctaattaaggccagctctttcgtcctgtttttatccctacacaacttccagtgggcactagttggtcttgatgtagaaaatgcacagtatgactatgaataagaacagtagtgattgaactttttcgacatgaccatcatatgttgccctactatttaacatggtgggtatacttgtttagctttctcactgaaatgtatcgttggagatacgtttcacattttagagcagtcaacaacagcggtttggttcatgttgcagctattcttttgttgaacatgacagaatattaccttttcgtctttgtatggggctctgatatgtgtattattatgatttttttgcctgttttgactagtctagtcaccatatcatgtggcaaaggctgttgatatcgcaataagtgaattaattgctgttgcaactcccggagaagtgacagaggttgaactgcgacgagcaaaaaactcaacgatttcatctgtattaatgaacctcgaatctagggtagttgttgcagaagatattggaagacagatgttatcttacggtagcaggaagcctatggacaacttccttcaacgtatggaaggaattactctagatgatgtcgcaacatttgccaggaagatgctagcttcacgacccacaatggttagctggggagatgttgacaaagttcctccatatgaatctatttgcaagcggctacgataagtacccctacacaatgacctctggttgactttgaaggatccttccgttgaaaactaaacaatcgcttgtatgaagtgccctagctcaggaactgcttttctttggggcattcaatttagtgagcttaggatttcagcagctacgttcagttgtaactgttccatagtagattaggaagactggcgatcatttttatgtccattttctgcgactatggatagcaggagtattctgctggcctgaattcccggtgtaaacggcttctgaaattttgaatcattgataaactaatagtgtttggtttgaggaaatttttatttgtttcatatagaatggaaattgtaaaccatgacactgattagtcaaatgttccaagtgcaaatgacccaaaacactgttgggcagaagccgatggtgattgctatatactcgtttggcttt

SEQ ID NO: 77682 - DNA, 1856 bp, Zea Mays
tgacggcgaggaacggctccgtgggcgcctccgatgacgacgctctccaggatgctgccgcggttgcgctcctccgccacgcgcgccctccgcaaggtgttcggactggaacccgcggcgccgccgcgacggctccccgcccctgaagccttcgtcgcgtctgagagatcactcctgcgccctcttcctggcctggacctcccgccgtgcctccccgacaacctgagccgcagccccacccgggtcaccacgctccccaacggcctccgcgtcgccaccgaggacatcccgggtccttctgcgtgcatcggtttcttcgtcaactccggctccgtctacgagtccggggagaccaccggcgtgtcatacctgctggagaggatgggcttcaaggacaccaagcaccggagccacctcagcatcgtgagcgagctcgagcttgccggggccagcgtcagcgtctccgcctcccgggagcagatggtctacagctacgacacactcaagggatacatgcccgaggctctcgagatcctcatcgactgcatgcgcaacccgctcttcctccaggaagaagtccaacggcagctggtccttgctcgagaaggattccaggagctgcagaggagccctgaaagatttctccatgaacagcttaacattgttggattttcgggtgctcttgcgaatccactaatagctcctgagcatgtccttgctagaattaatgacaggattattcaaaagttctatcatgaaaattttactgctgatcgtgtggttctagcagcagcaggtgttgatcacgaacacatgctaggctatgcagattttttgttgaaagattggcacaggggggccccaatggaaaagccaaagtctacatatgttggtggatattccaaacacagagcttattcagatatgacagatgttgcattagcttttgaagtgccagggggctggtttcaagagagagacgccgcgattatgactgtcatacagactttaatgggtggtggtggttcattttccactggtggtcctggaaaagggatgcattcacggcttttctagtcaccatatcatgtggcaaaggctgttgatatcgcaataagtgaattaattgctgttgcaactcccggagaagtgacagaggttgaactgcgacgagcaaaaaactcaacgatttcatctgtattaatgaacctcgaatctagggtagttgttgcagaagatattggaagacagatgttatcttacggtagcaggaagcctatggacaacttccttcaacgtatggaaggaattactctagatgatgtcgcaacatttgccaggaagatgctagcttcacgacccacaatgttgacaaagttcctccatatgaatctatttgcaagcggctacgataagtacccctacacaatgacctctggttgactttgaaggatccttccgttgaaaactaaacaatcgcttgtatgaagtgccctagctcaggaactgcttttctttggggcattcaatttagtgagcttaggatttcagcagctacgttcagttgtaactgttccatagtagattaggaagactggcgatcatttttatgtccattttctgcgactatggatagcaggagtattctgctggcctgaattcccggtgtaaacggcttctgaaattttgaatcattgataaactaatagtgtttggtttgaggaaatttttatttgtttcatatagaatggaaattgtaaaccatgacactgattagtcaaatgttccaagtgcaaatgacccaaaacactgttgggcagaagccgatggtgattgctatatactcgtttggcttt

SEQ ID NO: 77683 - DNA, 2502 bp, Zea Mays
tgacggcgaggaacggctccgtgggcgcctccgatgacgacgctctccaggatgctgccgcggttgcgctcctccgccacgcgcgccctccgcaaggtgttcggactggaacccgcggcgccgccgcgacggctccccgcccctgaagccttcgtcgcgtctgagagatcactcctgcgccctcttcctggcctggacctcccgccgtgcctccccgacaacctgagccgcagccccacccgggtcaccacgctccccaacggcctccgcgtcgccaccgaggacatcccgggtccttctgcgtgcatcggtttcttcgtcaactccggctccgtctacgagtccggggagaccaccggcgtgtcatacctgctggagaggatgggcttcaaggacaccaagcaccggagccacctcagcatcgtgagcgagctcgagcttgccggggccagcgtcagcgtctccgcctcccgggagcagatggtctacagctacgacacactcaagggatacatgcccgaggctctcgagatcctcatcgactgcatgcgcaacccgctcttcctccaggaagaagtccaacggcaggaaaattttactgctgatcgtgtggttctagcagcagcaggtgttgatcacgaacacatgctaggctatgcagattttttgttgaaagattggcacaggggggccccaatggaaaagccaaagtctacatatgttggtggatattccaaacacagagcttattcagatatgacagatgttgcattagcttttgaagtgccagggggctggtttcaagagagagacgccgcgattatgactgtcatacagactttaatgggtggtggtggttcattttccactggtggtcctggaaaagggatgcattcacggctttctctacgtgtcctaaataaatatcactttgtcgagtccctttctgcatttagtaatgtatatgacaacactggcctctttggtatctacttgaccacggtgagctaatcttttctacatgttctgtgtctcgtatgttttcttgattcaatttgtttcttctttcgactgaagtttgtaaatttgatattttttgtgtggtcgtgttcaatgattatgattttttgagtgggattaaggttagggatgaaattagaaatggggcatttcatttatcaggaatcgttcccataaaaatgatattgtttatgactgttgagaccataaccgtaattaaacttttgatcttctaatttcttttagcactgtatatagttaaattgaaaatgtggtgagggaatcatttctgtatagaaatatctttaccggccattttcatccctaattaaggccagctctttcgtcctgtttttatccctacacaacttccagtgggcactagttggtcttgatgtagaaaatgcacagtatgactatgaataagaacagtagtgattgaactttttcgacatgaccatcatatgttgccctactatttaacatggtgggtatacttgtttagctttctcactgaaatgtatcgttggagatacgtttcacattttagagcagtcaacaacagcggtttggttcatgttgcagctattcttttgttgaacatgacagaatattaccttttcgtctttgtatggggctctgatatgtgtattattatgatttttttgcctgttttgactagtctagtcaccatatcatgtggcaaaggctgttgatatcgcaataagtgaattaattgctgttgcaactcccggagaagtgacagaggttgaactgcgacgagcaaaaaactcaacgatttcatctgtattaatgaacctcgaatctagggtagttgttgcagaagatattggaagacagatgttatcttacggtagcaggaagcctatggacaacttccttcaacgtatggaaggaattactctagatgatgtcgcaacatttgccaggaagatgctagcttcacgacccacaatggttagctggggagatgttgacaaagttcctccatatgaatctatttgcaagcggctacgataagtacccctacacaatgacctctggttgactttgaaggatccttccgttgaaaactaaacaatcgcttgtatgaagtgccctagctcaggaactgcttttctttggggcattcaatttagtgagcttaggatttcagcagctacgttcagttgtaactgttccatagtagattaggaagactggcgatcatttttatgtccattttctgcgactatggatagcaggagtattctgctggcctgaattcccggtgtaaacggcttctgaaattttgaatcattgataaactaatagtgtttggtttgaggaaatttttatttgtttcatatagaatggaaattgtaaaccatgacactgattagtcaaatgttccaagtgcaaatgacccaaaacactgttgggcagaagccgatggtgattgctatatactcgtttggcttt

SEQ ID NO: 77684 - DNA, 1898 bp, Zea Mays
tgacggcgaggaacggctccgtgggcgcctccgatgacgacgctctccaggatgctgccgcggttgcgctcctccgccacgcgcgccctccgcaaggtgttcggactggaacccgcggcgccgccgcgacggctccccgcccctgaagccttcgtcgcgtctgagagatcactcctgcgccctcttcctggcctggacctcccgccgtgcctccccgacaacctgagccgcagccccacccgggtcaccacgctccccaacggcctccgcgtcgccaccgaggacatcccgggtccttctgcgtgcatcggtttcttcgtcaactccggctccgtctacgagtccggggagaccaccggcgtgtcatacctgctggagaggatgggcttcaaggacaccaagcaccggagccacctcagcatcgtgagcgagctcgagcttgccggggccagcgtcagcgtctccgcctcccgggagcagatggtctacagctacgacacactcaagggatacatgcccgaggctctcgagatcctcatcgactgcatgcgcaacccgctcttcctccaggaagaagtccaacggcagctggtccttgctcgagaaggattccaggagctgcagaggagccctgaaagatttctccatgaacagcttaacattgttggattttcgggtgctcttgcgaatccactaatagctcctgagcatgtccttgctagaattaatgacaggattattcaaaagttctatcatgaaaattttactgctgatcgtgtggttctagcagcagcaggtgttgatcacgaacacatgctaggctatgcagattttttgttgaaagattggcacaggggggccccaatggaaaagccaaagtctacatatgttggtggatattccaaacacagagcttattcagatatgacagatgttgcattagcttttgaagtgccagggggctggtttcaagagagagacgccgcgattatgactgtcatacagctctacgtgtcctaaataaatatcactttgtcgagtccctttctgcatttagtaatgtatatgacaacactggcctctttggtatctacttgaccacgtcaccatatcatgtggcaaaggctgttgatatcgcaataagtgaattaattgctgttgcaactcccggagaagtgacagaggttgaactgcgacgagcaaaaaactcaacgatttcatctgtattaatgaacctcgaatctagggtagttgttgcagaagatattggaagacagatgttatcttacggtagcaggaagcctatggacaacttccttcaacgtatggaaggaattactctagatgatgtcgcaacatttgccaggaagatgctagcttcacgacccacaatggttagctggggagatgttgacaaagttcctccatatgaatctatttgcaagcggctacgataagtacccctacacaatgacctctggttgactttgaaggatccttccgttgaaaactaaacaatcgcttgtatgaagtgccctagctcaggaactgcttttctttggggcattcaatttagtgagcttaggatttcagcagctacgttcagttgtaactgttccatagtagattaggaagactggcgatcatttttatgtccattttctgcgactatggatagcaggagtattctgctggcctgaattcccggtgtaaacggcttctgaaattttgaatcattgataaactaatagtgtttggtttgaggaaatttttatttgtttcatatagaatggaaattgtaaaccatgacactgattagtcaaatgttccaagtgcaaatgacccaaaacactgttgggcagaagccgatggtgattgctatatactcgtttggcttt

SEQ ID NO: 77685 - DNA, 1957 bp, Zea Mays
ccctctcgacttggcgacaggctctctctcctacccgagaggacagaccgcaccgccacgcacccggcaccccctctcctctctgccgtcatgggacgtgccgcgccgtcttcatcgccgagctcgccgcagctcgggcgcaagcgcacggcggcgcccacaccggagcccccgacaccgcagcgccactgctccatggtcgacgtcatgcgccgctcgcgcgccgtcgccgcgccgccccctgtcgcacgcgcgcgggtgtacacctactacgagacccttctctgtgagacctgcggcctcggtgaccgcgacgacgagatgctcctctgcgaccggtgcgaccgcggctgccataccttctgcctccgccccatcgccgccaaggtccccatcggcccctggttctgccccgtctgcgccccgccgactatggcccccaagagtttcccggtgaagcagaccaagatcgtcgatttcttccggattcagaaggatgagcaggatgcacaggccgccaaatgcaggctctcccaagatggtagaaggcgaaggaagcgttctcttgttatgcacaagaggaggaggaggatactgccatttgttccatctgaagatggagctagaagactcaaacaaatggcgtctctggccactgctttgacgtcttccaaaacaaagttcagtaatgagctgacttacatgcctaacatggctcctaggtcttccaatctggcaagattggaggttctgcccaaagaggataaggaaaatatagagctgtgcagaaccatgcagcaaagaggcgaatgccctccacttctcgtggtctttgatccccttgaaggtttcactgtgcaggctgacggtgatattaaggatatgaccttcctcgctgaatatactggggatgtcgattatctggagaacagggaaaatgatgattgcgactgtattatgacgctcctcctgccagctgatccttcccaaatgctggtgatttgccctgacaagcggggtaacatttctcgcttcgtcagtggcatcaacaaccacacaccggatggcaagaagaagcagaatgtcaagtgtgtgcggtacgacatggatggagagagccatgttttgctggtcgcctgccgtgatatagcttgtggtgagaagctatattacgattacaacggatacgagcatgcgtatcctactcaccatttcttctaaacaccccccccccccccaaaaaaaaaaaacagttttgacctgaacagtaaggtagtagtaaaggaggctgggtgaaattgatagaactttgccaactaaaaaccaacaacatatactgaagagatcctaaaatgatagacattgataggtgcttagggaactagtaccctgattcaattacaggagccaatgaagaggaattgccattgtctctgctctccagatgcatcttcccattcatattctttcttttttgttatataagaaaatgcagaggaaaaagaagaagaatgttgcagttgagttaactgttggcctgttgctggttcaaggcacatggccgtctctataatgttctgtctactttcaccgtttgcggttgtgctccttacacacagtatgtgtgtgcattgatgtgcacttgaggctaggatatcacaaaagaggttcaagtgatatcacactgttttagagtttgcagatccgaaagcctaaacatcacagactcacattactacataacataatgagggaattgcatggttacctcactccaggatgtcactttgtttttatcttttttttatataaaaaagtttatatgtatgtctcttctttttttgaaatggacacctagcttattcctattttattattagatgcactcagcccattaaaggacgttcatacctttgcactattgtttctccttttattaactgtttgtaaatttact

SEQ ID NO: 77686 - DNA, 1971 bp, Zea Mays
cctccgtcctctccctctcgacttggcgacaggctctctctcctacccgagaggacagaccgcaccgccacgcacccggcaccccctctcctctctgccgtcatgggacgtgccgcgccgtcttcatcgccgagctcgccgcagctcgggcgcaagcgcacggcggcgcccacaccggagcccccgacaccgcagcgccactgctccatggtcgacgtcatgcgccgctcgcgcgccgtcgccgcgccgccccctgtcgcacgcgcgcgggtgtacacctactacgagacccttctctgtgagacctgcggcctcggtgaccgcgacgacgagatgctcctctgcgaccggtgcgaccgcggctgccataccttctgcctccgccccatcgccgccaaggtccccatcggcccctggttctgccccgtctgcgccccgccgactatggcccccaagagtttcccggtgaagcagaccaagatcgtcgatttcttccggattcagaaggatgagcaggatgcacaggccgccaaatgcaggctctcccaagatggtagaaggcgaaggaagcgttctcttgttatgcacaagaggaggaggaggatactgccatttgttccatctgaagatggagctagaagactcaaacaaatggcgtctctggccactgctttgacgtcttccaaaacaaagttcagtaatgagctgacttacatgcctaacatggctcctaggtcttccaatctggcaagattggaggtaggcggaatgcaggttctgcccaaagaggataaggaaaatatagagctgtgcagaaccatgcagcaaagaggcgaatgccctccacttctcgtggtctttgatccccttgaagggctgacggtgatattaaggatatgaccttcctcgctgaatatactggggatgtcgattatctggagaacagggaaaatgatgattgcgactgtattatgacgctcctcctgccagctgatccttcccaaatgctggtgatttgccctgacaagcggggtaacatttctcgcttcgtcagtggcatcaacaaccacacaccggatggcaagaagaagcagaatgtcaagtgtgtgcggtacgacatggatggagagagccatgttttgctggtcgcctgccgtgatatagcttgtggtgagaagctatattacgattacaacggatacgagcatgcgtatcctactcaccatttcttctaaacaccccccccccccccaaaaaaaaaaaacagttttgacctgaacagtaaggtagtagtaaaggaggctgggtgaaattgatagaactttgccaactaaaaaccaacaacatatactgaagagatcctaaaatgatagacattgataggtgcttagggaactagtaccctgattcaattacaggagccaatgaagaggaattgccattgtctctgctctccagatgcatcttcccattcatattctttcttttttgttatataagaaaatgcagaggaaaaagaagaagaatgttgcagttgagttaactgttggcctgttgctggttcaaggcacatggccgtctctataatgttctgtctactttcaccgtttgcggttgtgctccttacacacagtatgtgtgtgcattgatgtgcacttgaggctaggatatcacaaaagaggttcaagtgatatcacactgttttagagtttgcagatccgaaagcctaaacatcacagactcacattactacataacataatgagggaattgcatggttacctcactccaggatgtcactttgtttttatcttttttttatataaaaaagtttatatgtatgtctcttctttttttgaaatggacacctagcttattcctattttattattagatgcactcagcccattaaaggacgttcatacctttgcactattgtttctccttttattaactgtttgtaaatttact

SEQ ID NO: 77687 - DNA, 2290 bp, Zea Mays
cctacacctacatatctaccaaagcgagcgagtccaccgtcgacaccacgtcatcggccccattctcctccgtcctctccctctcgacttggcgacaggctctctctcctacccgagaggacagaccgcaccgccacgcacccggcaccccctctcctctctgccgtcatgggacgtgccgcgccgtcttcatcgccgagctcgccgcagctcgggcgcaagcgcacggcggcgcccacaccggagcccccgacaccgcagcgccactgctccatggtcgacgtcatgcgccgctcgcgcgccgtcgccgcgccgccccctgtcgcacgcgcgcgggtgtacacctactacgagacccttctctgtgagacctgcggcctcggtgaccgcgacgacgagatgctcctctgcgaccggtgcgaccgcggctgccataccttctgcctccgccccatcgccgccaaggtccccatcggcccctggttctgccccgtctgcgccccgccgactatggcccccaagagtttcccggtgaagcagaccaagatcgtcgatttcttccggattcagaaggatgagcaggatgcacaggccgccaaatgcaggctctcccaagatggtagaaggcgaaggaagcgttctcttgttatgcacaagaggaggaggaggatactgccatttgttccatctgaagatggagctagaagactcaaacaaatggcgtctctggccactgctttgacgtcttccaaaacaaagttcagtaatgagctgacttacatgcctaacatggctcctaggtcttccaatctggcaagattggaggtaggcggaatgcaggttctgcccaaagaggataaggaaaatatagagctgtgcagaaccatgcagcaaagaggcgaatgccctccacttctcgtggtctttgatccccttgaagggtacttgtcttgaactcactacactcagttatttacttgttggaagtttgtctatttaatccggagtttgtggtgctggaacgtgtgtgtgcaacactgcccttagtgttccagtgtcacacactgtaaacaaaaattgtgagagcaaagctgtggattctgtggcgtacacacacacatttacattttgttttacttttttagtacacagaatcgacactttgacatttttatttccagtttcactgtgcaggctgacggtgatattaaggatatgaccttcctcgctgaatatactggggatgtcgattatctggagaacagggaaaatgatgattgcgactgtattatgacgctcctcctgccagctgatccttcccaaatgctggtgatttgccctgacaagcggggtaacatttctcgcttcgtcagtggcatcaacaaccacacaccggatggcaagaagaagcagaatgtcaagtgtgtgcggtacgacatggatggagagagccatgttttgctggtcgcctgccgtgatatagcttgtggtgagaagctatattacgattacaacggatacgagcatgcgtatcctactcaccatttcttctaaacaccccccccccccccaaaaaaaaaaaacagttttgacctgaacagtaaggtagtagtaaaggaggctgggtgaaattgatagaactttgccaactaaaaaccaacaacatatactgaagagatcctaaaatgatagacattgataggtgcttagggaactagtaccctgattcaattacaggagccaatgaagaggaattgccattgtctctgctctccagatgcatcttcccattcatattctttcttttttgttatataagaaaatgcagaggaaaaagaagaagaatgttgcagttgagttaactgttggcctgttgctggttcaaggcacatggccgtctctataatgttctgtctactttcaccgtttgcggttgtgctccttacacacagtatgtgtgtgcattgatgtgcacttgaggctaggatatcacaaaagaggttcaagtgatatcacactgttttagagtttgcagatccgaaagcctaaacatcacagactcacattactacataacataatgagggaattgcatggttacctcactccaggatgtcactttgtttttatcttttttttatataaaaaagtttatatgtatgtctcttctttttttgaaatggacacctagcttattcctattttattattagatgcactcagcccattaaaggacgttcatacctttgcactattgtttctccttttattaactgtttgtaaatttact

SEQ ID NO: 77688 - DNA, 2124 bp, Zea Mays
atcctctcctgggtcctggcttctccttccactccggagatcgacggctgcttgccgcactcgcgctcgctcccacggccggcaaccatggccgccgccgctgccgcggtgccagccaccttcctctcgggcctcccctctccacggaccccgtctcctgtgctccactcgcccgtacagagagcccatcccgtcgccgctcctctcttcctctccgccaagcgccgcgcctatgcctgcgccgccacggcctccggctccttctattcctccaactcagggtacgcagctttacatcccgccggaaatacatataataattgtgccgtgggtgatggcatgtgtagccggtggcccgctgcccgcgtgtgtggtatgctgattttgttgggatgttagacgaaacgcatgttccttggacgtttgtttcctcaagcgctagatcattagcagctaattgaacagttcagggctacaaattcgactgggtctatgtaattctggattacgtttcgtcattcatctcatgtctatttgtttctcagaaatcaaacctcactgatgccgtcgttcagctttgcatttgacgaaggttcttctagttccaaaaggctatatagatggaagagggtattgcttaaagtaagtggagaagctcttgccggcgaccacacagaaaacatcgacccaaagattacaatggctattgcaagagaggttgcttctgtcaccaagctaggtgtagaggttgctattgttgttggcggtggcaatatctttcgtggggcctcttgggctggatgtagtggtcttgaccgctcatctgcagattacatcggcatgttggccactgtgatgaatgctatatttcttcaagcaacaatggagagcatcggaataccgacccgtgtccaaactgccttccgtatgtcagaagttgcagaaccgtacatacgccgaagagctgtaaggcatttagagaaaggaagagttgtcatatttgctgctggaacagggaacccattcttcacgacggatacagctgctgctctccgttgtgccgaaatcaacgcagaggtaatgctgaaagcaacaaatgttgacggtgtgtacgattcagaccccaggcagaacccaaatgcccgccttcttgagactgtgagctaccatgaagttacggcaagagatctctctgtcatggatatgactgctattacactatgccaagaaaacaacatccccatcgtcgtgtttaacttgcaagagcctggaaacattgcaaaggctattgtcggtaagaaggttggtaccttcgtcggatgcaaaagaaatcagaaacgaaatgaaaacacactggttgaagaaagaagattggtcaatgaggtgtgagctccagagctgaaagagttggggctctctctcttgtcttatttagtttatgtatatgcatagaaggttttaggttggattagggttaggtgttggtgctggaattacattagattagctatcaattcttgcagtcgtcatgtttctcttttctttcgaggagaacatctctattatatagagtattaggtttagagggtgtttgaatgcactagaactaatagtcggtgactaaaattagttgagatattcaaacaccccagctaatagttcagctattagctatttttggtaaattagttaatagttaggtagctatttgttagctagctaatttcactgaggccccgtttgtttcgttggaattgaattccattttaataattataatttagacaaaactaattaagtttatatatttaaatatgtaatatatttgtatattatcctaaatcatatgagagtgatagttatatactatatttatgttatagcaaagcaagtagaaaagtgtgctataagttgtgcattggaaaaatagcatgtaaatctatataattaatttctacatctcaccccatgaatttgagataggcttatatgataactttggaaagtggtggaatgtcacattcaaaaaaaatagtatattccattagtaagattccaattcctaaaaatgaaaggaaacaaacgggacctgatagtttttagccaactaactattagttctag

SEQ ID NO: 77689 - DNA, 1803 bp, Zea Mays
atcctctcctgggtcctggcttctccttccactccggagatcgacggctgcttgccgcactcgcgctcgctcccacggccggcaaccatggccgccgccgctgccgcggtgccagccaccttcctctcgggcctcccctctccacggaccccgtctcctgtgctccactcgcccgtacagagagcccatcccgtcgccgctcctctcttcctctccgccaagcgccgcgcctatgcctgcgccgccacggcctccggctccttctattcctccaactcaggttccaaaaggctatatagatggaagagggtattgcttaaagtaagtggagaagctcttgccggcgaccacacagaaaacatcgacccaaagattacaatggctattgcaagagaggttgcttctgtcaccaagctaggtgtagaggttgctattgttgttggcggtggcaatatctttcgtggggcctcttgggctggatgtagtggtcttgaccgctcatctgcagattacatcggcatgttggccactgtgatgaatgctatatttcttcaagcaacaatggagagcatcggaataccgacccgtgtccaaactgccttccgtatgtcagaagttgcagaaccgtacatacgccgaagagctgtaaggcatttagagaaaggaagagttgtcatatttgctgctggaacagggaacccattcttcacgacggatacagctgctgctctccgttgtgccgaaatcaacgcagaggtaatgctgaaagcaacaaatgttgacggtgtgtacgattcagaccccaggcagaacccaaatgcccgccttcttgagactgtgagctaccatgaagttacggcaagagatctctctgtcatggatatgactgctattacactatgccaagaaaacaacatccccatcgtcgtgtttaacttgcaagagcctggaaacattgcaaaggctattgtcggtaagaaggttggtaccttcgtcggatgcaaaagaaatcagaaacgaaatgaaaacacactggttgaagaaagaagattggtcaatgaggtgtgagctccagagctgaaagagttggggctctctctcttgtcttatttagtttatgtatatgcatagaaggttttaggttggattagggttaggtgttggtgctggaattacattagattagctatcaattcttgcagtcgtcatgtttctcttttctttcgaggagaacatctctattatatagagtattaggtttagagggtgtttgaatgcactagaactaatagtcggtgactaaaattagttgagatattcaaacaccccagctaatagttcagctattagctatttttggtaaattagttaatagttaggtagctatttgttagctagctaatttcactgaggccccgtttgtttcgttggaattgaattccattttaataattataatttagacaaaactaattaagtttatatatttaaatatgtaatatatttgtatattatcctaaatcatatgagagtgatagttatatactatatttatgttatagcaaagcaagtagaaaagtgtgctataagttgtgcattggaaaaatagcatgtaaatctatataattaatttctacatctcaccccatgaatttgagataggcttatatgataactttggaaagtggtggaatgtcacattcaaaaaaaatagtatattccattagtaagattccaattcctaaaaatgaaaggaaacaaacgggacctgatagtttttagccaactaactattagttctag

SEQ ID NO: 77690 - DNA, 1869 bp, Zea Mays
atccaagtccattaaaaacgaaaatctctcccctccatcatcctctcctgggtcctggcttctccttccactccggagatcgacggctgcttgccgcactcgcgctcgctcccacggccggcaaccatggccgccgccgctgccgcggtgccagccaccttcctctcgggcctcccctctccacggaccccgtctcctgtgctccactcgcccgtacagagagcccatcccgtcgccgctcctctcttcctctccgccaagcgccgcgcctatgcctgcgccgccacggcctccggctccttctattcctccaactcaggctttgcatttgacgaaggttcttctagttccaaaaggctatatagatggaagagggtattgcttaaagtaagtggagaagctcttgccggcgaccacacagaaaacatcgacccaaagattacaatggctattgcaagagaggttgcttctgtcaccaagctaggtgtagaggttgctattgttgttggcggtggcaatatctttcgtggggcctcttgggctggatgtagtggtcttgaccgctcatctgcagattacatcggcatgttggccactgtgatgaatgctatatttcttcaagcaacaatggagagcatcggaataccgacccgtgtccaaactgccttccgtatgtcagaagttgcagaaccgtacatacgccgaagagctgtaaggcatttagagaaaggaagagttgtcatatttgctgctggaacagggaacccattcttcacgacggatacagctgctgctctccgttgtgccgaaatcaacgcagaggtaatgctgaaagcaacaaatgttgacggtgtgtacgattcagaccccaggcagaacccaaatgcccgccttcttgagactgtgagctaccatgaagttacggcaagagatctctctgtcatggatatgactgctattacactatgccaagaaaacaacatccccatcgtcgtgtttaacttgcaagagcctggaaacattgcaaaggctattgtcggtaagaaggttggtaccttcgtcggatgcaaaagaaatcagaaacgaaatgaaaacacactggttgaagaaagaagattggtcaatgaggtgtgagctccagagctgaaagagttggggctctctctcttgtcttatttagtttatgtatatgcatagaaggttttaggttggattagggttaggtgttggtgctggaattacattagattagctatcaattcttgcagtcgtcatgtttctcttttctttcgaggagaacatctctattatatagagtattaggtttagagggtgtttgaatgcactagaactaatagtcggtgactaaaattagttgagatattcaaacaccccagctaatagttcagctattagctatttttggtaaattagttaatagttaggtagctatttgttagctagctaatttcactgaggccccgtttgtttcgttggaattgaattccattttaataattataatttagacaaaactaattaagtttatatatttaaatatgtaatatatttgtatattatcctaaatcatatgagagtgatagttatatactatatttatgttatagcaaagcaagtagaaaagtgtgctataagttgtgcattggaaaaatagcatgtaaatctatataattaatttctacatctcaccccatgaatttgagataggcttatatgataactttggaaagtggtggaatgtcacattcaaaaaaaatagtatattccattagtaagattccaattcctaaaaatgaaaggaaacaaacgggacctgatagtttttagccaactaactattagttctag

SEQ ID NO: 77691 - DNA, 3329 bp, Zea Mays
ctactagatgctcagtgcttcgacaaatcacatttatttcgttgctccacagagctctacatgttgtggaatacctggccaacccctttttctatgtgtcgctgctggtcataaaacccaatagttacttggagatcacatgcaacaaatatgcacactaaaggggcttcttcagatgccatcagagttagcacctctagtgcccccagcacatcgagccatggttctgcacaagatgactatgattcctctggggatgtgtacgtgtggggtgaagtcatttgtgacaacactgtaagagttggtcctgatacagtaatcaggtctaccgctaaggctgattttctattgcctaagcccctggagtccaagctagttcttgatgtgtaccatgtggattgtggggtcaagcacgctgctttggtcacaaagaatggggaagtgtttacatggggtgaggaatctggaggacgtcttggccatggatcaagggaggactctgtgcaccctcgcctagttgagtcattagctatttgtaatgtggacattgttgcttgtggggagttccacacctgtgctgtgacaacatctggggaactttacacctggggtgatggaacacataatattggacttctaggcaatggtaccgatgtaagccactggattcctaaaagaatttcaggagtactggagggtcatcaagttgcgtatgtttcttgtgggacctggcatacagccttggttacgtcgaggggacagctatttacgtttggtgatggtacattcggagttttaggacatggaaaccgcgagagtttttcgtgtccaagggaggtagaatctttatcggggttgaaaacaattgctgtggcttgtggtgtatggcacacggcagctgttgtagaagttatagtcacccaatccagttcaagtatgtcttctggaaagctcttcacatggggagatggtgacaaacatcggcttggtcatggtgacaaggaaccaaaacttaagcctacgtgtgtggcttcacttattgattatgacttctgcaggatagcatgtggtcatagtcttacggtaggactgacaacatctggacaggttctgagcatgggtaatactgtctatggtcagcttgggaatcctcgttcagatggtaaacttccatgcttaattgaagatatcatgggtgaacatgttgtccaagttgcatgtggttcctaccatgttgcagtcttaacaaataagagtgaggtttttacatggggaaagggggccaatggaagactgggtcatggagacgtagaggatagaaaaatacctacactggttgaatcattgagagacagggctgttaggcacatagcttgtggttcaaacttcacttcagctatctgtcaacataagtgggtttctggagctgagcagtcgcaatgtgcctcatgtcggcaaccatttgggttcaccaggaagaggcataattgccataattgtggtcttgtccattgtaatgcgtgcacctcacataaggtcctgagagcagcattggctcctaatcctgcaaaaccataccgtgtttgtgattcatgttttatgaaattgaacagtgcagcatactcaagtacaattaataagaagaaagaggttgtgcctcgccattctggtgaaagcaaccatgatgctaaattagctagagcaattgtgcccagcaatttggatatgattagaagtttggacagcaaggcagcaaaacaagggaagaaaactgatgcactgtcattccttcggactccccaaatgagttcgcttcttcagctaagagatatcactttatctggtggaattgatctgaacaagtcagttccaagagcagttcgcacatcagtccgatcattgaactcatctagggctgtttcccctttctctcgcaagcctagtccaccacgctcaaccacaccagtcccaacaactcatggtctttcaattgctaaaactgctgctgatagtcttgcaaaaactaatgagatgttaagtcaagaggttgaaagactccgtgcacaggttgacaatctaaggcgccgttgcgagcttcaagaacttgagttgcagaaatcagcaaagaaagtacaagaagccatgtcaatggtttcagaggaatccgcaaaatctaaagctgctaaggaagtaataaagtccttaacatcacagctcaaggatatggctgaaagactacctccagatcagggagcctatgatggtagcgaagcaaaacaagcacatgttccaaatggcattgagatgtatgcttctatttacactagcatgaatggtattcatcagccacgaaatgagtctgtcagtgccctaagcacgcctggcctgcatattggacgatcatcgcacccaaatggaatctcaaatcatcatcaatcaccaggaagtattactgaaaacagtgaagtgagtgctcacacccatagggtttcaggtcctcccgacgttgaaaatccgaatcgaaggggacatagcagtagtgacgagatgctcagtgcaagtagtagagcagacgatagtagcagcagggacgctagatcccttttgaatggtgaggatggttacaaatctcggagtgcagtatctttgcccagcaaccaagttcaggctgagtggattgagcagtatgaaccaggtgtatacataacactgacaactcttcgtgatgggacccgagatctaaagcgtgtacgcttcagtcgaaggcgttttggggagcatcaggcggagagctggtggaacgagaaccgcgacaaggtctatgagaagtacaatgtcgatgacccctcctccgtaccacactaccctgcagtagtcatcagaaaacttcaagtgggagcgcagagccaaagtcagagtggcaagggtgccgaggaattcttttttgtccgtgtaatgtcgataattcttgttactgttgttatgaaattgagtcagtgggacttgttaggttgtcttgttcagatgtaatgcacatagagttgtggaacaccgaaacatgttgtagggggtggggcggtagcagagggtggacagtaacagtagcgcgcccagccctctacggcctacccttttgaaagccttggttgtagccaatgcagctagctgtaaagaagtggcattttttttttgtctccaaaaggtgtcacgcttcacattttggctatattgcatttgatgacattcaaaatattcggatccagtagcacctcatattcccaccccacatcatctgagttcccctcttcaaactagtggttgtagatgct

SEQ ID NO: 77692 - DNA, 3576 bp, Zea Mays
cgccctttgtctcgacgccgctgccgccgcaaagactcgcgattcgcgagagaagcggccgcagcagccgagcttctctcgcccccgccgctcctctcccactccaccaccgcgcttcagattccacaggtgagaggcaaaaggcaagagccgaagaagcgagccgaggcgccaccgctctcccgcctgcttcctccgccggcccggccgtcccggccggcgagcgagagccaacgaactgcgggccgaagcgaactgccggggccaccgtggggcggagatccgcaccggacctcccaccggttcctggttgtggaatacctggccaacccctttttctatgtgtcgctgctggtcataaaacccaatagttacttggagatcacatgcaacaaatatgcacactaaaggggcttcttcagatgccatcagagttagcacctctagtgcccccagcacatcgagccatggttctgcacaagatgactatgattcctctggggatgtgtacgtgtggggtgaagtcatttgtgacaacactgtaagagttggtcctgatacagtaatcaggtctaccgctaaggctgattttctattgcctaagcccctggagtccaagctagttcttgatgtgtaccatgtggattgtggggtcaagcacgctgctttggtcacaaagaatggggaagtgtttacatggggtgaggaatctggaggacgtcttggccatggatcaagggaggactctgtgcaccctcgcctagttgagtcattagctatttgtaatgtggacattgttgcttgtggggagttccacacctgtgctgtgacaacatctggggaactttacacctggggtgatggaacacataatattggacttctaggcaatggtaccgatgtaagccactggattcctaaaagaatttcaggagtactggagggtcatcaagttgcgtatgtttcttgtgggacctggcatacagccttggttacgtcgaggggacagctatttacgtttggtgatggtacattcggagttttaggacatggaaaccgcgagagtttttcgtgtccaagggaggtagaatctttatcggggttgaaaacaattgctgtggcttgtggtgtatggcacacggcagctgttgtagaagttatagtcacccaatccagttcaagtatgtcttctggaaagctcttcacatggggagatggtgacaaacatcggcttggtcatggtgacaaggaaccaaaacttaagcctacgtgtgtggcttcacttattgattatgacttctgcaggatagcatgtggtcatagtcttacggtaggactgacaacatctggacaggttctgagcatgggtaatactgtctatggtcagcttgggaatcctcgttcagatggtaaacttccatgcttaattgaagatatcatgggtgaacatgttgtccaagttgcatgtggttcctaccatgttgcagtcttaacaaataagagtgaggtttttacatggggaaagggggccaatggaagactgggtcatggagacgtagaggatagaaaaatacctacactggttgaatcattgagagacagggctgttaggcacatagcttgtggttcaaacttcacttcagctatctgtcaacataagtgggtttctggagctgagcagtcgcaatgtgcctcatgtcggcaaccatttgggttcaccaggaagaggcataattgccataattgtggtcttgtccattgtaatgcgtgcacctcacataaggtcctgagagcagcattggctcctaatcctgcaaaaccataccgtgtttgtgattcatgttttatgaaattgaacagtgcagcatactcaagtacaattaataagaagaaagaggttgtgcctcgccattctggtgaaagcaaccatgatgctaaattagctagagcaattgtgcccagcaatttggatatgattagaagtttggacagcaaggcagcaaaacaagggaagaaaactgatgcactgtcattccttcggactccccaaatgagttcgcttcttcagctaagagatatcactttatctggtggaattgatctgaacaagtcagttccaagagcagttcgcacatcagtccgatcattgaactcatctagggctgtttcccctttctctcgcaagcctagtccaccacgctcaaccacaccagtcccaacaactcatggtctttcaattgctaaaactgctgctgatagtcttgcaaaaactaatgagatgttaagtcaagaggttgaaagactccgtgcacaggttgacaatctaaggcgccgttgcgagcttcaagaacttgagttgcagaaatcagcaaagaaagtacaagaagccatgtcaatggtttcagaggaatccgcaaaatctaaagctgctaaggaagtaataaagtccttaacatcacagctcaaggatatggctgaaagactacctccagatcagggagcctatgatggtagcgaagcaaaacaagcacatgttccaaatggcattgagatgtatgcttctatttacactagcatgaatggtattcatcagccacgaaatgagtctgtcagtgccctaagcacgcctggcctgcatattggacgatcatcgcacccaaatggaatctcaaatcatcatcaatcaccaggaagtattactgaaaacagtgaagtgagtgctcacacccatagggtttcaggtcctcccgacgttgaaaatccgaatcgaaggggacatagcagtagtgacgagatgctcagtgcaagtagtagagcagacgatagtagcagcagggacgctagatcccttttgaatggtgaggatggttacaaatctcggagtgcagtatctttgcccagcaaccaagttcaggctgagtggattgagcagtatgaaccaggtgtatacataacactgacaactcttcgtgatgggacccgagatctaaagcgtgtacgcttcagtcgaaggcgttttggggagcatcaggcggagagctggtggaacgagaaccgcgacaaggtctatgagaagtacaatgtcgatgacccctcctccgtaccacactaccctgcagtagtcatcagaaaacttcaagtgggagcgcagagccaaagtcagagtggcaagggtgccgaggaattcttttttgtccgtgtaatgtcgataattcttgttactgttgttatgaaattgagtcagtgggacttgttaggttgtcttgttcagatgtaatgcacatagagttgtggaacaccgaaacatgttgtagggggtggggcggtagcagagggtggacagtaacagtagcgcgcccagccctctacggcctacccttttgaaagccttggttgtagccaatgcagctagctgtaaagaagtggcattttttttttgtctccaaaaggtgtcacgcttcacattttggctatattgcatttgatgacattcaaaatattcggatccagtagcacctcatattcccaccccacatcatctgagttcccctcttcaaactagtggttgtagatgct

SEQ ID NO: 77693 - DNA, 3463 bp, Zea Mays
aaaaagagcagggcaggagaggactgagagcgaggccgaggaccaagaagaccgaccaagcgtgaagcgccctttgtctcgacgccgctgccgccgcaaagactcgcgattcgcgagagaagcggccgcagcagccgagcttctctcgcccccgccgctcctctcccactccaccaccgcgcttcagattccacaggttgtggaatacctggccaacccctttttctatgtgtcgctgctggtcataaaacccaatagttacttggagatcacatgcaacaaatatgcacactaaaggggcttcttcagatgccatcagagttagcacctctagtgcccccagcacatcgagccatggttctgcacaagatgactatgattcctctggggatgtgtacgtgtggggtgaagtcatttgtgacaacactgtaagagttggtcctgatacagtaatcaggtctaccgctaaggctgattttctattgcctaagcccctggagtccaagctagttcttgatgtgtaccatgtggattgtggggtcaagcacgctgctttggtcacaaagaatggggaagtgtttacatggggtgaggaatctggaggacgtcttggccatggatcaagggaggactctgtgcaccctcgcctagttgagtcattagctatttgtaatgtggacattgttgcttgtggggagttccacacctgtgctgtgacaacatctggggaactttacacctggggtgatggaacacataatattggacttctaggcaatggtaccgatgtaagccactggattcctaaaagaatttcaggagtactggagggtcatcaagttgcgtatgtttcttgtgggacctggcatacagccttggttacgtcgaggggacagctatttacgtttggtgatggtacattcggagttttaggacatggaaaccgcgagagtttttcgtgtccaagggaggtagaatctttatcggggttgaaaacaattgctgtggcttgtggtgtatggcacacggcagctgttgtagaagttatagtcacccaatccagttcaagtatgtcttctggaaagctcttcacatggggagatggtgacaaacatcggcttggtcatggtgacaaggaaccaaaacttaagcctacgtgtgtggcttcacttattgattatgacttctgcaggatagcatgtggtcatagtcttacggtaggactgacaacatctggacaggttctgagcatgggtaatactgtctatggtcagcttgggaatcctcgttcagatggtaaacttccatgcttaattgaagatatcatgggtgaacatgttgtccaagttgcatgtggttcctaccatgttgcagtcttaacaaataagagtgaggtttttacatggggaaagggggccaatggaagactgggtcatggagacgtagaggatagaaaaatacctacactggttgaatcattgagagacagggctgttaggcacatagcttgtggttcaaacttcacttcagctatctgtcaacataagtgggtttctggagctgagcagtcgcaatgtgcctcatgtcggcaaccatttgggttcaccaggaagaggcataattgccataattgtggtcttgtccattgtaatgcgtgcacctcacataaggtcctgagagcagcattggctcctaatcctgcaaaaccataccgtgtttgtgattcatgttttatgaaattgaacagtgcagcatactcaagtacaattaataagaagaaagaggttgtgcctcgccattctggtgaaagcaaccatgatgctaaattagctagagcaattgtgcccagcaatttggatatgattagaagtttggacagcaaggcagcaaaacaagggaagaaaactgatgcactgtcattccttcggactccccaaatgagttcgcttcttcagctaagagatatcactttatctggtggaattgatctgaacaagtcagttccaagagcagttcgcacatcagtccgatcattgaactcatctagggctgtttcccctttctctcgcaagcctagtccaccacgctcaaccacaccagtcccaacaactcatggtctttcaattgctaaaactgctgctgatagtcttgcaaaaactaatgagatgttaagtcaagaggttgaaagactccgtgcacaggttgacaatctaaggcgccgttgcgagcttcaagaacttgagttgcagaaatcagcaaagaaagtacaagaagccatgtcaatggtttcagaggaatccgcaaaatctaaagctgctaaggaagtaataaagtccttaacatcacagctcaaggatatggctgaaagactacctccagatcagggagcctatgatggtagcgaagcaaaacaagcacatgttccaaatggcattgagatgtatgcttctatttacactagcatgaatggtattcatcagccacgaaatgagtctgtcagtgccctaagcacgcctggcctgcatattggacgatcatcgcacccaaatggaatctcaaatcatcatcaatcaccaggaagtattactgaaaacagtgaagtgagtgctcacacccatagggtttcaggtcctcccgacgttgaaaatccgaatcgaaggggacatagcagtagtgacgagatgctcagtgcaagtagtagagcagacgatagtagcagcagggacgctagatcccttttgaatggtgaggatggttacaaatctcggagtgcagtatctttgcccagcaaccaagttcaggctgagtggattgagcagtatgaaccaggtgtatacataacactgacaactcttcgtgatgggacccgagatctaaagcgtgtacgcttcagtcgaaggcgttttggggagcatcaggcggagagctggtggaacgagaaccgcgacaaggtctatgagaagtacaatgtcgatgacccctcctccgtaccacactaccctgcagtagtcatcagaaaacttcaagtgggagcgcagagccaaagtcagagtggcaagggtgccgaggaattcttttttgtccgtgtaatgtcgataattcttgttactgttgttatgaaattgagtcagtgggacttgttaggttgtcttgttcagatgtaatgcacatagagttgtggaacaccgaaacatgttgtagggggtggggcggtagcagagggtggacagtaacagtagcgcgcccagccctctacggcctacccttttgaaagccttggttgtagccaatgcagctagctgtaaagaagtggcattttttttttgtctccaaaaggtgtcacgcttcacattttggctatattgcatttgatgacattcaaaatattcggatccagtagcacctcatattcccaccccacatcatctgagttcccctcttcaaactagtggttgtagatgct

SEQ ID NO: 77694 - DNA, 1152 bp, Zea Mays
gaagagatccgtgtggccaaggtcttcctctcctatatattgactcgccgccacacagatagggttttctctccacgcagcgcgctcctcgatccccaacaggcaacagcccagccgctgtcgccctcgttccgtagtacggcgccgccagatcgtcagtcaccatgatcatctccaagaagaaccgccgcgagatctgcaaatacctcttccatgagggggtcttgtacgccaagaaggactacaacctggccaagcaccccaagcttgatgtgcccaacttggaggtgattaagctcatgcagagcttcaagtcgaaggagtatgtgagggaaaccttctcatggcagtactactactggtacctcaccaacgatggcattgagcacctccgcagcttcctcaacctgccatcagaggttgtgcctaataccctcaagaagtcttccaagcccccgtctcgccccttcggctctggcccacctggtgaccgccccaggggccctcctcgttatgaaggtgacaggcctaggtttggtgatagggatggttacagaggaggtccacgtggcgctccaggtgactttggtggtgataagggtggtgctcctgcagatttccaaccatcttttaggggtagcagacctggctttggccgcggtggcggcggtgctttcggtgctggtggatcttccatggagtgatgtgtcaacatgagctagcataacattcgtctttgaactatgagaacaatgagattttgttttgttttaccgagctgttgccgtgggttgacatggttttgtgatcgtttttgtttagatgaaattattgaaatcaagcagcgagttatcagtctatcgcgtgctgaattccttgtgctttctggtctatggttcgtgttgcaagttataacttttgcatggagaccaaaaagttacgccccgttggtgtgatgtcctcattaccttccaatgcagtgcaagaatttgcaacagccaacgttatgaattatatatatgaacatccataggaaaaaaatccatctacttttaaggcatgcatttattgcatgaatttgcaacagccaatgttatgctgaatttgttggatcaactagaaatcaaaatatcccatctacttttaaggcac

SEQ ID NO: 77695 - DNA, 1237 bp, Zea Mays
aaaaagggcccataacgaagagatccgtgtggccaaggtcttcctctcctatatattgactcgccgccacacagatagggttttctctccacgcagcgcgctcctcgatccccaacaggcaacagcccagccgctgtcgccctcgttccgtagtacggcgccgccagatcgtcagtcaccatgatcatctccaagaagaaccgccgcgagatctgcaaatacctcttccatgagggggtcttgtacgccaagaaggactacaacctggccaagcaccccaagcttgatgtgcccaacttggaggtgattaagctcatgcagagcttcaagtcgaaggagtatgtgagggaaaccttctcatggcagtactactactggtacctcaccaacgatggcattgagcacctccgcagcttcctcaacctgccatcagaggttgtgcctaataccctcaagaagtcttccaagcccccgtctcgccccttcggctctggcccacctggtgaccgccccaggggccctcctcgttatgaaggtgacaggcctaggtttggtgatagggatggttacagaggaggtccacgtggcgctccaggtgactttggtggtgataagggtggtgctcctgcagatttccaaccatcttttaggggtagcagacctggctttggccgcggtggcggcggtgctttcggtgctggtggatcttccatggagtgatgtgtcaacatgagctagcataacattcgtctttgaactatgagaacaatgagattttgttttgttttaccgagctgttgccgtgggttgacatggttttgtgatcgtttttgtttagatgaaattattgaaatcaagcagcgagttatcagtctatcgcgtgctgaattccttgtgctttctggtctatggttcgtgttgcaagttataacttttgcatggagaccaaaaagtttcaagaaaaaaatttgtcaagacacacgataagtatggcaacgaagagctgacaaaaaaacattcctcctagccccgttggtgtgatgtcctcattaccttccaatgcagtgcaagaatttgcaacagccaacgttatgaattatatatatgaacatccataggaaaaaaatccatctacttttaaggcatgcatttattgcatgaatttgcaacagccaatgttatgctgaatttgttggatcaactagaaatcaaaatatcccatctacttttaaggcac

SEQ ID NO: 77696 - DNA, 1508 bp, Zea Mays
gtggatgtctcttccagagtgatggatcctttaggccttgctgtgtcgacatcgtcttgcctcccgaaatcacatggcaggaagtcgagaccatcaagcagcatggcaaggacttcagcttcgttagatgctggcagtagcaatgatgttggccacctctcatcaaccctggagaagctgtgggtctgggaaaaaaagctctatcaggaagttaaggatgaggagaagctacggatgaagtatgagaagtattacagaaggctgaaatccatggacgaacgaggcgctgaatcaagtacaatcgactccacccgtttgtccgcaagacttgtggagtccaagatcagcatcaacattagaaccgcaaacgccttctcgttaaaaatacaggagattcgagacgaagagctttaccctcaactggttgatctcatccagaggttcaggagtttgtggaaagatattatggaatgccatgagaagcagctattagccatacaggacagtaggattcactggatgaaggcgatgactgtaagtgaatccggcgttgtgtcagaggcctcacgggatttggaacgggagctgacgaaatggtaccgttgcttcaacaagtggatgatctcgcaaaggtcctgtgccgaggcgctgaacgaatggctgaagaaatggctccctgagtcgcaggaggaggttacagcagacggggctcctcctttctccccgggcaggcttggcgcgccacccgtattcgtcgtctcaaacgactggttccaagcgatcgagatggtctccaggactgatgtgctgaaagcgatcgaccagttctctaaggtcgtgcgtagattcaagaagagccaggaagacgagcggcggcagaggcggagagccgaccacgcctccaaagactacgacagaaagcgcaaggatctggaggaagagctcgggctgagcaccatggagagtcctcgctacagccatgacaaccgtgtggtggacctggagaagctgaggaaaagaagagacgaggagagcaccaggcatgacagggtcctgaatcatgcccacgtcacggcttcagctactctgccagtcggtttggtccctgtgctgcaacagatcaccagcttctttcagaggaaccaacgggtctacatgcagattagaactcaacaaggcgcctgatgatgatttctagttagcagtgttgcattcttttgtatatagaatttacaagatggggttatagactgctggagttttacataagtagctactaattcatggtaggtataggtgttagactgtgtgtgtgggccggtaccgctgttgggctgtcagtccattaggaggttagggttctgtgtctatatatgtaatcaccacctctatgcaatatcaatcaagagttccattctcctacaataggaagggctactaattcatggagtgtttcattattcatgtattagttgggctagcttgggttagctctaacccacccttac

SEQ ID NO: 77697 - DNA, 3382 bp, Zea Mays
agaaaatgagagaaaaatagagggcgaaagagcaaacggggaagacatcgaaaccgaaggcaaaagctacaacgactccttccattcttgtctctccgcctccatctcgccccgcaacgcccgcatttggtgccgcctctctccacgcgctttcccaatcacggcgccgctttcaatcaccgcctcgccgtgcaccgccacaccttcccgtccccggacccgacgcagcgtgccctgccgccgtccgtcccccttcgtataatggacgccgacgagccaccggagcccgctgtatccgcacgcctctgccgccgattccggaggtaggatttcgccctcccgcgcggcaatgggctgcacgacctcccacgacgccgtcgccgccgctgtcacctcctccagttcccggccccgtgcgcgccgcgcgtccgcgtccgcgtccgggccctcaccgcggcgcggagaccccgccgcgctgtgccgcgagcgcgtggcgctcatccgcgccgcggccgaccgccggtacgcgctcgccgccgcgcacgctgcctacttccgctcgctcgccgctgtcggcgacgcgctgcggcgcttcgtggcgtccgcgctcgcgcccggcacgcccgggtcctcgccggtgctcacgctcccgccttcccccgccaagccggtcgctgccgcgtccgccagcctcccgccgtcgccgtcgtccaccgtctcgccgctctcgcactccgtctccgacgacgacctccatctccatgaccttgacgacaccccgtctccgtcgacgtccacgagacactaccaccacttcatgagaagatcgcccaccgtgcccaccgtggtgtacgaggaccccaacgcccagacacagtacaccacagccgagaccagctacggatacgcctacggcgtcggcgacggctacgggcctgcgtacccgtacggtccctatggtgaggtagttgcaggagagactccggaggcggcaccgagatcgcctgggccgccgccttcgcccccgaccgcggaggcctcgccatgggaattcttcgacccgttcacgcagtacgaccagttcatggaggactacactcgtgggaatctgccaaccaacagccccaactacgccgagctgaggaggatggaaggcatcccggagcttgaggacgaggccgagttggtggggaatgcagaggcatcaaagccatcgacttctggggtttctgatcagaacaagaaagggaagggaccaattcaagacaatgccgcttccaacggcgatttttctggtgacagcaagctgcagaagaaagcgacttcaaaggccgattcttctggtggaaagctgcagagggatgccacttcaatcagcgattctcctggtggcaagctgcagaggaagggatcggaaccacctcctggtggcaagttacaggggaagggatcggagccaactactgacgccaaaggcgaggcggggaaaccggtgtccaggaatgattccgggccaagcaatgtcagctcgaaaaacaaagaagggaggaagaagaacacaatgagcctaaagggcacagttagcagtgacattgatggcagcagcaccagtgggaagaagaaaggtgtggccttcgaaagggaacgatccatcagagaagcagaaggatgtggggagatccatggccagtcggtggtgagcagcgacccattctcaccatcgcatcatgggacgagggatgtcagagaggcgattaatgaggtcaatgagctgttcgacgaggcggcaaactgcagcacagatgtctcaaggctgctggaggtgggcaaaatgcctcgtagcgataccccgagagttctcagatatgtctcttccagagtgatggatcctttaggccttgctgtgtcgacatcgtcttgcctcccgaaatcacatggcaggaagtcgagaccatcaagcagcatggcaaggacttcagcttcgttagatgctggcagtagcaatgatgttggccacctctcatcaaccctggagaagctgtgggtctgggaaaaaaagctctatcaggaagttaaggtggttgttctaggatgaggagaagctacggatgaagtatgagaagtattacagaaggctgaaatccatggacgaacgaggcgctgaatcaagtacaatcgactccacccgtttgtccgcaagacttgtggagtccaagatcagcatcaacattagaaccgcaaacgccttctcgttaaaaatacaggagattcgagacgaagagctttaccctcaactggttgatctcatccagaggttcaggagtttgtggaaagatattatggaatgccatgagaagcagctattagccatacaggacagtaggattcactggatgaaggcgatgactgtaagtgaatccggcgttgtgtcagaggcctcacgggatttggaacgggagctgacgaaatggtaccgttgcttcaacaagtggatgatctcgcaaaggtcctgtgccgaggcgctgaacgaatggctgaagaaatggctccctgagtcgcaggaggaggttacagcagacggggctcctcctttctccccgggcaggcttggcgcgccacccgtattcgtcgtctcaaacgactggttccaagcgatcgagatggtctccaggactgatgtgctgaaagcgatcgaccagttctctaaggtcgtgcgtagattcaagaagagccaggaagacgagcggcggcagaggcggagagccgaccacgcctccaaagactacgacagaaagcgcaaggatctggaggaagagctcgggctgagcaccatggagagtcctcgctacagccatgacaaccgtgtggtggacctggagaagctgaggaaaagaagagacgaggagagcaccaggcatgacagggtcctgaatcatgcccacgtcacggcttcagctactctgccagtcggtttggtccctgtgctgcaacagatcaccagcttctttcagaggaaccaacgggtctacatgcagattagaactcaacaaggcgcctgatgatgatttctagttagcagtgttgcattcttttgtatatagaatttacaagatggggttatagactgctggagttttacataagtagctactaattcatggtaggtataggtgttagactgtgtgtgtgggccggtaccgctgttgggctgtcagtccattaggaggttagggttctgtgtctatatatgtaatcaccacctctatgcaatatcaatcaagagttccattctcctacaataggaagggctactaattcatggagtgtttcattattcatgtattagttgggctagcttgggttagctctaacccacccttac

SEQ ID NO: 77698 - DNA, 858 bp, Zea Mays
gccaaaggaggccttacacttctcgaggatatctgtctggttcaatagaaccacaatactcacatgagctaaacagtgcaactgatctctatttgcttgttgattggttacatcaattataagttttggatttctttgtaaacttagtattaccagtgaagaaatgttctaattagaggttgtttgggtttaattggtcttctgccttgtcatcagaaaaaagatctgctaccctcaccggtttaactgcattataaatatgttgtgcggtcggcaattggcttcaccatcttctccgttgttctggtcacctgggccacgaccttcgtcgtcggaggcgagcggttatttgggccagtgtggaatgatcttgtgatgtacaatgtcgccgacaagcttggcatctctggattcatgggatgagcctgcgatgtctccctcgcttcagctgggctcgcttcacccaagcgtggaacgatctattccatccatctccctagggattaccactgtctcatgtactttattgttgttattattattgacagactgactggtcagaacaatgtctagcatggctagctcatgttatagaaggaatatggatcgatgaaaacgatgataaatggaactcaatctgatggacaaatttgtgtgttcaaaaaaaccaaaatttgcggtgagcgtggatcgaacacgcgaccttcagatcttcagtctgacgctctcccaactgagctatccccgcttacatttttttcttttcatttactaaaatatactatctatgtcagtacttagttgcacctaaattgacttctgtttgatagaacgatcgtgtgcctgcaagaccaatcc

SEQ ID NO: 77699 - DNA, 598 bp, Zea Mays
gtagctgattcatccccagttggatcaatcttcggacaagctcgactacgagaggatatgatggccggccggcggcctcgcagggcaccgtagcgccgccgccgaattcatgcttcatttcgcatcaggagtcggccaagcaggacacacctcttgttgttgacttgttgtaggtatatacgtacatgccagtattgccagaacagtcgacagaggcaatctgagacctcagctgctggaataatcaggaagtagatcgagagcgacgtacgatgacgagattcataattgctgctgcacatcacttctttatgttatttaaactcacatttcataattaatactaataatatattgtctccgttcttgaatatttgtctcgtcgatagtttattttcgaataaaaaacgacaaaataaaaaaatgatagtgtaccgattatgaagcagccacaaacaaaggtttataatatacctttccagcatttatattatgggtcaaagtgtatcatcacgcacacgcctctgtctacactccgcagctagccactgctgaaataaacaatgtacaattagtcagggagggaaacaaggttgag

SEQ ID NO: 77700 - DNA, 2029 bp, Zea Mays
aagcagcaggagattcctctctgttttccacccgcaagggaactttggtgaagtggtgaatgtggagctatcaatggaccgaatggttaaccttcctcgtggctatggatatattgaattcaagaagagagctgatgctgagaaggctctactttacatggatggtggtcaaattgatggaaatgttgttaagttgaggttcactcttcaaccacgccaaagggctgtatcacctatgaaagctccaccccctcctccaaaacgagatgttgctcagattgaaaaaggtcttagcagtgctgaaaaggatgcccagcagcgtcctagggaatgaagccagcttcaccaccgcggaaacgatctccaaatcgaagggctgaatcgcccaggcgtccacctgacccatcacctaggcgtcgtcctgattctccgcctattcgtcgccgaccagatccttctcctgtcaggcgtggtggcacacctcctcgcaggagaccactgtctccagttagaaggcgttctccttcaccacctaggaggcataggtcaccgatgcgtccttcacctaggaggggacgtggcagtccttcaccacgcaggcgctcccctgggcctcttaggcggcgctcgccacctccaaggcgtttgaggagcccaccaagaaggccaccacctccacgtcgctatagtcgatctcctcctcgccgaccccttcgctccagatcgatttctccaagaaggggacgagggcctctcttgaggcgtggtaggtcaggctcatcatattctcgatcacctactccaccgccaagaaaggggccaagaagggtatcaaggagtcgcagccctagaaggcctcccagaggaagaagcatctctagtgacagccgaagcagcagttctccttcccctagacgtggcaggtagaaggaacccgttgcattgtgtatccggcaggtaaagccttttatcccctgactcagatcaagtgttggtttgaggagaagataaaagaaccctacggcaatgcttccagtggatctgcttaacatgcctggtgggctcactggcttgtgatttgtacccgagacagaattatctgccatgtgacatctggctcatgtacttgattgtaccccaagtatgttgaacttgtttccgcacaggagtctggatcttttttttttgcattaaaccattgtgctacttggtctaaagcgttactgggtctttcgtttcaggagtctggatctttttttttttgcattaaatcattgtgctacttggtctaaagccttactgggtctttcgtttcaggtgttgaaaggtttcatctactttgttggaaggagtttttcaacattcccattgtattatgattccgttgatcaagcaatttgtgtatgcgcaggcgcacgcacagcgtacaccttttctaatctgaaaagagttgtcattttgccaaaccccgccctgcttgttgccctgtcccatcagtcattggtttactgacgcgacgcaacgccgtttcctacaacatcctcatcgccgcctactctcgcgcgggcctacctggcgacattcgcgcgctaggaacggcaatgtagggtattgggcgtacccacgtgacggcagaaaaacatattgatgttcttctaagggctcagtccctttgggaccaagggtaatgaatggaattttgaggggatcaaaatcccttactatttaaaattgaatattgagggattatggtcctcttaatcccgttcattacacatacacttgctgtcgaagaagtggaatgttgggacttatgactcatctatttgtaaaattgtctcaaatagttaaatgacacaagattatatttgacatttctatgctcgtaattgaaggagagtaaaattggtgtaactggatatatgtactgccttgccttgtgaaaggatcacgatgtacaaatggaatggagggacaaattagactttaattttttttgtgacaattaaattctaataattagtctaat

SEQ ID NO: 77701 - DNA, 1902 bp, Zea Mays
aagaaatccaaacctaagctttctttcttgataacgaagcagcaggagattcctctctgttttccacccgcaagggaactttggtgaagtggtgaatgtggagctatcaatggaccgaatggttaaccttcctcgtggctatggatatattgaattcaagaagagagctgatgctgagaaggctctactttacatggatggtggtcaaattgatggaaatgttgttaagttgaggttcactcttcaaccacgccaaagggctgtatcacctatgaaagctccaccccctcctccaaaacgagatgttgctcagattgaaaaaggtcttagcagtgctgaaaaggatgcccagcagcgtcctagggaatcatctccacgaaggaagccagcttcaccaccgcggaaacgatctccaaatcgaagggctgaatcgcccaggcgtccacctgacccatcacctaggcgtcgtcctgattctccgcctattcgtcgccgaccagatccttctcctgtcaggcgtggtggcacacctcctcgcaggagaccactgtctccagttagaaggcgttctccttcaccacctaggaggcataggtcaccgatgcgtccttcacctaggaggggacgtggcagtccttcaccacgcaggcgctcccctgggcctcttaggcggcgctcgccacctccaaggcgtttgaggagcccaccaagaaggccaccacctccacgtcgctatagtcgatctcctcctcgccgaccccttcgctccagatcgatttctccaagaaggggacgagggcctctcttgaggcgtggtaggtcaggctcatcatattctcgatcacctactccaccgccaagaaaggggccaagaagggtatcaaggagtcgcagccctagaaggcctcccagaggaagaagcatctctagtgacagccgaagcagcagttctccttcccctagacgtggcaggtagaaggaacccgttgcattgtgtatccggcaggtaaagccttttatcccctgactcagatcaagtgttggtttgaggagaagataaaagaaccctacggcaatgcttccagtggatctgcttaacatgcctggtgggctcactggcttgtgatttgtacccgagacagaattatctgccatgtgacatctggctcatgtacttgattgtaccccaagtgttgaaaggtttcatctactttgttggaaggagtttttcaacattcccattgtattatgattccgttgatcaagcaatttgtgtatgcgcaggcgcacgcacagcgtacaccttttctaatctgaaaagagttgtcattttgccaaaccccgccctgcttgttgccctgtcccatcagtcattggtttactgacgcgacgcaacgccgtttcctacaacatcctcatcgccgcctactctcgcgcgggcctacctggcgacattcgcgcgctaggaacggcaatgtagggtattgggcgtacccacgtgacggcagaaaaacatattgatgttcttctaagggctcagtccctttgggaccaagggtaatgaatggaattttgaggggatcaaaatcccttactatttaaaattgaatattgagggattatggtcctcttaatcccgttcattacacatacacttgctgtcgaagaagtggaatgttgggacttatgactcatctatttgtaaaattgtctcaaatagttaaatgacacaagattatatttgacatttctatgctcgtaattgaaggagagtaaaattggtgtaactggatatatgtactgccttgccttgtgaaaggatcacgatgtacaaatggaatggagggacaaattagactttaattttttttgtgacaattaaattctaataattagtctaat

SEQ ID NO: 77702 - DNA, 1734 bp, Zea Mays
gtcacaagtgaaggagaagaaatccaaacctaagctttctttcttgataacgaagcagcaggagattcctctctgttttccacccgcaagggaactttggtgaagtggtgaatgtggagctatcaatggaccgaatggttaaccttcctcgtggctatggatatattgaattcaagaagagagctgatgctgagaaggctctactttacatggatggtggtcaaattgatggaaatgttgttaagttgaggttcactcttcaaccacgccaaagggctgtatcacctatgaaagctccaccccctcctccaaaacgagatgttgctcagattgaaaaaggtcttagcagtgctgaaaaggatgcccagcagcgtcctagggaatcatctccacgaaggaagccagcttcaccaccgcggaaacgatctccaaatcgaagggctgaatcgcccaggcgtccacctgacccatcacctaggcgtcgtcctgattctccgcctattcgtcgccgaccagatccttctcctgtcaggcgtggtggcacacctcctcgcaggagaccactgtctccagttagaaggcgttctccttcaccacctaggaggcataggtcaccgatgcgtccttcacctaggaggggacgtggcagtccttcaccacgcaggcgctcccctgggcctcttaggcggcgctcgccacctccaaggcgtttgaggagcccaccaagaaggccaccacctccacgtcgctatagtcgatctcctcctcgccgaccccttcgctccagatcgatttctccaagaaggggacgagggcctctcttgaggcgtggtaggtcaggctcatcatattctcgatcacctactccaccgccaagaaaggggccaagaagggtatcaaggagtcgcagccctagaaggcctcccagaggaagaagcatctctagtgacagccgaagcagcagttctccttcccctagacgtggcaggtagaaggaacccgttgcattgtgtatccggcaggtgttgaaaggtttcatctactttgttggaaggagtttttcaacattcccattgtattatgattccgttgatcaagcaatttgtgtatgcgcaggcgcacgcacagcgtacaccttttctaatctgaaaagagttgtcattttgccaaaccccgccctgcttgttgccctgtcccatcagtcattggtttactgacgcgacgcaacgccgtttcctacaacatcctcatcgccgcctactctcgcgcgggcctacctggcgacattcgcgcgctaggaacggcaatgtagggtattgggcgtacccacgtgacggcagaaaaacatattgatgttcttctaagggctcagtccctttgggaccaagggtaatgaatggaattttgaggggatcaaaatcccttactatttaaaattgaatattgagggattatggtcctcttaatcccgttcattacacatacacttgctgtcgaagaagtggaatgttgggacttatgactcatctatttgtaaaattgtctcaaatagttaaatgacacaagattatatttgacatttctatgctcgtaattgaaggagagtaaaattggtgtaactggatatatgtactgccttgccttgtgaaaggatcacgatgtacaaatggaatggagggacaaattagactttaattttttttgtgacaattaaattctaataattagtctaat

SEQ ID NO: 77703 - DNA, 2086 bp, Zea Mays
tctcttccgttccgtccttccccgaactcgctcaaaaccctagccaaacgccacagggtcgccgccggtcgcccggccgcatccgctgccgccgctgccgccggggacgatggcgaagcctcggcgtggccgctccgcgtctcgctccacctcgggatcttcctcccgctcgccgtcccactccgtctcctccggctccgtctcgtcccgctcccgctccttctcgtcgtcgtcgtcccagtcccggagtcgctcccctcctcctgctaagcgcagttcgcctggagcacggaaaggacgatcaccttcaccgccccctaaaaagggttcaccttcaaaaaaagttcgttcgccatcaccaccccctaaaaaggcttcaccccctaggaaagcgtcgcctcctgctgagtcggttgttctctgcattgatcatttatcaaggaatgttaacgaagctcatctgaaagagatatttgggaactttggtgaagtggtgaatgtggagctatcaatggaccgaatggttaaccttcctcgtggctatggatatattgaattcaagaagagagctgatgctgagaaggctctactttacatggatggtggtcaaattgatggaaatgttgttaagttgaggttcactcttcaaccacgccaaagggctgtatcacctatgaaagctccaccccctcctccaaaacgagatgttgctcagattgaaaaaggtcttagcagtgctgaaaaggatgcccagcagcgtcctagggaatcatctccacgaaggaagccagcttcaccaccgcggaaacgatctccaaatcgaagggctgaatcgcccaggcgtccacctgacccatcacctaggcgtcgtcctgattctccgcctattcgtcgccgaccagatccttctcctgtcaggcgtggtggcacacctcctcgcaggagaccactgtctccagttagaaggcgttctccttcaccacctaggaggcataggtcaccgatgcgtccttcacctaggaggggacgtggcagtccttcaccacgcaggcgctcccctgggcctcttaggcggcgctcgccacctccaaggcgtttgaggagcccaccaagaaggccaccacctccacgtcgctatagtcgatctcctcctcgccgaccccttcgctccagatcgatttctccaagaaggggacgagggcctctcttgaggcgtggtaggtcaggctcatcatattctcgatcacctactccaccgccaagaaaggggccaagaagggtatcaaggagtcgcagccctagaaggcctcccagaggaagaagcatctctagtgacagccgaagcagcagttctccttcccctagacgtggcaggtgttgaaaggtttcatctactttgttggaaggagtttttcaacattcccattgtattatgattccgttgatcaagcaatttgtgtatgcgcaggcgcacgcacagcgtacaccttttctaatctgaaaagagttgtcattttgccaaaccccgccctgcttgttgccctgtcccatcagtcattggtttactgacgcgacgcaacgccgtttcctacaacatcctcatcgccgcctactctcgcgcgggcctacctggcgacattcgcgcgctaggaacggcaatgtagggtattgggcgtacccacgtgacggcagaaaaacatattgatgttcttctaagggctcagtccctttgggaccaagggtaatgaatggaattttgaggggatcaaaatcccttactatttaaaattgaatattgagggattatggtcctcttaatcccgttcattacacatacacttgctgtcgaagaagtggaatgttgggacttatgactcatctatttgtaaaattgtctcaaatagttaaatgacacaagattatatttgacatttctatgctcgtaattgaaggagagtaaaattggtgtaactggatatatgtactgccttgccttgtgaaaggatcacgatgtacaaatggaatggagggacaaattagactttaattttttttgtgacaattaaattctaataattagtctaat

SEQ ID NO: 77704 - DNA, 2196 bp, Zea Mays
tctcttccgttccgtccttccccgaactcgctcaaaaccctagccaaacgccacagggtcgccgccggtcgcccggccgcatccgctgccgccgctgccgccggggacgatggcgaagcctcggcgtggccgctccgcgtctcgctccacctcgggatcttcctcccgctcgccgtcccactccgtctcctccggctccgtctcgtcccgctcccgctccttctcgtcgtcgtcgtcccagtcccggagtcgctcccctcctcctgctaagcgcagttcgcctggagcacggaaaggacgatcaccttcaccgccccctaaaaagggttcaccttcaaaaaaagttcgttcgccatcaccaccccctaaaaaggcttcaccccctaggatgctgtatatgggctaacggtacaaaggatcttcaaaattcttattatattggatgctgcagcttcccacattagaaagcgtcgcctcctgctgagtcggttgttctctgcattgatcatttatcaaggaatgttaacgaagctcatctgaaagagatatttgggaactttggtgaagtggtgaatgtggagctatcaatggaccgaatggttaaccttcctcgtggctatggatatattgaattcaagaagagagctgatgctgagaaggctctactttacatggatggtggtcaaattgatggaaatgttgttaagttgaggttcactcttcaaccacgccaaagggctgtatcacctatgaaagctccaccccctcctccaaaacgagatgttgctcagattgaaaaaggtcttagcagtgctgaaaaggatgcccagcagcgtcctagggaatcatctccacgaaggaagccagcttcaccaccgcggaaacgatctccaaatcgaagggctgaatcgcccaggcgtccacctgacccatcacctaggcgtcgtcctgattctccgcctattcgtcgccgaccagatccttctcctgtcaggcgtggtggcacacctcctcgcaggagaccactgtctccagttagaaggcgttctccttcaccacctaggaggcataggtcaccgatgcgtccttcacctaggaggggacgtggcagtccttcaccacgcaggcgctcccctgggcctcttaggcggcgctcgccacctccaaggcgtttgaggagcccaccaagaaggccaccacctccacgtcgctatagtcgatctcctcctcgccgaccccttcgctccagatcgatttctccaagaaggggacgagggcctctcttgaggcgtggtaggtcaggctcatcatattctcgatcacctactccaccgccaagaaaggggccaagaagggtatcaaggagtcgcagccctagaaggcctcccagaggaagaagcatctctagtgacagccgaagcagcagttctccttcccctagacgtggcaggtagaaggaacccgttgcattgtgtatccggcaggtgttgaaaggtttcatctactttgttggaaggagtttttcaacattcccattgtattatgattccgttgatcaagcaatttgtgtatgcgcaggcgcacgcacagcgtacaccttttctaatctgaaaagagttgtcattttgccaaaccccgccctgcttgttgccctgtcccatcagtcattggtttactgacgcgacgcaacgccgtttcctacaacatcctcatcgccgcctactctcgcgcgggcctacctggcgacattcgcgcgctaggaacggcaatgtagggtattgggcgtacccacgtgacggcagaaaaacatattgatgttcttctaagggctcagtccctttgggaccaagggtaatgaatggaattttgaggggatcaaaatcccttactatttaaaattgaatattgagggattatggtcctcttaatcccgttcattacacatacacttgctgtcgaagaagtggaatgttgggacttatgactcatctatttgtaaaattgtctcaaatagttaaatgacacaagattatatttgacatttctatgctcgtaattgaaggagagtaaaattggtgtaactggatatatgtactgccttgccttgtgaaaggatcacgatgtacaaatggaatggagggacaaattagactttaattttttttgtgacaattaaattctaataattagtctaat

SEQ ID NO: 77705 - DNA, 2307 bp, Zea Mays
tctcttccgttccgtccttccccgaactcgctcaaaaccctagccaaacgccacagggtcgccgccggtcgcccggccgcatccgctgccgccgctgccgccggggacgatggcgaagcctcggcgtggccgctccgcgtctcgctccacctcgggatcttcctcccgctcgccgtcccactccgtctcctccggctccgtctcgtcccgctcccgctccttctcgtcgtcgtcgtcccagtcccggagtcgctcccctcctcctgctaagcgcagttcgcctggagcacggaaaggacgatcaccttcaccgccccctaaaaagggttcaccttcaaaaaaagttcgttcgccatcaccaccccctaaaaaggcttcaccccctaggaaagcgtcgcctcctgctgagtcggttgttctctgcattgatcatttatcaaggaatgttaacgaagctcatctgaaagagatatttgggaactttggtgaagtggtgaatgtggagctatcaatggaccgaatggttaaccttcctcgtggctatggatatattgaattcaagaagagagctgatgctgagaaggctctactttacatggatggtggtcaaattgatggaaatgttgttaagttgaggttcactcttcaaccacgccaaagggctgtatcacctatgaaagctccaccccctcctccaaaacgagatgttgctcagattgaaaaaggtcttagcagtgctgaaaaggatgcccagcagcgtcctagggaatcatctccacgaaggaagccagcttcaccaccgcggaaacgatctccaaatcgaagggctgaatcgcccaggcgtccacctgacccatcacctaggcgtcgtcctgattctccgcctattcgtcgccgaccagatccttctcctgtcaggcgtggtggcacacctcctcgcaggagaccactgtctccagttagaaggcgttctccttcaccacctaggaggcataggtcaccgatgcgtccttcacctaggaggggacgtggcagtccttcaccacgcaggcgctcccctgggcctcttaggcggcgctcgccacctccaaggcgtttgaggagcccaccaagaaggccaccacctccacgtcgctatagtcgatctcctcctcgccgaccccttcgctccagatcgatttctccaagaaggggacgagggcctctcttgaggcgtggtaggtcaggctcatcatattctcgatcacctactccaccgccaagaaaggggccaagaagggtatcaaggagtcgcagccctagaaggcctcccagaggaagaagcatctctagtgacagccgaagcagcagttctccttcccctagacgtggcaggtagaaggaacccgttgcattgtgtatccggcaggtaaagccttttatcccctgactcagatcaagtgttggtttgaggagaagataaaagaaccctacggcaatgcttccagtggatctgcttaacatgcctggtgggctcactggcttgtgatttgtacccgagacagaattatctgccatgtgacatctggctcatgtacttgattgtaccccaagtagtgttgaaaggtttcatctactttgttggaaggagtttttcaacattcccattgtattatgattccgttgatcaagcaatttgtgtatgcgcaggcgcacgcacagcgtacaccttttctaatctgaaaagagttgtcattttgccaaaccccgccctgcttgttgccctgtcccatcagtcattggtttactgacgcgacgcaacgccgtttcctacaacatcctcatcgccgcctactctcgcgcgggcctacctggcgacattcgcgcgctaggaacggcaatgtagggtattgggcgtacccacgtgacggcagaaaaacatattgatgttcttctaagggctcagtccctttgggaccaagggtaatgaatggaattttgaggggatcaaaatcccttactatttaaaattgaatattgagggattatggtcctcttaatcccgttcattacacatacacttgctgtcgaagaagtggaatgttgggacttatgactcatctatttgtaaaattgtctcaaatagttaaatgacacaagattatatttgacatttctatgctcgtaattgaaggagagtaaaattggtgtaactggatatatgtactgccttgccttgtgaaaggatcacgatgtacaaatggaatggagggacaaattagactttaattttttttgtgacaattaaattctaataattagtctaat

SEQ ID NO: 77706 - DNA, 2380 bp, Zea Mays
tctcttccgttccgtccttccccgaactcgctcaaaaccctagccaaacgccacagggtcgccgccggtcgcccggccgcatccgctgccgccgctgccgccggggacgatggcgaagcctcggcgtggccgctccgcgtctcgctccacctcgggatcttcctcccgctcgccgtcccactccgtctcctccggctccgtctcgtcccgctcccgctccttctcgtcgtcgtcgtcccagtcccggagtcgctcccctcctcctgctaagcgcagttcgcctggagcacggaaaggacgatcaccttcaccgccccctaaaaagggttcaccttcaaaaaaagttcgttcgccatcaccaccccctaaaaaggcttcaccccctaggatgctgtatatgggctaacggtacaaaggatcttcaaaattcttattatattggatgctgcagcttcccacattagaaagcgtcgcctcctgctgagtcggttgttctctgcattgatcatttatcaaggaatgttaacgaagctcatctgaaagagatatttgggaactttggtgaagtggtgaatgtggagctatcaatggaccgaatggttaaccttcctcgtggctatggatatattgaattcaagaagagagctgatgctgagaaggctctactttacatggatggtggtcaaattgatggaaatgttgttaagttgaggttcactcttcaaccacgccaaagggctgtatcacctatgaaagctccaccccctcctccaaaacgagatgttgctcagattgaaaaaggtcttagcagtgctgaaaaggatgcccagcagcgtcctagggaatcatctccacgaaggaagccagcttcaccaccgcggaaacgatctccaaatcgaagggctgaatcgcccaggcgtccacctgacccatcacctaggcgtcgtcctgattctccgcctattcgtcgccgaccagatccttctcctgtcaggcgtggtggcacacctcctcgcaggagaccactgtctccagttagaaggcgttctccttcaccacctaggaggcataggtcaccgatgcgtccttcacctaggaggggacgtggcagtccttcaccacgcaggcgctcccctgggcctcttaggcggcgctcgccacctccaaggcgtttgaggagcccaccaagaaggccaccacctccacgtcgctatagtcgatctcctcctcgccgaccccttcgctccagatcgatttctccaagaaggggacgagggcctctcttgaggcgtggtaggtcaggctcatcatattctcgatcacctactccaccgccaagaaaggggccaagaagggtatcaaggagtcgcagccctagaaggcctcccagaggaagaagcatctctagtgacagccgaagcagcagttctccttcccctagacgtggcaggtagaaggaacccgttgcattgtgtatccggcaggtaaagccttttatcccctgactcagatcaagtgttggtttgaggagaagataaaagaaccctacggcaatgcttccagtggatctgcttaacatgcctggtgggctcactggcttgtgatttgtacccgagacagaattatctgccatgtgacatctggctcatgtacttgattgtaccccaagtgttgaaaggtttcatctactttgttggaaggagtttttcaacattcccattgtattatgattccgttgatcaagcaatttgtgtatgcgcaggcgcacgcacagcgtacaccttttctaatctgaaaagagttgtcattttgccaaaccccgccctgcttgttgccctgtcccatcagtcattggtttactgacgcgacgcaacgccgtttcctacaacatcctcatcgccgcctactctcgcgcgggcctacctggcgacattcgcgcgctaggaacggcaatgtagggtattgggcgtacccacgtgacggcagaaaaacatattgatgttcttctaagggctcagtccctttgggaccaagggtaatgaatggaattttgaggggatcaaaatcccttactatttaaaattgaatattgagggattatggtcctcttaatcccgttcattacacatacacttgctgtcgaagaagtggaatgttgggacttatgactcatctatttgtaaaattgtctcaaatagttaaatgacacaagattatatttgacatttctatgctcgtaattgaaggagagtaaaattggtgtaactggatatatgtactgccttgccttgtgaaaggatcacgatgtacaaatggaatggagggacaaattagactttaattttttttgtgacaattaaattctaataattagtctaat

SEQ ID NO: 77707 - DNA, 2120 bp, Zea Mays
tctcttccgttccgtccttccccgaactcgctcaaaaccctagccaaacgccacagggtcgccgccggtcgcccggccgcatccgctgccgccgctgccgccggggacgatggcgaagcctcggcgtggccgctccgcgtctcgctccacctcgggatcttcctcccgctcgccgtcccactccgtctcctccggctccgtctcgtcccgctcccgctccttctcgtcgtcgtcgtcccagtcccggagtcgctcccctcctcctgctaagcgcagttcgcctggagcacggaaaggacgatcaccttcaccgccccctaaaaagggttcaccttcaaaaaaagttcgttcgccatcaccaccccctaaaaaggcttcaccccctaggaaagcgtcgcctcctgctgagtcggttgttctctgcattgatcatttatcaaggaatgttaacgaagctcatctgaaagagatatttgggaactttggtgaagtggtgaatgtggagctatcaatggaccgaatggttaaccttcctcgtggctatggatatattgaattcaagaagagagctgatgctgagaaggctctactttacatggatggtggtcaaattgatggaaatgttgttaagttgaggttcactcttcaaccacgccaaagggctgtatcacctatgaaagctccaccccctcctccaaaacgagatgttgctcagattgaaaaaggtcttagcagtgctgaaaaggatgcccagcagcgtcctagggaatcatctccacgaaggaagccagcttcaccaccgcggaaacgatctccaaatcgaagggctgaatcgcccaggcgtccacctgacccatcacctaggcgtcgtcctgattctccgcctattcgtcgccgaccagatccttctcctgtcaggcgtggtggcacacctcctcgcaggagaccactgtctccagttagaaggcgttctccttcaccacctaggaggcataggtcaccgatgcgtccttcacctaggaggggacgtggcagtccttcaccacgcaggcgctcccctgggcctcttaggcggcgctcgccacctccaaggcgtttgaggagcccaccaagaaggccaccacctccacgtcgctatagtcgatctcctcctcgccgaccccttcgctccagatcgatttctccaagaaggggacgagggcctctcttgaggcgtggtaggtcaggctcatcatattctcgatcacctactccaccgccaagaaaggggccaagaagggtatcaaggagtcgcagccctagaaggcctcccagaggaagaagcatctctagtgacagccgaagcagcagttctccttcccctagacgtggcaggtagaaggaacccgttgcattgtgtatccggcaggtgttgaaaggtttcatctactttgttggaaggagtttttcaacattcccattgtattatgattccgttgatcaagcaatttgtgtatgcgcaggcgcacgcacagcgtacaccttttctaatctgaaaagagttgtcattttgccaaaccccgccctgcttgttgccctgtcccatcagtcattggtttactgacgcgacgcaacgccgtttcctacaacatcctcatcgccgcctactctcgcgcgggcctacctggcgacattcgcgcgctaggaacggcaatgtagggtattgggcgtacccacgtgacggcagaaaaacatattgatgttcttctaagggctcagtccctttgggaccaagggtaatgaatggaattttgaggggatcaaaatcccttactatttaaaattgaatattgagggattatggtcctcttaatcccgttcattacacatacacttgctgtcgaagaagtggaatgttgggacttatgactcatctatttgtaaaattgtctcaaatagttaaatgacacaagattatatttgacatttctatgctcgtaattgaaggagagtaaaattggtgtaactggatatatgtactgccttgccttgtgaaaggatcacgatgtacaaatggaatggagggacaaattagactttaattttttttgtgacaattaaattctaataattagtctaat

SEQ ID NO: 77708 - DNA, 2445 bp, Zea Mays
atccaatggactattttatcctcctacacacgtaatataagtgatactcatattctctttatagccaaattctctctatagctaaaagctcgtaaaaaaactgaaccaaacaggccatatgctaaacaggccttacacctatgctgggtatctattgggccagctgggctgaagaacagtagcggacatggacaacagcaggggctcttttcacagactcctcaatctcttccgttccgtccttccccgaactcgctcaaaaccctagccaaacgccacagggtcgccgccggtcgcccggccgcatccgctgccgccgctgccgccggggacgatggcgaagcctcggcgtggccgctccgcgtctcgctccacctcgggatcttcctcccgctcgccgtcccactccgtctcctccggctccgtctcgtcccgctcccgctccttctcgtcgtcgtcgtcccagtcccggagtcgctcccctcctcctgctaagcgcagttcgcctggagcacggaaaggacgatcaccttcaccgccccctaaaaagggttcaccttcaaaaaaagttcgttcgccatcaccaccccctaaaaaggcttcaccccctaggaaagcgtcgcctcctgctgagtcggttgttctctgcattgatcatttatcaaggaatgttaacgaagctcatctgaaagagatatttgggaactttggtgaagtggtgaatgtggagctatcaatggaccgaatggttaaccttcctcgtggctatggatatattgaattcaagaagagagctgatgctgagaaggctctactttacatggatggtggtcaaattgatggaaatgttgttaagttgaggttcactcttcaaccacgccaaagggctgtatcacctatgaaagctccaccccctcctccaaaacgagatgttgctcagattgaaaaaggtcttagcagtgctgaaaaggatgcccagcagcgtcctagggaatcatctccacgaaggaagccagcttcaccaccgcggaaacgatctccaaatcgaagggctgaatcgcccaggcgtccacctgacccatcacctaggcgtcgtcctgattctccgcctattcgtcgccgaccagatccttctcctgtcaggcgtggtggcacacctcctcgcaggagaccactgtctccagttagaaggcgttctccttcaccacctaggaggcataggtcaccgatgcgtccttcacctaggaggggacgtggcagtccttcaccacgcaggcgctcccctgggcctcttaggcggcgctcgccacctccaaggcgtttgaggagcccaccaagaaggccaccacctccacgtcgctatagtcgatctcctcctcgccgaccccttcgctccagatcgatttctccaagaaggggacgagggcctctcttgaggcgtggtaggtcaggctcatcatattctcgatcacctactccaccgccaagaaaggggccaagaagggtatcaaggagtcgcagccctagaaggcctcccagaggaagaagcatctctagtgacagccgaagcagcagttctccttcccctagacgtggcagataaaagaaccctacggcaatgcttccagtggatctgcttaacatgcctggtgggctcactggcttgtgatttgtacccgagacagaattatctgccatgtgacatctggctcatgtacttgattgtaccccaagtgttgaaaggtttcatctactttgttggaaggagtttttcaacattcccattgtattatgattccgttgatcaagcaatttgtgtatgcgcaggcgcacgcacagcgtacaccttttctaatctgaaaagagttgtcattttgccaaaccccgccctgcttgttgccctgtcccatcagtcattggtttactgacgcgacgcaacgccgtttcctacaacatcctcatcgccgcctactctcgcgcgggcctacctggcgacattcgcgcgctaggaacggcaatgtagggtattgggcgtacccacgtgacggcagaaaaacatattgatgttcttctaagggctcagtccctttgggaccaagggtaatgaatggaattttgaggggatcaaaatcccttactatttaaaattgaatattgagggattatggtcctcttaatcccgttcattacacatacacttgctgtcgaagaagtggaatgttgggacttatgactcatctatttgtaaaattgtctcaaatagttaaatgacacaagattatatttgacatttctatgctcgtaattgaaggagagtaaaattggtgtaactggatatatgtactgccttgccttgtgaaaggatcacgatgtacaaatggaatggagggacaaattagactttaattttttttgtgacaattaaattctaataattagtctaat

SEQ ID NO: 77709 - DNA, 2450 bp, Zea Mays
atccaatggactattttatcctcctacacacgtaatataagtgatactcatattctctttatagccaaattctctctatagctaaaagctcgtaaaaaaactgaaccaaacaggccatatgctaaacaggccttacacctatgctgggtatctattgggccagctgggctgaagaacagtagcggacatggacaacagcaggggctcttttcacagactcctcaatctcttccgttccgtccttccccgaactcgctcaaaaccctagccaaacgccacagggtcgccgccggtcgcccggccgcatccgctgccgccgctgccgccggggacgatggcgaagcctcggcgtggccgctccgcgtctcgctccacctcgggatcttcctcccgctcgccgtcccactccgtctcctccggctccgtctcgtcccgctcccgctccttctcgtcgtcgtcgtcccagtcccggagtcgctcccctcctcctgctaagcgcagttcgcctggagcacggaaaggacgatcaccttcaccgccccctaaaaagggttcaccttcaaaaaaagttcgttcgccatcaccaccccctaaaaaggcttcaccccctaggaaagcgtcgcctcctgctgagtcggttgttctctgcattgatcatttatcaaggaatgttaacgaagctcatctgaaagagatatttgggaactttggtgaagtggtgaatgtggagctatcaatggaccgaatggttaaccttcctcgtggctatggatatattgaattcaagaagagagctgatgctgagaaggctctactttacatggatggtggtcaaattgatggaaatgttgttaagttgaggttcactcttcaaccacgccaaagggctgtatcacctatgaaagctccaccccctcctccaaaacgagatgttgctcagattgaaaaaggtcttagcagtgctgaaaaggatgcccagcagcgtcctagggaatcatctccacgaaggaagccagcttcaccaccgcggaaacgatctccaaatcgaagggctgaatcgcccaggcgtccacctgacccatcacctaggcgtcgtcctgattctccgcctattcgtcgccgaccagatccttctcctgtcaggcgtggtggcacacctcctcgcaggagaccactgtctccagttagaaggcgttctccttcaccacctaggaggcataggtcaccgatgcgtccttcacctaggaggggacgtggcagtccttcaccacgcaggcgctcccctgggcctcttaggcggcgctcgccacctccaaggcgtttgaggagcccaccaagaaggccaccacctccacgtcgctatagtcgatctcctcctcgccgaccccttcgctccagatcgatttctccaagaaggggacgagggcctctcttgaggcgtggtaggtcaggctcatcatattctcgatcacctactccaccgccaagaaaggggccaagaagggtatcaaggagtcgcagccctagaaggcctcccagaggaagaagcatctctagtgacagccgaagcagcagttctccttcccctagacgtggcaggtagaaggaacccgttgcattgtgtatccggcagtggatctgcttaacatgcctggtgggctcactggcttgtgatttgtacccgagacagaattatctgccatgtgacatctggctcatgtacttgattgtaccccaagtgttgaaaggtttcatctactttgttggaaggagtttttcaacattcccattgtattatgattccgttgatcaagcaatttgtgtatgcgcaggcgcacgcacagcgtacaccttttctaatctgaaaagagttgtcattttgccaaaccccgccctgcttgttgccctgtcccatcagtcattggtttactgacgcgacgcaacgccgtttcctacaacatcctcatcgccgcctactctcgcgcgggcctacctggcgacattcgcgcgctaggaacggcaatgtagggtattgggcgtacccacgtgacggcagaaaaacatattgatgttcttctaagggctcagtccctttgggaccaagggtaatgaatggaattttgaggggatcaaaatcccttactatttaaaattgaatattgagggattatggtcctcttaatcccgttcattacacatacacttgctgtcgaagaagtggaatgttgggacttatgactcatctatttgtaaaattgtctcaaatagttaaatgacacaagattatatttgacatttctatgctcgtaattgaaggagagtaaaattggtgtaactggatatatgtactgccttgccttgtgaaaggatcacgatgtacaaatggaatggagggacaaattagactttaattttttttgtgacaattaaattctaataattagtctaat

SEQ ID NO: 77710 - DNA, 2415 bp, Zea Mays
cgaactccaaatcgaaagcccgagcccacctgcagcctcagggtcaggggctcagggcaccagttcccatttcctcggcctccgcgccggccatggacgtcgatgacccctcaccgcgcgccggcggaggcagcggcgtggacccgccccgcatccggcggctggaggaatcggtggtgaaccgcatcgcggcgggggaggtgatccagcgcccgtcgtcggcggtcaaggagctcgtcgagaacagcctcgacgccggcgcgtccacagtctccgtcaccgtcaaggatggaggactcaagctcatacaggtttccgacgacggctacggcattcggtttgaggatttgccaatactgtgtgaaaggcatactacctcaaagttatctgcatatgaggatttacagaccataaaatctatgggctttagaggggaggccctggccagtatgacttatgttggccatgttactgtgacaacaataacagagggccaacttcatggctaccgtgtttgttataaagatggagtaatggagaacgagccaaaaccctgtgctgcagttaaaggaactcaaatcatggttgaaaatttattttacaatatggtagctcgtagaaaaacattgcagaactccaatgatgactacccaaagattgtagatttcattagtcgttttgcagtccatcacatcaatgtgaacttctcctgcagaaagcatggagccaatagagcagatgttcatagttcgagcacatcttctagactagatactattaggaatgtctatggggcttctgttgttcgtgatctgattgaaatagaagtttcagatgaggatgctggagatgcagtcttcaagatggatggttatatatcaaatgcaaattatgtggcaaagaaaatcatgatgatccttttcataaatggcttgtagagtgtactgctttaaaaagggcaattgaatttgtgtactctgcaacgttgccacaagcatccaaacccttcatatacatgtccatcaatcttccatcagaacatgtggatgtcaatatacacccaaccaaaaaagaggttagcctcttgaatcaagagcgtgttattgaaactataaaaaataccattgaggaaaaactgaggaattgtaataccacaaggatattccaaactcaggcagtaaactcagcacttactcaagtttacacgcagaaggacaagggtactgaggtcaaaatggcccctggagtgaaatctcaaaaggctcctgtgagccaaatggtcagaactgatccacgcaatccatctggaagcttgcacgcttactggcatgggcaatcttcaaaacttgaaaataaatatgaccttgtttctgtaagaaatgttgtaagatcaaggaggaatccaaaggatgctggtgatttatctagccgtcatgagcttcttatggaaatagattctcactgccatcctggtcttttagaggttattaagaattgcacatatgttggcctggctgatgaagtttccgctttgatacaatacaatactcacttataccttgtcaatgttgtaaatgttagtaaagaactcatgtaccagcaagctctgtgccgttttggaaacttcaatgcgatccagcttagtgaaccagctcctcttcaggagctgctgctgatggcactgaaagatgatgaatcaatcggtgatgaaaatgacgaggagaaactggagattgcagaggcaaactcgaaaatactgaaagaaaacgctgagatgattaatgagtacttctctattcatgttgatcacgatgggaacttgaccaggcttccagttgtacttgatcagtacacccctgatatggaccgtctcccagaatttgttttgactatggggaatgatgttacctgggatgatgagaaagagtgcttcagaacggcagcagctgctattgggaacttctacgcactccatcctcccatccttccaaatccatcggggagtggtgttcaggtgtacaagaaaaataaagcttgcatggcgagtggtgaacatgttgatagtacagatgaagatgacattgatcacgaactacttgcggaagcagaaacagcatggtcccaacgtgagtggaccattcaacatgtcttgtttccatccatgcgacttttcctcaagcccccaaagtcaatggcaacagatggaacctttgttcagattgcctctctggagaaactttacaggatttttgagagatgttagcccacacttctaactacttacaagaagccaagaaagacaccctataacatgttttgcactgtacatattcgtgtagtgtcgcaaatgttttttttaatagttcattgacttatgagatggaagtataccatgagcatgctattgttttctcc

SEQ ID NO: 77711 - DNA, 2208 bp, Zea Mays
cgaactccaaatcgaaagcccgagcccacctgcagcctcagggtcaggggctcagggcaccagttcccatttcctcggcctccgcgccggccatggacgtcgatgacccctcaccgcgcgccggcggaggcagcggcgtggacccgccccgcatccggcggctggaggaatcggtggtgaaccgcatcgcggcgggggaggtgatccagcgcccgtcgtcggcggtcaaggagctcgtcgagaacagcctcgacgccggcgcgtccacagtctccgtcaccgtcaaggatggaggactcaagctcatacaggtttccgacgacggctacggcattcggtttgaggatttgccaatactgtgtgaaaggcatactacctcaaagttatctgcatatgaggatttacagaccataaaatctatgggctttagaggggaggccctggccagtatgacttatgttggccatgttactgtgacaacaataacagagggccaacttcatggctaccgtgtttgttataaagatggagtaatggagaacgagccaaaaccctgtgctgcagttaaaggaactcaaatcatggttgaaaatttattttacaatatggtagctcgtagaaaaacattgcagaactccaatgatgactacccaaagattgtagatttcattagtcgttttgcagtccatcacatcaatgtgaacttctcctgcagaaagataggcttgtagagtgtactgctttaaaaagggcaattgaatttgtgtactctgcaacgttgccacaagcatccaaacccttcatatacatgtccatcaatcttccatcagaacatgtggatgtcaatatacacccaaccaaaaaagaggttagcctcttgaatcaagagcgtgttattgaaactataaaaaataccattgaggaaaaactgaggaattgtaataccacaaggatattccaaactcaggcagtaaactcagcacttactcaagtttacacgcagaaggacaagggtactgaggtcaaaatggcccctggagtgaaatctcaaaaggctcctgtgagccaaatggtcagaactgatccacgcaatccatctggaagcttgcacgcttactggcatgggcaatcttcaaaacttgaaaataaatatgaccttgtttctgtaagaaatgttgtaagatcaaggaggaatccaaaggatgctggtgatttatctagccgtcatgagcttcttatggaaatagattctcactgccatcctggtcttttagaggttattaagaattgcacatatgttggcctggctgatgaagtttccgctttgatacaatacaatactcacttataccttgtcaatgttgtaaatgttagtaaagaactcatgtaccagcaagctctgtgccgttttggaaacttcaatgcgatccagcttagtgaaccagctcctcttcaggagctgctgctgatggcactgaaagatgatgaatcaatcggtgatgaaaatgacgaggagaaactggagattgcagaggcaaactcgaaaatactgaaagaaaacgctgagatgattaatgagtacttctctattcatgttgatcacgatgggaacttgaccaggcttccagttgtacttgatcagtacacccctgatatggaccgtctcccagaatttgttttgactatggggaatgatgttacctgggatgatgagaaagagtgcttcagaacggcagcagctgctattgggaacttctacgcactccatcctcccatccttccaaatccatcggggagtggtgttcaggtgtacaagaaaaataaagcttgcatggcgagtggtgaacatgttgatagtacagatgaagatgacattgatcacgaactacttgcggaagcagaaacagcatggtcccaacgtgagtggaccattcaacatgtcttgtttccatccatgcgacttttcctcaagcccccaaagtcaatggcaacagatggaacctttgttcagattgcctctctggagaaactttacaggatttttgagagatgttagcccacacttctaactacttacaagaagccaagaaagacaccctataacatgttttgcactgtacatattcgtgtagtgtcgcaaatgttttttttaatagttcattgacttatgagatggaagtataccatgagcatgctattgttttctcc

SEQ ID NO: 77712 - DNA, 2007 bp, Zea Mays
aaaaaacgagaggagagcggagagacagacaggagccaaatctacgtctcctgccaattcgcctttctccaaccagcttccccgcgccgcccgcccgtcgccgctcctccccgccctctctgcccgcatcagatcgtcttccccacgccgtgtgaccgaggtcccgtgatccctcccacttctgcgccggcgaggacccgggaggcgggatgagcggctgagcacgacgatggcacgcagagccacgccgcaggaggccgccgtcgctgccgcggaggccgccatacgatccgtaggcctggggttcgacgtcgtcagcgacgtccgcctcaagttctgtaagcagcggggcgcgcccgacccctggctcatcgaacttgaccatggggaggtccaggatatcgtgctgcccggcggcgtcaccgtcgctggcgtcaccgcttcggttaagtgtgacaaaggggagcggatgaggttccgctccgatgtcctgtcgttccagcagatgtctgagcaattcaaccaggagctatcattgtctgggaaaattccatctggcttcttcaatactatgtttgagttttctggcagctggcagaaagatgctgctaataccaaagcacttgcttttgatggttggtatgtcacactatacagtgttgcgctctcaaaagggcaaattgtactccgggatcatgttaaacagtctgttccatcaacctgggatcctgccgctttggcaaggtttattaaaaaatttggcactcatatagttgttggcctaaagatgggtgggaaagatgtaatttatttgaagcaacaacattcatcaaccttgcaagctgtcgacgttcaaaaacgattgaaggagatgtcagatagtagatttcttgatgcaaatgtgcaatatgacatgagtaggaacaatcaggatttggtgatgatgcttaagcgaagaggtgggagggataaagaatctatatctcatagtgagtggcttaatactgttcaagcagagcctgatgttacctcaatgtcctttataccaatcacttcgctgttgaatggagttcctggaagtggatttttgatccatgcaattaatctgtatctccgacataaacctccaatcgaggaattacatcagtttttggagttccagcttccaaggcagtgggcacctgtttacagtgatctcgctctgggtcctcagaggaaaagacaaggcagtacatcgttgccagtaaatttaatcggtccaaagctttatgtttgcactaacatggttgatgtgggtaaaagaccagttacaggactccggttgttccttgaaggaaggaagagcaacaaattagctgtacatcttcaacatctctgctctcttcctcagattattcagcttgaagacgacccttacaatcaccaaaccccggaatatgaccgcaaatactacgaaccaattggaccgtggaaacatttctctcatgtttgcacagcaccagtcgagtcagatgacctgtgcatcgtcacaggggcacaattagacgtggtccaccaaggcctcaagaaaattttgttccttcgcctacatttctccaaagcctgcaatgccgttgtgaggaactcggaatgggagaattctcccaacatagctcagaaatcaggccttatctcaacactcattagcacacatttctcctcggtagctcagacgcctccgccgcggccagccgatgtgaacataaactcggcggtgtaccctgggggaccacctgttccagtgcagaccccaaagctgctgaaatttgttgatccaacagagatgatgcgtgggccgcaggactcaccgggctattgggtggtttcaggcgcaaagttgaaccttgagaggagtaagatctcattgcgggtgaaatactcactgctgacagctatgatgccagatgatgagtttccacttgatgatgatgaattttagaacctggaacgaaagaaacctttgctatc

SEQ ID NO: 77713 - DNA, 1570 bp, Zea Mays
ttttcttccacaatttctgatgtaacatactgtacagagtgatatcagagagcaatagctaagatttgtacagtacagtccattgaattcttactcgtcaattgagggacagagctttgtgttcataatatttcattactcaagcaaagaatcatttatattagcttagctggatcttttagcatgatacacatttttgttggccctaactcaggatttggtgatgatgcttaagcgaagaggtgggagggataaagaatctatatctcatagtgagtggcttaatactgttcaagcagagcctgatgttacctcaatgtcctttataccaatcacttcgctgttgaatggagttcctggaagtggatttttgatccatgcaattaatctgtatctccgacataaacctccaatcgaggaattacatcagtttttggagttccagcttccaaggcagtgggcacctgtttacagtgatctcgctctgggtcctcagaggaaaagacaaggcagtacatcgttgccagtaaatttaatcggtccaaagctttatgtttgcactaacatggttgatgtgggtaaaagaccagttacaggactccggttgttccttgaaggaaggaagagcaacaaattagctgtacatcttcaacatctctgctctcttcctcagattattcagcttgaagacgacccttacaatcaccaaaccccggaatatgaccgcaaatactacgaaccaattggaccgtggaaacatttctctcatgtttgcacagcaccagtcgagtcagatgacctgtgcatcgtcacaggggcacaattagacgtggtccaccaaggcctcaagaaaattttgttccttcgcctacatttctccaaagcctgcaatgccgttgtgaggaactcggaatgggagaattctcccaacatagctcagaaatcaggccttatctcaacactcattagcacacatttctcctcggtagctcagacgcctccgccgcggccagccgatgtgaacataaactcggcggtgtaccctgggggaccacctgttccagtgcagaccccaaagctgctgaaatttgttgatccaacagagatgatgcgtgggccgcaggactcaccgggctattgggtggtttcaggcgcaaagttgaaccttgagaggagtaagatctcattgcgggtgaaatactcactgctgacagctatgatgccagatgatgagtttccacttgatgatgatgaattttagaacctggaacgaaagaaacctgtgtagcaaaggttgaggatccaagatttccgtcatttgggcatttgtttgatgttgtatactttgtggtttctttaaacattatagcataaacgagttctctgccctgaatggagcgagaagaattgttgtaacatttctttgtagcgtgggcgtggcacatagcgatcagcattagatgatagatcaaattatctgtatatatgggatgaataaaaaatattgtttcaaatgttttcttgtcttggtactgttgtgatgtattctgggagttttggctcccttgcc

SEQ ID NO: 77714 - DNA, 2261 bp, Zea Mays
aaaaaacgagaggagagcggagagacagacaggagccaaatctacgtctcctgccaattcgcctttctccaaccagcttccccgcgccgcccgcccgtcgccgctcctccccgccctctctgcccgcatcagatcgtcttccccacgccgtgtgaccgaggtcccgtgatccctcccacttctgcgccggcgaggacccgggaggcgggatgagcggctgagcacgacgatggcacgcagagccacgccgcaggaggccgccgtcgctgccgcggaggccgccatacgatccgtaggcctggggttcgacgtcgtcagcgacgtccgcctcaagttctgtaagcagcggggcgcgcccgacccctggctcatcgaacttgaccatggggaggtccaggatatcgtgctgcccggcggcgtcaccgtcgctggcgtcaccgcttcggttaagtgtgacaaaggggagcggatgaggttccgctccgatgtcctgtcgttccagcagatgtctgagcaattcaaccaggagctatcattgtctgggaaaattccatctggcttcttcaatactatgtttgagttttctggcagctggcagaaagatgctgctaataccaaagcacttgcttttgatggttggtatgtcacactatacagtgttgcgctctcaaaagggcaaattgtactccgggatcatgttaaacagtctgttccatcaacctgggatcctgccgctttggcaaggtttattaaaaaatttggcactcatatagttgttggcctaaagatgggtgggaaagatgtaatttatttgaagcaacaacattcatcaaccttgcaagctgtcgacgttcaaaaacgattgaaggagatgtcagatagtagatttcttgatgcaaatgtgcaatatgacatgagtaggaacaatcagaggtgggagggataaagaatctatatctcatagtgagtggcttaatactgttcaagcagagcctgatgttacctcaatgtcctttataccaatcacttcgctgttgaatggagttcctggaagtggatttttgatccatgcaattaatctgtatctccgacataaacctccaatcgaggaattacatcagtttttggagttccagcttccaaggcagtgggcacctgtttacagtgatctcgctctgggtcctcagaggaaaagacaaggcagtacatcgttgccagtaaatttaatcggtccaaagctttatgtttgcactaacatggttgatgtgggtaaaagaccagttacaggactccggttgttccttgaaggaaggaagagcaacaaattagctgtacatcttcaacatctctgctctcttcctcagattattcagcttgaagacgacccttacaatcaccaaaccccggaatatgaccgcaaatactacgaaccaattggaccgtggaaacatttctctcatgtttgcacagcaccagtcgagtcagatgacctgtgcatcgtcacaggggcacaattagacgtggtccaccaaggcctcaagaaaattttgttccttcgcctacatttctccaaagcctgcaatgccgttgtgaggaactcggaatgggagaattctcccaacatagctcagaaatcaggccttatctcaacactcattagcacacatttctcctcggtagctcagacgcctccgccgcggccagccgatgtgaacataaactcggcggtgtaccctgggggaccacctgttccagtgcagaccccaaagctgctgaaatttgttgatccaacagagatgatgcgtgggccgcaggactcaccgggctattgggtggtttcaggcgcaaagttgaaccttgagaggagtaagatctcattgcgggtgaaatactcactgctgacagctatgatgccagatgatgagtttccacttgatgatgatgaattttagaacctggaacgaaagaaacctgtgtagcaaaggttgaggatccaagatttccgtcatttgggcatttgtttgatgttgtatactttgtggtttctttaaacattatagcataaacgagttctctgccctgaatggagcgagaagaattgttgtaacatttctttgtagcgtgggcgtggcacatagcgatcagcattagatgatagatcaaattatctgtatatatgggatgaataaaaaatattgtttcaaatgttttcttgtcttggtactgttgtgatgtattctgggagttttggctcccttgcc

SEQ ID NO: 77715 - DNA, 2266 bp, Zea Mays
aaaaaacgagaggagagcggagagacagacaggagccaaatctacgtctcctgccaattcgcctttctccaaccagcttccccgcgccgcccgcccgtcgccgctcctccccgccctctctgcccgcatcagatcgtcttccccacgccgtgtgaccgaggtcccgtgatccctcccacttctgcgccggcgaggacccgggaggcgggatgagcggctgagcacgacgatggcacgcagagccacgccgcaggaggccgccgtcgctgccgcggaggccgccatacgatccgtaggcctggggttcgacgtcgtcagcgacgtccgcctcaagttctgtaagcagcggggcgcgcccgacccctggctcatcgaacttgaccatggggaggtccaggatatcgtgctgcccggcggcgtcaccgtcgctggcgtcaccgcttcggttaagtgtgacaaaggggagcggatgaggttccgctccgatgtcctgtcgttccagcagatgtctgagcaattcaaccaggagctatcattgtctgggaaaattccatctggcttcttcaatactatgtttgagttttctggcagctggcagaaagatgctgctaataccaaagcacttgcttttgatggttggtatgtcacactatacagtgttgcgctctcaaaagggcaaattgtactccgggatcatgttaaacagtctgttccatcaacctgggatcctgccgctttggcaaggtttattaaaaaatttggcactcatatagttgttggcctaaagatgggtgggaaagatgtaatttatttgaagcaacaacattcatcaaccttgcaagctgtcgacgttcaaaaacgattgaaggagatgtcagatagtagatttcttgatgcaaatgtgcaatatgacatgagtaggaacaatcagcgaagaggtgggagggataaagaatctatatctcatagtgagtggcttaatactgttcaagcagagcctgatgttacctcaatgtcctttataccaatcacttcgctgttgaatggagttcctggaagtggatttttgatccatgcaattaatctgtatctccgacataaacctccaatcgaggaattacatcagtttttggagttccagcttccaaggcagtgggcacctgtttacagtgatctcgctctgggtcctcagaggaaaagacaaggcagtacatcgttgccagtaaatttaatcggtccaaagctttatgtttgcactaacatggttgatgtgggtaaaagaccagttacaggactccggttgttccttgaaggaaggaagagcaacaaattagctgtacatcttcaacatctctgctctcttcctcagattattcagcttgaagacgacccttacaatcaccaaaccccggaatatgaccgcaaatactacgaaccaattggaccgtggaaacatttctctcatgtttgcacagcaccagtcgagtcagatgacctgtgcatcgtcacaggggcacaattagacgtggtccaccaaggcctcaagaaaattttgttccttcgcctacatttctccaaagcctgcaatgccgttgtgaggaactcggaatgggagaattctcccaacatagctcagaaatcaggccttatctcaacactcattagcacacatttctcctcggtagctcagacgcctccgccgcggccagccgatgtgaacataaactcggcggtgtaccctgggggaccacctgttccagtgcagaccccaaagctgctgaaatttgttgatccaacagagatgatgcgtgggccgcaggactcaccgggctattgggtggtttcaggcgcaaagttgaaccttgagaggagtaagatctcattgcgggtgaaatactcactgctgacagctatgatgccagatgatgagtttccacttgatgatgatgaattttagaacctggaacgaaagaaacctgtgtagcaaaggttgaggatccaagatttccgtcatttgggcatttgtttgatgttgtatactttgtggtttctttaaacattatagcataaacgagttctctgccctgaatggagcgagaagaattgttgtaacatttctttgtagcgtgggcgtggcacatagcgatcagcattagatgatagatcaaattatctgtatatatgggatgaataaaaaatattgtttcaaatgttttcttgtcttggtactgttgtgatgtattctgggagttttggctcccttgcc

SEQ ID NO: 77716 - DNA, 1946 bp, Zea Mays
aaaaaacgagaggagagcggagagacagacaggagccaaatctacgtctcctgccaattcgcctttctccaaccagcttccccgcgccgcccgcccgtcgccgctcctccccgccctctctgcccgcatcagatcgtcttccccacgccgtgtgaccgaggtcccgtgatccctcccacttctgcgccggcgaggacccgggaggcgggatgagcggctgagcacgacgatggcacgcagagccacgccgcaggaggccgccgtcgctgccgcggaggccgccatacgatccgtaggcctggggttcgacgtcgtcagcgacgtccgcctcaagttctgtaagcagcggggcgcgcccgacccctggctcatcgaacttgaccatggggaggtccaggatatcgtgctgcccggcggcgtcaccgtcgctggcgtcaccgcttcggttaagtgtgacaaaggggagcggatgaggttccgctccgatgtcctgtcgttccagcagatgtctgagcaattcaaccaggagctatcattgtctgggaaaattccatctggcttcttcaatactatgtttgagttttctggcagctggcagaaagatgctgctaataccaaagcacttgcttttgatggttggtatgtcacactatacagtgttgcgctctcaaaagggcaaattgtactccgggatcatgttaaacagtctgttccatcaacctgggatcctgccgctttggcaaggtttattaaaaaatttggcactcatatagttgttggcctaaagatgggtgggaaagatgtaatttatttgaagcaacaacattcatcaaccttgcaagctgtcgacgttcaaaaacgattgaaggagatgtcagatagtagatttcttgatgcaaatgtgcaatatgacatgagtaggaacaatcaggtgctttccgagccttcgtttcttcttctatccccaggatttcttccatttaacaccattgattactgttaaagtggtattggaacagtataacttattaacatttaattattgttttattgaacacccccacaacatgcaaagtttacttctgtgagctttaaaactgcatcttttgaccagtggaatttgtgtttatcaccacaattactaggccaacaaacataaaaataatagactgcctcaaatttatttcattgaatttgtggggaagttgggacaaccagctggcctatattgtcttttccaataggtgttttccctttctatggtatgatacatacacactggttctatgggcatgtgaccatagcctcaaactgtgtctagtatggctgttttggttgagaaacatttagatggataagagaagtattcattgacaaaaatatttgatatatcatgcccatagatctaaactgcttacatgctccaaattctgaatttcaaccttaggttttactttcgtcgggtactgtgactactgtcatgtatatttgtcatcgcataacgataccagggtattgcatgtacccgagaggattgatgagtggaagatagagcgatgggcgtaggctgaagtcatattgatcctaggtactacttagctactagcacacaagatatttatagacgcccaggctgtaaatatgcaataccctacgtcctcgttgtgtatggtggattgatggatgttgaatgcaaatgtgaagaagataacatgctcaagtatcaactgagccccaagacagtctagctctcccttcccttttggtcatggtgagagttctagacaactgatccctagttcactctgtctatcctgcttggaatcgagagatcgatcccaaggcgaaagcccgaactctggaagaagcaccttatatgtttccctacctctcccttttatatctcaagcgaggagactgatacatgtctgctgagcagtgggcca

SEQ ID NO: 77717 - DNA, 1126 bp, Zea Mays
tctctatctcgtttgtgacttgaaacctggcgccgatgtgaagatcacagggccagtgggcaaggagatgctcatgcccaaagaccccaatgcaacagtcatcatgctcgcaacggggaccggtattgctccgttccgctccttcttgtggaagatgttcctggaggagcacgaggactacaagttcagcggccttgcgtggctgttcttgggagtcccgacgagcgacagcctgctgtacaaggaggagctggagaagatgaaggagatggcgccggacaacttccggctggacttcgcggtgagccgggagcagacgaacgcggcgggggagaagatgtacatccagacgcgcatggcggagtacagggaggagctgtgggagctgctgaagaaggacaacacctacgtctacatgtgcgggctcaagggcatggagaagggcatcgacgacatcatgctcaaccttgcagccaaggacgggatcgactggatgcagtacaagaagcagctcaagaagggcgagcaatggaacgtcgaggtctactgatccatccttccgttgacgactgcggagatcaatcaaatcgttggctcgtcgccgcgcccgagtctgtcagactcaggtctctatctaccgatgtacatataccttacgatgatgaaagacattctctatctatcaatgtacatacatacatacataacttaatttcacacggattgcatcgtacatggatttatttatggatgagccgccgaatttcttcttgaggggcctctttgaaggatttcctagactttcgtgcaaggtttcctgcatggatgtatatattatatacagagcctcagccaaccttgttgcgacaactacatatgaacatgatttacacgacaggtaacaactccatatgaatttcttcgcgagggacttctatgacggatgggccgtagcccgacacgtctaggcccccgttaggttgttaaaccgtgccgggctggccaccgtgccttacgtatctcaggcccaagcacaccacgaatatagccacgtcgtgccggatcgactcatagcctgttaagacacgtcgttctttgacctagatagatgggaaggaaaataagc

SEQ ID NO: 77718 - DNA, 2234 bp, Zea Mays
cgaagccaaccgtcccagtctgggccccaccggcgagagcccgtcggcgtcaaaccaggacccgataaatagccgcgccgggcggggagaggtggtgctcctcaccggcctcggcgtcgtcgcctcgcaccgcacccaccggtccaccacccacctattcttcttgtctctctcccccctcgcaaatcggaggccaagtacactgcccacccaagtacccaaccaagtcaggagcagaacaagtagtacgggctgtgttttctgcgacggcgagccaagagcagaacaagtagtacgggcgtgttctctgcgacagcgagcggaccagatcggcggcgccatgtcgcacgacgagctcgccgacaaggagccgtcgtcctccgaggagtttcagctcgcgccgacgggttccaagttccggagcctcagccctgcaccgattccgatcccagcttctccgggcatcagatcattggtcgactcggtctctgatgagacagtaaatgtagatgtcatggcctcacatcaaagtgaaaatggatcaatctctacagctagttctaccgttagtttactggaatcagagaaggcagcatatgaatttcttgctcaaactcctgtcagatcaaccgatgcacatcttattgagttttcagaggccttgagaactgtcgcaaaagccttacgacaagtggctgaagggaaggctgctgctcaagcagaggcagcagagtggaaacgtaagtatgaattagagacagcgcagaagcagcaaagtaaaatcagaggctacagcagttgtatcagtaataacttggacaaactggccagccaactaaccctggagacacctgcacctgatcaattaggctgttgtggtaagcatggtatatgtgcacaccaggttctccaggatgaagttcctggacctatcccaagatctaatcacaaggtgggagggagaaaggcaccatttaaactttcatggggatgtaacggggataaaaatggccagcataagcatgattttgtgtccttcgaaaaaggtgatataacaacagcagaacggagcaataagcagatcttactgaaatgggaatcaccaccacaaacagtgcttttcataaccaaaccgaattccagctctgtgcgtgttctttgtgctgaaatggtcagatggcttagagagtataaaaatgtaaacatctttgttgatccacgtgttagcaaggaacttctaacagaggattcctactacaacttcgtccaaacgtgggataatggctgcatcattgttcaaaggaccagttcctccagttgtcgcattcgcccttggatcactgggcttcatgacacccttcccgagcgagcactaccgtgagttgttggacaacgtgctgaatgggccatttagcatcacgctgagaaatcgcatacagtgtcatgtaatacgagacgcggcgaaggatgaaatcgtgaccgaggagccgttcttagtgctaaatgaagttacgatcgaccgagggatatcgtcttaccttaccaacctggaagtctactgcgacagctcttttgttacttgtgtgcaaggagacggactgatcatatcaaccacatctggaagtacggcatattccctagcagctggagggtccatggtccatcctcaggtccctgggatccttttcaccccaatctgcccgcattccttgtcgttcagacctttgatcctgcccgagtacgtgactctccgcgtccaggtgccgtacaacagcagggggcacgcctgggcgtccttcgacggcaaggaccggaagcagctgtcacccggtgacgccctgatctgcagcatttctccctggcccgtgcccacagcctgcctagtggattcgaccaccgacttcttccgcagcatccatgagggtctccactggaacttgaggaaatcccagtcgtttgacggcccgcgtgattgattcaacagtttctttaccgttccatacttatatacaaaggttgcgtgcgtttagatgtgaggtagtatagacgtatagttgagaatccaaatatatagccatgaccatgcgtgtgtgtacatgattctgtgcttcagtgctccccagatctgaatggaataattggcgagccatacacgtatgacgagatggcagcttgcagtcgtgcgatctgggcacttgtgacgattgatggggaggaagcctccatcctttttt

SEQ ID NO: 77719 - DNA, 2139 bp, Zea Mays
cgaagccaaccgtcccagtctgggccccaccggcgagagcccgtcggcgtcaaaccaggacccgataaatagccgcgccgggcggggagaggtggtgctcctcaccggcctcggcgtcgtcgcctcgcaccgcacccaccggtccaccacccacctattcttcttgtctctctcccccctcgcaaatcggaggccaagtacactgcccacccaagtacccaaccaagtcaggagcagaacaagtagtacgggctgtgttttctgcgacggcgagccaagagcagaacaagtagtacgggcgtgttctctgcgacagcgagcggaccagatcggcggcgccatgtcgcacgacgagctcgccgacaaggagccgtcgtcctccgaggagtttcagctcgcgccgacgggttccaagttccggagcctcagccctgcaccgattccgatcccagcttctccgggcatcagatcattggtcgactcggtctctgatgagacagtaaatgtagatgtcatggcctcacatcaaagtgaaaatggatcaatctctacagctagttctaccgttagtttactggaatcagagaaggcagcatatgaatttcttgctcaaactcctgtcagatcaaccgatgcacatcttattgagttttcagaggccttgagaactgtcgcaaaagccttacgacaagtggctgaagggaaggctgctgctcaagcagaggcagcagagtggaaacgtaagtatgaattagagacagcgcagaagcagcaaagtaaaatcagaggctacagcagttgtatcagtaataacttggacaaactggccagccaactaaccctggagacacctgcacctgatcaattaggctgttgtggtaagcatggtatatgtgcacaccaggttctccaggatgaagttcctggacctatcccaagatctaatcacaaggtgggagggagaaaggcaccatttaaactttcatggggatgtaacggggataaaaatggccagcataagcatgattttgtgtccttcgaaaaaggtgatataacaacagcagaacggagcaataagcagatcttactgaaatgggaatcaccaccacaaacagtgcttttcataaccaaaccgaattccagctctgtgcgtgttctttgtgctgaaatggtcagatggcttagagagtataaaaatgtaaacatctttgttgatccacgtgttagcaaggaacttctaacagaggattcctactacaacttcgtccaaacgtgggataatgatgatgatataaagatgctgcacacgaaggtcgatctaattgtaactctgggcggtgatggaactgttctgtgggctgcatcattgttcaaaggaccagttcctccagttgtcgcattcgcccttggatcactgggcttcatgacacccttcccgagcgagcactaccgtgagttgttggacaacgtgctgaatgggccatttagcatcacgctgagaaatcgcatacagtgtcatgtaatacgagacgcggcgaaggatgaaatcgtgaccgaggagccgttcttagtgctaaatgaagttacgatcgaccgagggatatcgtcttaccttaccaacctggaagtctactgcgacagctcttttgttacttgtgtgcaaggagacggactgatcatatcaaccacatctggaagtacggcatattccctagcagctggagggtccatggtccatcctcaggtccctgggatccttttcaccccaatctgcccgcagcctgcctagtggattcgaccaccgacttcttccgcagcatccatgagggtctccactggaacttgaggaaatcccagtcgtttgacggcccgcgtgattgattcaacagtttctttaccgttccatacttatatacaaaggttgcgtgcgtttagatgtgaggtagtatagacgtatagttgagaatccaaatatatagccatgaccatgcgtgtgtgtacatgattctgtgcttcagtgctccccagatctgaatggaataattggcgagccatacacgtatgacgagatggcagcttgcagtcgtgcgatctgggcacttgtgacgattgatggggaggaagcctccatcctttttt

SEQ ID NO: 77720 - DNA, 1317 bp, Zea Mays
cgaagccaaccgtcccagtctgggccccaccggcgagagcccgtcggcgtcaaaccaggacccgataaatagccgcgccgggcggggagaggtggtgctcctcaccggcctcggcgtcgtcgcctcgcaccgcacccaccggtccaccacccacctattcttcttgtctctctcccccctcgcaaatcggaggccaagtacactgcccacccaagtacccaaccaagtcaggagcagaacaagtagtacgggctgtgttttctgcgacggcgagccaagagcagaacaagtagtacgggcgtgttctctgcgacagcgagcggaccagatcggcggcgccatgtcgcacgacgagctcgccgacaaggagccgtcgtcctccgaggagtttcagctcgcgccgacgggttccaagttccggagcctcagccctgcaccgattccgatcccagcttctccgggcatcagatcattggtcgactcggtctctgatgagacagtaaatgtagatgtcatggcctcacatcaaagtgaaaatggatcaatctctacagctagttctaccgttagtttactggaatcagagaaggcagcatatgaatttcttgctcaaactcctgtcagatcaaccgatgcacatcttattgagttttcagaggccttgagaactgtcgcaaaagccttacgacaagtggctgaagggaaggctgctgctcaagcagaggcagcagagtggaaacgtaagtatgaattagagacagcgcagaagcagcaaagtaaaatcagaggctacagcagttgtatcagtaataacttggacaaactggccagccaactaaccctggagacacctgcacctgatcaattaggctgttgtggtaagcatggtatatgtgcacaccaggttctccaggatgaagttcctggacctatcccaagatctaatcacaaggtgggagggagaaaggcaccatttaaactttcatggggatgtaacggggataaaaatggccagcataagcatgattttgtgtccttcgaaaaaggtgatataacaacagcagaacggagcaataagcagatcttactgaaatgggaatcaccaccacaaacagtgcttttcataaccaaaccgaattccagctctgtgcgtgttctttgtgctgaaatggtcagatggcttagagagtataaaaatgtaaacatctttgttgatccacgtgttagcaaggaacttctaacagaggattcctactacaacttcgtccaaacgtgggataatggcttagtagtttggagagtgtttacggatagttt

SEQ ID NO: 77721 - DNA, 2569 bp, Zea Mays
ccgcgcaggcaggcggttccgtcccggctcttcccacccaccccgccgaggatggcgccgtcccccgtcacgtgccgcccctccgcggcgcggcaccgcccgctgctggtccgcgcccccgcgccgcgcgctgccgacggggcggcgctgatgctgccgctgccgctgcggaggagggaggcgctgctggccgcagcggcgcggccgcacgcgcggtggatcgcggcggacccgtgggcgtcggcacacgcctggacgagccctggaaggggcaggggggacgcgacaaggtgcgcggcggcggggcgggtcgcggggagcagcagcgcgggcgccgggaggagcgccgggatggaggtggccatcgccgccgctgcggtcgtcgccatgggcacggggaaccgcgtcctctacaagctcgcgctcgtgccgctccgggagtaccccttcttcctggcgcagttcgccacgttcggatatgtagttgtctatttctcgatcctgtatcttcgatatcaagcgggcattgtcaccgatgagatgctgtctctaccacagaaaccttttctagttgtaggactcttagaggcttttgcggcagcagcaggaatggcagctggagctgttctttctggggcttcaataccaatattgtcacagacttatcttgtctggcagcttcttctatctgctattttcttgaagaggcgctatagaattaatgagatagcaggatgctttctagtgaccgttggtgtcataataactgtagcaagtggatctggtactagtgcttcatttaaaagtactggaattttatggccactgctaatgataatatcgttctttctccaagctgctgacacagtattgaaggaaatcatatttctagatgcttctaagaaactgaagtgtggctcagttgatctttttgttgtcaattcatacggctctgcttatcaagctctttttatgtgtctcttgcttcctttcctgtcaaagttatggggagttccattccgtgtgttaccaacgtacattaaagatggtgcagcctgcttcttaaatatgggatcaatatctggttgtgaaggggcgccgctactaccactactatttgtgttggttaacatgggattcaatatatcattactacacctgctaaagatctcctcggcagtcatatcttccttggcttctacattctcaggtttccatactgtcttgagtgcaccatccaatttacttacatcagcggatagcacatcaagttttgtgctttggtttcatttaacttcacaatgttgggtgcttcctgttagtgctgccagcagtcagttgaattatatcatttattaggaacacaatgaaaagctcttcagccttggacagttcaaaagctggcttagagcagaaaaccaacattccttttataattgtatgcatgtaagatgtagcatggtatatgaactgatcaggaatggtggttttctcgtgcagttccgctgtccatctacgctttcaccctaccactgccgtatatcggtgtggcatcatctctgccacctggctttgttgcgggtgcagcagtactcaccgctggcttactactgtacagcctaccacaggcacgacattttggaaatactttttcacaacaaaaatgactagttagcatccatttcttcattgatttatcacccttcattccaagatggtgctgggttcgaaaggtagaacagaagttctcctcagggccacctgactgatgtactccgatgttgtatggtacatatcatatatatgtatacccaccaataaaggcgaggaaatagcatactgatatatagggaataaagatcgagaggaggactaagtatctggcagtcagacatttgatgttactgagtgtgaaggtcggagaagagtatgcacagcgggggcagtagcatcatcaccgcagggacgaagtgaaaagatcagcggttgcagcaccaatgacagccacaggaggatcactgtcgctgccagcaacatcatcagtactcctttgctcatcgtcgacgccaccgccctgccctcctctggctccccggctcctgtcttttttttctaggttttcatgtttgttgtgaggaagttgttgtaccatgtgtgagagaaagaaaacgttgtaccctacggagctgggaagctatatatgggccagatggggtgttttggcatgtgtgtccatgtgactgggcatgtttgaattttttatccttttaagcatgtgtgcttccatttccagtagaaagctgtacttttggcggacccggaccgttgtaccatgtgtgagagaaagaaaacgttgtaccctacggagctgggaagctatatatgggccagatggggtgttttggcatgtgtgtccatgtgactgggcatgtttgaattttttatccttttaagcatgtgtgcttccatttccagtagaaagctgtacttttggcggacccggaccgtatttctatctattatatgaatttctatatattattattatatgaaagccggatggaaacct

SEQ ID NO: 77722 - DNA, 2432 bp, Zea Mays
aaaacaaaaaaagtaaacgagcacttagaacgggacgggaacacaagcagcaggggcgaagcagaacagcacgagccgcctccgcctccgcccccgctgggaatcttcctcctcagccatcccatttcattataggcattccattccaccaccggcgcatacaaaaaatcagcagcgatcgcgccactccgccgcgcaggcaggcggttccgtcccggctcttcccacccaccccgccgaggatggcgccgtcccccgtcacgtgccgcccctccgcggcgcggcaccgcccgctgctggtccgcgcccccgcgccgcgcgctgccgacggggcggcgctgatgctgccgctgccgctgcggaggagggaggcgctgctggccgcagcggcgcggccgcacgcgcggtggatcgcggcggacccgtgggcgtcggcacacgcctggacgagccctggaaggggcaggggggacgcgacaaggtgcgcggcggcggggcgggtcgcggggagcagcagcgcgggcgccgggaggagcgccgggatggaggtggccatcgccgccgctgcggtcgtcgccatgggcacggggaaccgcgtcctctacaagctcgcgctcgtgccgctccgggagtaccccttcttcctggcgcagttcgccacgttcggatatgtagttgtctatttctcgatcctgtatcttcgatatcaagcgggcattgtcaccgatgagatgctgtctctaccacagaaaccttttctagttgtaggactcttagaggcttttgcggcagcagcaggaatggcagctggagacttatcttgtctggcagcttcttctatctgctattttcttgaagaggcgctatagaattaatgagatagcaggatgctttctagtgaccgttggtgtcataataactgtagcaagtggatctggtactagtgcttcatttaaaagtactggaattttatggccactgctaatgataatatcgttctttctccaagctgctgacacagtattgaaggaaatcatatttctagatgcttctaagaaactgaagtgtggctcagttgatctttttgttgtcaattcatacggctctgcttatcaagctctttttatgtgtctcttgcttcctttcctgtcaaagttatggggagttccattccgtgtgttaccaacgtacattaaagatggtgcagcctgcttcttaaatatgggatcaatatctggttgtgaaggggcgccgctactaccactactatttgtgttggttaacatgggattcaatatatcattactacacctgctaaagatctcctcggcagtcatatcttccttggcttctacattctcagttccgctgtccatctacgctttcaccctaccactgccgtatatcggtgtggcatcatctctgccacctggctttgttgcgggtgcagcagtactcaccgctggcttactactgtacagcctaccacaggcacgacattttggaaatactttttcacaacaaaaatgactagttagcatccatttcttcattgatttatcacccttcattccaagatggtgctgggttcgaaaggtagaacagaagttctcctcagggccacctgactgatgtactccgatgttgtatggtacatatcatatatatgtatacccaccaataaaggcgaggaaatagcatactgatatatagggaataaagatcgagaggaggactaagtatctggcagtcagacatttgatgttactgagtgtgaaggtcggagaagagtatgcacagcgggggcagtagcatcatcaccgcagggacgaagtgaaaagatcagcggttgcagcaccaatgacagccacaggaggatcactgtcgctgccagcaacatcatcagtactcctttgctcatcgtcgacgccaccgccctgccctcctctggctccccggctcctgtcttttttttctaggttttcatgtttgttgtgaggaagttgttgtaccatgtgtgagagaaagaaaacgttgtaccctacggagctgggaagctatatatgggccagatggggtgttttggcatgtgtgtccatgtgactgggcatgtttgaattttttatccttttaagcatgtgtgcttccatttccagtagaaagctgtacttttggcggacccggaccgttgtaccatgtgtgagagaaagaaaacgttgtaccctacggagctgggaagctatatatgggccagatggggtgttttggcatgtgtgtccatgtgactgggcatgtttgaattttttatccttttaagcatgtgtgcttccatttccagtagaaagctgtacttttggcggacccggaccgtatttctatctattatatgaatttctatatattattattatatgaaagccggatggaaacct

SEQ ID NO: 77723 - DNA, 2462 bp, Zea Mays
caaaaacaaaaaaagtaaacgagcacttagaacgggacgggaacacaagcagcaggggcgaagcagaacagcacgagccgcctccgcctccgcccccgctgggaatcttcctcctcagccatcccatttcattataggcattccattccaccaccggcgcatacaaaaaatcagcagcgatcgcgccactccgccgcgcaggcaggcggttccgtcccggctcttcccacccaccccgccgaggatggcgccgtcccccgtcacgtgccgcccctccgcggcgcggcaccgcccgctgctggtccgcgcccccgcgccgcgcgctgccgacggggcggcgctgatgctgccgctgccgctgcggaggagggaggcgctgctggccgcagcggcgcggccgcacgcgcggtggatcgcggcggacccgtgggcgtcggcacacgcctggacgagccctggaaggggcaggggggacgcgacaaggtgcgcggcggcggggcgggtcgcggggagcagcagcgcgggcgccgggaggagcgccgggatggaggtggccatcgccgccgctgcggtcgtcgccatgggcacggggaaccgcgtcctctacaagctcgcgctcgtgccgctccgggagtaccccttcttcctggcgcagttcgccacgttcggatatgtagttgtctatttctcgatcctgtatcttcgatatcaagcgggcattgtcaccgatgagatgctgtctctaccacagaaaccttttctagttgtaggactcttagaggcttttgcggcagcagcaggaatggcagctggagctgttctttctggggcttcaataccaatattgtcacagacttatcttgtctggcagcttcttctatctgctattttcttgaagaggcgctatagaattaatgagatagcaggatgctttctagtgaccgttggtgtcataataactgtagcaagtggatctggtactagtgcttcatttaaaagtactggaattttatggccactgctaatgataatatcgttctttctccaagctgctgacacagtattgaaggaaatcatatttctagatgcttctaagaaactgaagttgatctttttgttgtcaattcatacggctctgcttatcaagctctttttatgtgtctcttgcttcctttcctgtcaaagttatggggagttccattccgtgtgttaccaacgtacattaaagatggtgcagcctgcttcttaaatatgggatcaatatctggttgtgaaggggcgccgctactaccactactatttgtgttggttaacatgggattcaatatatcattactacacctgctaaagatctcctcggcagtcatatcttccttggcttctacattctcagttccgctgtccatctacgctttcaccctaccactgccgtatatcggtgtggcatcatctctgccacctggctttgttgcgggtgcagcagtactcaccgctggcttactactgtacagcctaccacaggcacgacattttggaaatactttttcacaacaaaaatgactagttagcatccatttcttcattgatttatcacccttcattccaagatggtgctgggttcgaaaggtagaacagaagttctcctcagggccacctgactgatgtactccgatgttgtatggtacatatcatatatatgtatacccaccaataaaggcgaggaaatagcatactgatatatagggaataaagatcgagaggaggactaagtatctggcagtcagacatttgatgttactgagtgtgaaggtcggagaagagtatgcacagcgggggcagtagcatcatcaccgcagggacgaagtgaaaagatcagcggttgcagcaccaatgacagccacaggaggatcactgtcgctgccagcaacatcatcagtactcctttgctcatcgtcgacgccaccgccctgccctcctctggctccccggctcctgtcttttttttctaggttttcatgtttgttgtgaggaagttgttgtaccatgtgtgagagaaagaaaacgttgtaccctacggagctgggaagctatatatgggccagatggggtgttttggcatgtgtgtccatgtgactgggcatgtttgaattttttatccttttaagcatgtgtgcttccatttccagtagaaagctgtacttttggcggacccggaccgttgtaccatgtgtgagagaaagaaaacgttgtaccctacggagctgggaagctatatatgggccagatggggtgttttggcatgtgtgtccatgtgactgggcatgtttgaattttttatccttttaagcatgtgtgcttccatttccagtagaaagctgtacttttggcggacccggaccgtatttctatctattatatgaatttctatatattattattatatgaaagccggatggaaacct

SEQ ID NO: 77724 - DNA, 2812 bp, Zea Mays
ctccacgccacgcctgcacccaccaccaaaaacaaaaaaagtaaacgagcacttagaacgggacgggaacacaagcagcaggggcgaagcagaacagcacgagccgcctccgcctccgcccccgctgggaatcttcctcctcagccatcccatttcattataggcattccattccaccaccggcgcatacaaaaaatcagcagcgatcgcgccactccgccgcgcaggcaggcggttccgtcccggctcttcccacccaccccgccgaggatggcgccgtcccccgtcacgtgccgcccctccgcggcgcggcaccgcccgctgctggtccgcgcccccgcgccgcgcgctgccgacggggcggcgctgatgctgccgctgccgctgcggaggagggaggcgctgctggccgcagcggcgcggccgcacgcgcggtggatcgcggcggacccgtgggcgtcggcacacgcctggacgagccctggaaggggcaggggggacgcgacaaggtgcgcggcggcggggcgggtcgcggggagcagcagcgcgggcgccgggaggagcgccgggatggaggtggccatcgccgccgctgcggtcgtcgccatgggcacggggaaccgcgtcctctacaagctcgcgctcgtgccgctccgggagtaccccttcttcctggcgcagttcgccacgttcggatatgtagttgtctatttctcgatcctgtatcttcgatatcaagcgggcattgtcaccgatgagatgctgtctctaccacagaaaccttttctagttgtaggactcttagaggcttttgcggcagcagcaggaatggcagctggaggtaattttctcaagaccagattcgtcttttttgtggccatgtaatgactgaagcaacatccgcctacctgttagtcacaattaactctatgctcttagagattttctaataacttatgccactcaatgtgcacaaaaaactaggaacattgttgtagtcaatttgaggttaacagttccacgccttcacttgtacttctgtactgatgcttttgagtttggttaggtagtctgttcgtgaaagtaagtgtacttgacatgaactatatgaagtttctcctcacagttttatttgttttgtttttgttggagtagctgttctttctggggcttcaataccaatattgtcacagacttatcttgtctggcagcttcttctatctgctattttcttgaagaggcgctatagaattaatgagatagcaggatgctttctagtgaccgttggtgtcataataactgtagcaagtggatctggtactagtgcttcatttaaaagtactggaattttatggccactgctaatgataatatcgttctttctccaagctgctgacacagtattgaaggaaatcatatttctagatgcttctaagaaactgaagtgtggctcagttgatctttttgttgtcaattcatacggctctgcttatcaagctctttttatgtgtctcttgcttcctttcctgtcaaagttatggggagttccattccgtgtgttaccaacgtacattaaagatggtgcagcctgcttcttaaatatgggatcaatatctggttgtgaaggggcgccgctactaccactactatttgtgttggttaacatgggattcaatatatcattactacacctgctaaagatctcctcggcagtcatatcttccttggcttctacattctcagttccgctgtccatctacgctttcaccctaccactgccgtatatcggtgtggcatcatctctgccacctggctttgttgcgggtgcagcagtactcaccgctggcttactactgtacagcctaccacaggcacgacattttggaaatactttttcacaacaaaaatgactagttagcatccatttcttcattgatttatcacccttcattccaagatggtgctgggttcgaaaggtagaacagaagttctcctcagggccacctgactgatgtactccgatgttgtatggtacatatcatatatatgtatacccaccaataaaggcgaggaaatagcatactgatatatagggaataaagatcgagaggaggactaagtatctggcagtcagacatttgatgttactgagtgtgaaggtcggagaagagtatgcacagcgggggcagtagcatcatcaccgcagggacgaagtgaaaagatcagcggttgcagcaccaatgacagccacaggaggatcactgtcgctgccagcaacatcatcagtactcctttgctcatcgtcgacgccaccgccctgccctcctctggctccccggctcctgtcttttttttctaggttttcatgtttgttgtgaggaagttgttgtaccatgtgtgagagaaagaaaacgttgtaccctacggagctgggaagctatatatgggccagatggggtgttttggcatgtgtgtccatgtgactgggcatgtttgaattttttatccttttaagcatgtgtgcttccatttccagtagaaagctgtacttttggcggacccggaccgttgtaccatgtgtgagagaaagaaaacgttgtaccctacggagctgggaagctatatatgggccagatggggtgttttggcatgtgtgtccatgtgactgggcatgtttgaattttttatccttttaagcatgtgtgcttccatttccagtagaaagctgtacttttggcggacccggaccgtatttctatctattatatgaatttctatatattattattatatgaaagccggatggaaacct

SEQ ID NO: 77725 - DNA, 797 bp, Zea Mays
ctatgtcctatgaatgaatatatcatcggggatggaacgaggagaggacattattgaggagaagcaagctggtggagctgctacgagtgatgagagatcgtcatcccaaaaggtcgccgatggaaagggcgccgagccaccggcggccggagtctcgaaccgcctaaagcctagcgacgacgcagagaagcttgttgcgttcatggaagaccactacgacgacgtcgttgcccgcgtgcaatccttcgacgagttctaccacgccattttcgagctcatcgagatgttctgcgaggaacgtgggcagctgcagtacaggttagcggagaagaaagccctcgaggaggcatacaacaagcaccacaggtcggacggcaaggtgacgaaggaggagttcgaggcgatgagcagggaggtggtgaaggcgggcagcttcagggtggggaaggcgagcctggagcttggcgcgctgctgttcggcgccccggcgtgcgcgctgctggccaagaggatcctgccgggcctgggctggctgtccgacgacgtcgtcgtgcccctcgccacctccggctccgtcgcctacctcatcaagtccaagaggctgtgagcctagctgtgactgtctctgtggaccaagagagggttctgatgtgtattatgagattaatttgcacacgtacgtgcagtggataggactcgatctgcagctgaaacaagcaaagaattatatatataagcatggaatatgtatgatatgtgttagaaatttagtcaatttaatcagaaatctaatccca

SEQ ID NO: 77726 - DNA, 2002 bp, Zea Mays
cgtaaactaaatattagctggctacttcccttgcaacgattggttgtgttgtgtggctacaaatacgaatacacagcagccctctgctctctgcacctgcgcattttgtaaaggtacgaggagcaaggtgaggcaccaccagtaccaaccgggctccgagttcatcacgcacgcatggaaggctcggcggcacaggcgccggggaagaccgtcctgagggtggtggcgatctccggctcgctgcgcagggcgtcggccaacaccggcctcatccgcgccgccgcggagatctgcagggagtcgatcccggggctggaggtggagcacgtggacatctcggagctgccgctgctgaacaccgacctggagggcccgggccccggcgcgttcccggcggccgtcgaggcgttccgcggcaaggtgcgcgccgccgactgcttcctgttcgcgtcgcccgagtacaactactccatctcgggcccgctcaagaacgcgctggactgggggtcgcgcccgcccaactgctggggcgacagggccgccgccatcctcagcgcgtcgggcgggtcggggggcagccgctcgcagtaccacgtccgccaggtcggcgtcttcctcgacctccacttcgtcaacaagcccgaggtgttcaccagggcgcaccagccgcccagcaagttcgacgacgacggcaacctcgtcgacccggacaccaaggaccaggtcaccaaggtgctcctggcgctgcaggctctcgcgctcaggctgcacctggggaagctcgctgttgctgcacactcttcttgaacgtcgtcgtcgtcgggggtgcactaaactacactacacatcgtcgccgagctccaaatgccgtgccgtgtccgtgtgtgcgcgcttcaataaattctcggcgtccaacttttaatgagtgatgcacaatcgtgttcatttgtgagatgccctgatcgaatcgatccgtttgcgttttgccacgatcatcaaagaccaaaagagaaagaagaagaggaggaggaagcttccgtgctgacagtaccaacatcagcaagcaacctcctccaagaacaggggaaacagccacgccattgctgccgtaagcaagaggtcgacaggtgcgtgcgttacgtgcgtgctcgtcatgtatattcatgccgtcagagtcaacctccggcgtcaaccggttcctgttgcatcatccctcggttcagtgatacggagtagaatcgaacgtatctactgtgttctaataagttaaaaggtggttgatctcactcagggagttaatatagatcctcactaacttataagatagagtccaatgtacactatccctaaaattatttaaaaaaaaaagggagatatacgtgctacacgcgcgttcactcgccctgccaaagccgccatggccaagacgttccgtgaagggggcgtgatgtgctagaattcaatctcatcaatagcgtctaagttcttcatgcttactcttttctcgcctataataaggacatgtcacacacacacctccctcttagatcacattctctgacaactcgtgtattcctgcatacaagacatctcgctttcttcctcaaagcttcctgatattaccgagaagagcatctccatcaccaaggctctacgtgcatggacccgacaagagtagccctctgaattcctgactgttaaagatcatgtccagggtagcgaccaataaagtttttttgggggaacatttacatgcaactgctcgttggacagctacatcatctactttctaacggttgttcgaaggactgcactgcatcaactcttcactatgttagactttacagctacaccaattaagaacaatcaattagtatgactgctccacttggtaataacgcatccaatacctctggcaatagcttcgcgtcattgtactcttcctcaaacttcttgttttatactatcatggttaaaatgatgttaaacatgcatagattat

SEQ ID NO: 77727 - DNA, 1521 bp, Zea Mays
ggcggctgggcgcgcgtctgacgtgccgtgccgtaccatggctgccaggctgcgccgctcgcctatatcctcccctcctcccccgccttccctctgcatctccctctacccgccgccacattcatcagtagaaaccacctatcctgcctgctctacctacctccgctccccagccatgacggtgctggacgccgagtcgcggttccatgtcctggcggtggacgacagcatcatcgacaggaagctcatcgagatgctgctcaagagctcgtcttaccaagtgaccacggtggattccgggaacaaggcgctggagctgctggggctgagggacaacggcgcggaggacgcgtcgccgccgtcatcgtcctcatcatcttcgtcgtcgtcctcccctgaccatcaggtgcttgcaggatggcgcggaggagttcttcctgaagcccgtgaagccggccgacatgaagaagctcaagtcacacctgctgaagcggaagcagcccaaccagaagaacaagcctcaggcgcaggcggtggagtctcctgagcagcagctggacccgcatccgcagccggtgcacgagccggaggaagccgcggcagatcgcaacggcgtcaacaagaggaaggcagcggccatggaggaggggctgaccgtggtggtgacggcgccggagagcaccaagccgaggaggctgtctacgagcagcctgactgtggagacctgatcaaccgtggcgacctacgggctacggctacgcacattaatctagcagtggatgcaagccccagtcccagccccgccgccaagaaacacattttggttctgggagctaacggagggaagtgacaaacaattaaattatatgtagcggctgctgcttcggcctgcaaattttgttgcgctaacggtcatggacatggacatggacaccatcccttgtgttcgttaatcgttcggaaggggaaaagaagaagaagctgtagataaaaaaaggacaggcggctaattgttaatttccgcatggcttaattctggcaacgacctgctggctcaatcaaaaacctgtgacggacagacggatggatcaactgatgatgttgttgttttggctcggttcttcttccttgtacactgagtgttcagatgaacatgttgtaatctgaacatccgttcatgtcagcctgcctgacgatggaggcaaaagttcttctacatcatggtcaaggacaacgtttcagtggtcctccccgccggtgaccggtcccctcgagacaacgggagagacggacagacagacagacaagatctccattcagacgcaacatgtgacatgtcctcctttttttttcctttttacatgagaaaaagaaacaatcgcctaggagtgaactgtaactgtgacagtaagaaactgccagcactgactaatttacagatgaagaatactggcacggcatcctttttttaggccaaggcgaggcatcgaagcaactgctggtgcctggtggttgggcggg

SEQ ID NO: 77728 - DNA, 855 bp, Zea Mays
cggggatcgaggccacgccgctgcgtgggcggctgggcgcgcgtctgacgtgccgtgccgtaccatggctgccaggctgcgccgctcgcctatatcctcccctcctcccccgccttccctctgcatctccctctacccgccgccacattcatcagtagaaaccacctatcctgcctgctctacctacctccgctccccagccatgacggtgctggacgccgagtcgcggttccatgtcctggcggtggacgacagcatcatcgacaggaagctcatcgagatgctgctcaagagctcgtcttaccaagtgaccacggtggattccgggaacaaggcgctggagctgctggggctgagggacaacggcgcggaggacgcgtcgccgccgtcatcgtcctcatcatcttcgtcgtcgtcctcccctgaccatcaggagatcgacgtgagtctcatcatcactgactactgcatgcccggcatgacaggatacgatctgctcaagcgagtgaaggggtcctcatcgctcaaggacattccggtggtgatcatgtcgtctgagaacgtgcctgcccggatcagcagtatactccgtagaatcagccgaccggtgcctgtcgaggtaccagatggagccgtgctgttgttcttgcctgcctggctgcctgtttcttcccaactggaagggttggggctgttaagggagcagatggaatattaacgccatcatgctagatcaccagttctgcatgaaatgattcagaatggatcgagacaatgtgtgaggaatattgtttagtaatttgttttcttttttctttttacaaaaaagccgcctagggattacgtatttattta

SEQ ID NO: 77729 - DNA, 1152 bp, Zea Mays
aaaaaatcatctcgctgtgctccgcccactcctgcaagccactcctccctatttatatttgtagctatccctgtgtaccaaagcttgaagccggaagctggaagaggaactcaatggttggctgggggcagccggtctaaccaagtctcctgatgttagggcagtaattgcaccccacgctggttattcatactcgggccgatgtgcagcttatgcttttggcaacatcgatccaactaacatttctcgggtgtttctgcttggcccttctcatcactactacactccaaaatgtgctttaaccagggcttctgtctactgtaccccaatcggggatttgccagtagaccaggaagtcattgaggaactcagtgctactggaaagtttgaatttatggaccttaatgtggatgaagctgaacatagcatggaaatgcatttgccctaccttgctaaagtatttcaaggacataatgtgaaagtcgtccctatccttgttggtgcacttagctcccaaaacgaagccttgtatgggcagctgctctccaaatatgtggatgacccaaaaaacttcttttccgtgtcgtcagacttctgccattggggatccaggtttagctacacatactacgaaaagaagcacggtgccatccataaatctatcgaggccttggaccgtatgggcatggagatcatagagactggcgatcccgtagcgttcaaagaatacctgcaggagtacgagaacaccatatgcggacgccaccccatcagcgtcttccttcacatgttgaaacattgctcgacaaaaattaagataggctttgtccgctacgagcagtccagccagtgcaagaacatgagggatagcagcgtgagctatgcatccgcagcagcgaaggttgctggtgcatccggggaagaagataaacaagactgagcgagctacagctctgtttgatatactatatataagccgccaaaccttggtgcggaatgtgtgactggtttcccataagaaaaagaacatgtgatttggtaaaacattttcttcttcagtaaaataaataaatatgcagactgctggggatctgtactaattaattaagagattttcctaacaaagtaaaaaaatatataaataataatcaa

SEQ ID NO: 77730 - DNA, 1089 bp, Zea Mays
attctctccttccttcgtactcaaacaacggaagctggaagaggaactcaatggttggctgggggcagccggtctaaccaagtctcctgatgttagggcagtaattgcaccccacgctggttattcatactcgggccgatgtgcagcttatgcttttggcaacatcgatccaactaacatttctcgggtgtttctgcttggcccttctcatcactactacactccaaaatgtgctttaaccagggcttctgtctactgtaccccaatcggggatttgccagtagaccaggaagtcattgaggaactcagtgctactggaaagtttgaatttatggaccttaatgtggatgaagctgaacatagcatggaaatgcatttgccctaccttgctaaagtatttcaaggacataatgtgaaagtcgtccctatccttgttggtgcacttagctcccaaaacgaagccttgtatgggcagctgctctccaaatatgtggatgacccaaaaaacttcttttccgtgtcgtcagacttctgccattggggatccaggtttagctacacatactacgaaaagaagcacggtgccatccataaatctatcgaggccttggaccgtatgggcatggagatcatagagactggcgatcccgtagcgttcaaagaatacctgcaggagtacgagaacaccatatgcggacgccaccccatcagcgtcttccttcacatgttgaaacattgctcgacaaaaattaagataggctttgtccgctacgagcagtccagccagtgcaagaacatgagggatagcagcgtgagctatgcatccgcagcagcgaaggttgctggtgcatccggggaagaagataaacaagactgagcgagctacagctctgtttgatatactatatataagccgccaaaccttggtgcggaatgtgtgactggtttcccataagaaaaagaacatgtgatttggtaaaacattttcttcttcagtaaaataaataaatatgcagactgctggggatctgtactaattaattaagagattttcctaacaaagtaaaaaaatatataaataataatcaa

SEQ ID NO: 77731 - DNA, 1090 bp, Zea Mays
attctctccttccttcgtactcaaacaacgggaagctggaagaggaactcaatggttggctgggggcagccggtctaaccaagtctcctgatgttagggcagtaattgcaccccacgctggttattcatactcgggccgatgtgcagcttatgcttttggcaacatcgatccaactaacatttctcgggtgtttctgcttggcccttctcatcactactacactccaaaatgtgctttaaccagggcttctgtctactgtaccccaatcggggatttgccagtagaccaggaagtcattgaggaactcagtgctactggaaagtttgaatttatggaccttaatgtggatgaagctgaacatagcatggaaatgcatttgccctaccttgctaaagtatttcaaggacataatgtgaaagtcgtccctatccttgttggtgcacttagctcccaaaacgaagccttgtatgggcagctgctctccaaatatgtggatgacccaaaaaacttcttttccgtgtcgtcagacttctgccattggggatccaggtttagctacacatactacgaaaagaagcacggtgccatccataaatctatcgaggccttggaccgtatgggcatggagatcatagagactggcgatcccgtagcgttcaaagaatacctgcaggagtacgagaacaccatatgcggacgccaccccatcagcgtcttccttcacatgttgaaacattgctcgacaaaaattaagataggctttgtccgctacgagcagtccagccagtgcaagaacatgagggatagcagcgtgagctatgcatccgcagcagcgaaggttgctggtgcatccggggaagaagataaacaagactgagcgagctacagctctgtttgatatactatatataagccgccaaaccttggtgcggaatgtgtgactggtttcccataagaaaaagaacatgtgatttggtaaaacattttcttcttcagtaaaataaataaatatgcagactgctggggatctgtactaattaattaagagattttcctaacaaagtaaaaaaatatataaataataatcaa

SEQ ID NO: 77732 - DNA, 1166 bp, Zea Mays
tgcagttgcagctagctgctcgccacaactggcgcgccgcactcaccgcgccagtacgccacgctcgggctcgatcggcatcgattcccccaatcccgcacccgcacacccggctcgcaatccctagcactagcagcgccgcggcggcaggcaggcagggggggggggggggggggtgccggaggccgctcgtagcacggaacgtctccggatcgatccatggagcgcgcgaggagggcttcgcacgccggctcttgttctcgggtgtttctgcttggcccttctcatcactactacactccaaaatgtgctttaaccagggcttctgtctactgtaccccaatcggggatttgccagtagaccaggaagtcattgaggaactcagtgctactggaaagtttgaatttatggaccttaatgtggatgaagctgaacatagcatggaaatgcatttgccctaccttgctaaagtatttcaaggacataatgtgaaagtcgtccctatccttgttggtgcacttagctcccaaaacgaagccttgtatgggcagctgctctccaaatatgtggatgacccaaaaaacttcttttccgtgtcgtcagacttctgccattggggatccaggtttagctacacatactacgaaaagaagcacggtgccatccataaatctatcgaggccttggaccgtatgggcatggagatcatagagactggcgatcccgtagcgttcaaagaatacctgcaggagtacgagaacaccatatgcggacgccaccccatcagcgtcttccttcacatgttgaaacattgctcgacaaaaattaagataggctttgtccgctacgagcagtccagccagtgcaagaacatgagggatagcagcgtgagctatgcatccgcagcagcgaaggttgctggtgcatccggggaagaagataaacaagactgagcgagctacagctctgtttgatatactatatataagccgccaaaccttggtgcggaatgtgtgactggtttcccataagaaaaagaacatgtgatttggtaaaacattttcttcttcagtaaaataaataaatatgcagactgctggggatctgtactaattaattaagagattttcctaacaaagtaaaaaaatatataaataataatcaa

SEQ ID NO: 77733 - DNA, 1316 bp, Zea Mays
tgcagttgcagctagctgctcgccacaactggcgcgccgcactcaccgcgccagtacgccacgctcgggctcgatcggcatcgattcccccaatcccgcacccgcacacccggctcgcaatccctagcactagcagcgccgcggcggcaggcaggcagggggggggggggggggggtgccggaggccgctcgtagcacggaacgtctccggatcgatccatggagcgcgcgaggagggcttcgcacgccggctcttggaagctggaagaggaactcaatggttggctgggggcagccggtctaaccaagtctcctgatgttagggcagtaattgcaccccacgctggttattcatactcgggccgatgtgcagcttatgcttttggcaacatcgatccaactaacatttctcgggtgtttctgcttggcccttctcatcactactacactccaaaatgtgctttaaccagggcttctgtctactgtaccccaatcggggatttgccagtagaccaggaagtcattgaggaactcagtgctactggaaagtttgaatttatggaccttaatgtggatgaagctgaacatagcatggaaatgcatttgccctaccttgctaaagtatttcaaggacataatgtgaaagtcgtccctatccttgttggtgcacttagctcccaaaacgaagccttgtatgggcagctgctctccaaatatgtggatgacccaaaaaacttcttttccgtgtcgtcagacttctgccattggggatccaggtttagctacacatactacgaaaagaagcacggtgccatccataaatctatcgaggccttggaccgtatgggcatggagatcatagagactggcgatcccgtagcgttcaaagaatacctgcaggagtacgagaacaccatatgcggacgccaccccatcagcgtcttccttcacatgttgaaacattgctcgacaaaaattaagataggctttgtccgctacgagcagtccagccagtgcaagaacatgagggatagcagcgtgagctatgcatccgcagcagcgaaggttgctggtgcatccggggaagaagataaacaagactgagcgagctacagctctgtttgatatactatatataagccgccaaaccttggtgcggaatgtgtgactggtttcccataagaaaaagaacatgtgatttggtaaaacattttcttcttcagtaaaataaataaatatgcagactgctggggatctgtactaattaattaagagattttcctaacaaagtaaaaaaatatataaataataatcaa

SEQ ID NO: 77734 - DNA, 1180 bp, Zea Mays
tgcagttgcagctagctgctcgccacaactggcgcgccgcactcaccgcgccagtacgccacgctcgggctcgatcggcatcgattcccccaatcccgcacccgcacacccggctcgcaatccctagcactagcagcgccgcggcggcaggcaggcagggggggggggggggggggtgccggaggccgctcgtagcacggaacgtctccggatcgatccatggagcgcgcgaggagggcttcgcacgccggctcttggtacaccaacgatgttctcgggtgtttctgcttggcccttctcatcactactacactccaaaatgtgctttaaccagggcttctgtctactgtaccccaatcggggatttgccagtagaccaggaagtcattgaggaactcagtgctactggaaagtttgaatttatggaccttaatgtggatgaagctgaacatagcatggaaatgcatttgccctaccttgctaaagtatttcaaggacataatgtgaaagtcgtccctatccttgttggtgcacttagctcccaaaacgaagccttgtatgggcagctgctctccaaatatgtggatgacccaaaaaacttcttttccgtgtcgtcagacttctgccattggggatccaggtttagctacacatactacgaaaagaagcacggtgccatccataaatctatcgaggccttggaccgtatgggcatggagatcatagagactggcgatcccgtagcgttcaaagaatacctgcaggagtacgagaacaccatatgcggacgccaccccatcagcgtcttccttcacatgttgaaacattgctcgacaaaaattaagataggctttgtccgctacgagcagtccagccagtgcaagaacatgagggatagcagcgtgagctatgcatccgcagcagcgaaggttgctggtgcatccggggaagaagataaacaagactgagcgagctacagctctgtttgatatactatatataagccgccaaaccttggtgcggaatgtgtgactggtttcccataagaaaaagaacatgtgatttggtaaaacattttcttcttcagtaaaataaataaatatgcagactgctggggatctgtactaattaattaagagattttcctaacaaagtaaaaaaatatataaataataatcaa

SEQ ID NO: 77735 - DNA, 3714 bp, Zea Mays
tggctcatctctctccccgcgtgtccgtccgggtttccgcctgtgcgttgcctgctgcctctgatccactgatcagtggcctcgcctccccgtgttccgctcccccctcccgccccctgatcccgcgatcggcggggcgcccgccctctctctctccgtgagtgtagcagatccggcgacccgcaggccctccgccggccgccccgccggacgatctagatccaggggaagcatctgctatcattttgttttcttcgaagtaatccaagaaaagttgcttccagatgtcaactgcaaaagtgttagatcctgcttttcaaggggctggccaaaaagttgggacagaaatatggcggattgaagattttaagccagttccgctgccaaaatctgattatgacgacctgtactaaaggtggtgcctatctatatgatatccacttctggattgggaaagattcgagtcaagatgaagctgggactgcagcaatcaagacagttgaacttgatgccatccttgggggtcgtgcaatccaacatagggaactccaaggttatgaatctgacaaattcttgtcatacttcaagccttgcattatacctttggagggtggtttcgcctctgggttcaaaaagcctgaagaggagaagtttgaaacacggttgtatatttgcagagggaagagagctattcgggttaaagaggttcccttcgcccggtcatcattaaaccatgatgatgtgtttgtcttagatgctgaaaataagatataccagtttaatggtgctaactccaatatccaagaaagggccaaagcgttggaagtaatccaacatttaaaggagaagtaccatgggggtgtttgcgatgttgcgatcgttgatgatgggaaattacaggcagagtcagactctggtgaattctgggtcctttttggaggttttgcaccaattgggaaaaaaaccgtgagtgatgatgatgttgtacttgaaactacagcaccaaggctgtacagcatcaatgatggccaattgaagctggaagaaacagctcttacaaaagccgtgcttgaaaataccaaatgtttcttacttgactgtggggctgaaatatatgtatgggttggccgggtaacacaaatggaggatagaaaatctgccactaaagcagttgaggaatttcttattaatcaaaagcgtccaaagacaacgagggtaactcaagtgattcaaggttatgagagtcatgctttcaagtccaagtttgaatcatggccagtgggtaatgctactgggagccctggcgcagaggaagggcggggaaaagttgcagctttattgaagcaacaaggtgttgatctcaaaggagctgcaaaaagcaccactccagtaaatgaggaagttcctcctttgcttgaaggcggtggaaagcttgaggtatggtgtgttgatggcaacgctaagactgctctgccaaaagaggatattggaaagttttacagtggagactgttatatcattctctatacgtatcattcgggcgacaagaaagaagaatactatctcagctactggattgggaaggatagcttggtggacgatcaagtgtcggcatctcaaataactaatacagtgtggaattcattgaaaggacggccagttctgttattttgtagggtcgtatataccaagggaaggagccaccacagtttgttgcacttttccagcccatgattatcttgaagggtggaattggatctggatacaagaagctcatagaagaaaagggtgcgacgggtgagacttatactactgaaggcatagctctaattcgagtatctgggacatctatccacaacaacaagactcttcaagtcgatacggtggcaacatctttaagctcaatggagtgtttcatactgcaatctggaaatgctatgtttacatggtttggcaattctagcacatatgagcaacagcagtgggcagcaaaagttgctgaatttttgaagcctggcgttgcagtgaagcactgcaaggaggggacagagagttcaggtttctggtttgctcttggaggaaaacagagttatacaaataaaaatgctcctcaggatattattactagagagcctcacttgtatgcattctcattcaagaacgggagactggaggtaactgagatcttcaacttttcccaagatgatttgttaactgaagacatgatgatacttgacacacatggtgaggttttcatttggattggtcagtgcgtggaatcaaaagagaaacagaaggcatttgatattggccagaaatacgtggagcatgcaaattctattgatgatctttctccatatgcaccactatataaagttatggaagggaatgagccatgcttcttcaagacatatttctcttgggataacacaaaatctttggttcatggaaattccttccagaagaaactctcactgctttttggattgcgttctgagggtgcatctaggagctctggtaatggtggaccaactcaaagggcatctgcattagcagctctatcatctgcattcaatccatcgtctcaacaaaggctctctaatgagaggcctaaaagcacaggcgatggacccactcaacgcgcctcagcactggctgccctatctaatgcattcaattcatccttaaaacccaaaacaccacctccatctcgctcaggtcaaggttcccaaagagcagctgccgtagctgcactatcctctgtgctgactgctgagcaatctggatcttcagaaaatctacgagccaaagctagcagcacaggagataagactgatgtcgataggcctgtcataactccagctggaccatctggtccatcttctcctcagtctgaagctggggagtccaatgtgtttcgccaggaaaaagatgctgcagtagatggggcaccatctgacactgatggagcagtggctgagacccgagaggaagaaacgacagagaatgttggtgaagcgacatttagctatgaccgcttgatatctaaatctaccgatccagtccgtgggatagattacaaacgcagagaggcatacttatctgatagtgagttccaaagtgtttttggcatgaccaaggatgcattctaccgacagccaaattggaagcaagaactacagaagcgaaaagcagatctcttctaaagagaacacgccttgtctcaagcgcctgctagaaaatgcgaccctctcgtcgtgaatggtcggtcccatgagagtaagtctcaatatattgctggttatttctgaggacgggctactggtggctttgctcggttgttttttttttgcaaccaattttataggccgattcttttatttgtacatggcctgggttgtgctgcttgcgaggtcctaagatgctcatagctttgtgttgtgactgtccatatgtgtatatcgttttttttcatcagtttgttacgtatgggcatatcctggtaggttgtcaattgtattgtcattcagatgtattgcacacgaaatacttgtgctgtctgtttgttgttgatggttggcagttgttttgtttgggatttgaaacacttgattggatttctctgcccgcacaagttttcgtgtggctttgcattcccccctcccttttcatagacaagcaacatgcaatgcttgtgacctgtcaagagaacat

SEQ ID NO: 77736 - DNA, 3883 bp, Zea Mays
caaaaacccgcctaccgccctggtcggtcgctgccggtggtccgtcgcggatcctgttacgtactgctagtagcacgtagaccgccgagccagagcaagcagtgccgtccccgtccatcatcgcctccgctgccctgcccttctctatttacactggccactctgttccagccttccaggtggctcatctctctccccgcgtgtccgtccgggtttccgcctgtgcgttgcctgctgcctctgatccactgatcagtggcctcgcctccccgtgttccgctcccccctcccgccccctgatcccgcgatcggcggggcgcccgccctctctctctccgtgagtgtagcagatccggcgacccgcaggccctccgccggccgccccgccggacgatctagatccaggggaagcatctgctatcattttgttttcttcgaagtaatccaagaaaagttgcttccagatgtcaactgcaaaagtgttagatcctgcttttcaaggggctggccaaaaagttgggacagaaatatggcggattgaagattttaagccagttccgctgccaaaatctgattatgacgacctgtactaaaggtggtgcctatctatatgatatccacttctggattgggaaagattcgagtcaagatgaagctgggactgcagcaatcaagacagttgaacttgatgccatccttgggggtcgtgcaatccaacatagggaactccaaggttatgaatctgacaaattcttgtcatacttcaagccttgcattatacctttggagggtggtttcgcctctgggttcaaaaagcctgaagaggagaagtttgaaacacggttgtatatttgcagagggaagagagctattcgggttaaagaggttcccttcgcccggtcatcattaaaccatgatgatgtgtttgtcttagatgctgaaaataagatataccagtttaatggtgctaactccaatatccaagaaagggccaaagcgttggaagtaatccaacatttaaaggagaagtaccatgggggtgtttgcgatgttgcgatcgttgatgatgggaaattacaggcagagtcagactctggtgaattctgggtcctttttggaggttttgcaccaattgggaaaaaaaccgtgagtgatgatgatgttgtacttgaaactacagcaccaaggctgtacagcatcaatgatggccaattgaagctggaagaaacagctcttacaaaagccgtgcttgaaaataccaaatgtttcttacttgactgtggggctgaaatatatgtatgggttggccgggtaacacaaatggaggatagaaaatctgccactaaagcagttgaggaatttcttattaatcaaaagcgtccaaagacaacgagggtaactcaagtgattcaaggttatgagagtcatgctttcaagtccaagtttgaatcatggccagtgggtaatgctactgggagccctggcgcagaggaagggcggggaaaagttgcagctttattgaagcaacaaggtgttgatctcaaaggagctgcaaaaagcaccactccagtaaatgaggaagttcctcctttgcttgaaggcggtggaaagcttgaggtatggtgtgttgatggcaacgctaagactgctctgccaaaagaggatattggaaagttttacagtggagactgttatatcattctctatacgtatcattcgggcgacaagaaagaagaatactatctcagctactggattgggaaggatagcttggtggacgatcaagtgtcggcatctcaaataactaatacagtgtggaattcattgaaaggacggccagttctgggtcgtatataccaagggaaggagccaccacagtttgttgcacttttccagcccatgattatcttgaagggtggaattggatctggatacaagaagctcatagaagaaaagggtgcgacgggtgagacttatactactgaaggcatagctctaattcgagtatctgggacatctatccacaacaacaagactcttcaagtcgatacggtggcaacatctttaagctcaatggagtgtttcatactgcaatctggaaatgctatgtttacatggtttggcaattctagcacatatgagcaacagcagtgggcagcaaaagttgctgaatttttgaagcctggcgttgcagtgaagcactgcaaggaggggacagagagttcaggtttctggtttgctcttggaggaaaacagagttatacaaataaaaatgctcctcaggatattattactagagagcctcacttgtatgcattctcattcaagaacgggagactggaggtaactgagatcttcaacttttcccaagatgatttgttaactgaagacatgatgatacttgacacacatggtgaggttttcatttggattggtcagtgcgtggaatcaaaagagaaacagaaggcatttgatattggccagaaatacgtggagcatgcaaattctattgatgatctttctccatatgcaccactatataaagttatggaagggaatgagccatgcttcttcaagacatatttctcttgggataacacaaaatctttggttcatggaaattccttccagaagaaactctcactgctttttggattgcgttctgagggtgcatctaggagctctggtaatggtggaccaactcaaagggcatctgcattagcagctctatcatctgcattcaatccatcgtctcaacaaaggctctctaatgagaggcctaaaagcacaggcgatggacccactcaacgcgcctcagcactggctgccctatctaatgcattcaattcatccttaaaacccaaaacaccacctccatctcgctcaggtcaaggttcccaaagagcagctgccgtagctgcactatcctctgtgctgactgctgagcaatctggatcttcagaaaatctacgagccaaagctagcagcacaggagataagactgatgtcgataggcctgtcataactccagctggaccatctggtccatcttctcctcagtctgaagctggggagtccaatgtgtttcgccaggaaaaagatgctgcagtagatggggcaccatctgacactgatggagcagtggctgagacccgagaggaagaaacgacagagaatgttggtgaagcgacatttagctatgaccgcttgatatctaaatctaccgatccagtccgtgggatagattacaaacgcagagaggcatacttatctgatagtgagttccaaagtgtttttggcatgaccaaggatgcattctaccgacagccaaattggaagcaagaactacagaagcgaaaagcagatctcttctaaagagaacacgccttgtctcaagcgcctgctagaaaatgcgaccctctcgtcgtgaatggtcggtcccatgagagtaagtctcaatatattgctggttatttctgaggacgggctactggtggctttgctcggttgttttttttttgcaaccaattttataggccgattcttttatttgtacatggcctgggttgtgctgcttgcgaggtcctaagatgctcatagctttgtgttgtgactgtccatatgtgtatatcgttttttttcatcagtttgttacgtatgggcatatcctggtaggttgtcaattgtattgtcattcagatgtattgcacacgaaatacttgtgctgtctgtttgttgttgatggttggcagttgttttgtttgggatttgaaacacttgattggatttctctgcccgcacaagttttcgtgtggctttgcattcccccctcccttttcatagacaagcaacatgcaatgcttgtgacctgtcaagagaacat

SEQ ID NO: 77737 - DNA, 946 bp, Zea Mays
ctttgttcatggcatggctttgagctgttagttaatagagattgctgagaagcacaactttttgatcttcgaagaccgcaagtttgctgacattggaaatacagtaaccatgcaatatgaaggaggaatattccgcatattggattgggccgatattgttaatgcgcatatagtacctggacctggaatcgtagatggcttgaagctgaagggtttgcctaaaggaagagggctacttctgctcgctgagatgagctctgccggcaaccttgcccatggagattacactgctgctgccgtaaagattgctgagcaacattctgattttgtgatgggatttatatcagtaaatcctgagtcttggtcagtaaaaccatcaagccctgcatttatccatgccacgcctggagttcagatggtcgcaggaggagatgatcttgggcaacaatacaacactcccgaatctgtgataaactacaggggcagtgacataatcatagttggccgtgggattataaaggcgagcgatcctatgaagaaggcgtgggagtaccgcttgcaagggtggcaggcatacaagaacagcttgctatgaaggaaggggggcgccatgagcatccccaagtataagggcgaatccagtcagtttggcgaaataagcgcatgcggaaaggttttcctgcagttgagtcaggacctaattgacatcagattcactgcagaggagactcatgccccatcatcgtttctgttacaataatttcctctcggtttaccctgttcttgctggttgagttaggcacgttgtgatgcctgtgcgcggttaaatcgtcttactgccatgccacttgaggtttggactcttgagcaagcaattttatcgatgccgagaattgtatgactctacgtgcttagtgctacttccgtcactgtgtgttggcgcggc

SEQ ID NO: 77738 - DNA, 4525 bp, Zea Mays
agaggacgattcacccgatgtaatacgcgattgttccaaccaagattcgaaggagaggcgacgcacggcctgactgtgcatcacatcgatgccttgcaccacatcgatgccttgcacctgtctctcatcacccccgtcctcggtggctggtgcggcgatcccttctccatccacagcgccgagagaggtctcaatggtgaggtctgccatcacgcacacaaacagtgggaagacctagaggcggcgggctgccatggtgaggtctgccgtctgccatcagcccatcacgcaggacgaataggaagaccatcagttgtgcgatcagcgtagggcgcctggttcggtccggtccggtccactgggccatcgggggcaaatcacaatgaaccagagagtgcaggagatacggcgggagggggtttatgtaaaattgctgctggacgttggatgaggaagggatggtccagattaaaagtgctcacatgtgcacgggagcgccatgagcacgggacacgatccctttttttttctcctcaaatctgaatcctgccaaaatacccgcagcccagctccgattccaacgaccaccgctccttcctcgccccagcctagcagcgcaggcgcggcgcagcgcaggccctgcgccgccctccgcgcacgtccaggtatccttcgaccgcaaccgcgcgcgcctctctccctcctcctgccgcaacacgtcctcctcgacgtcgtcgcctccgcccccaagaagtcgtacgtgatcgctccggacctccgtcgtttccttggatggatcggacgccattgttcatccggccggtctgcctccgttttgctcgctgaccgcccgcgctgagcccgcccgcccgctccctggcacgaggacgatgtagaggagcgcaagaacgggaggcggcgttggggacgacggggacgagatggaggggcgcaatcccgtgcagagattcgttgatagcccaaagccatacaacagaaggaaagcgcgcggtatgcaaacaaggatggattcgagtgaccacggcgaccgccaaggtccgagagcctgtgaagaattgccaggcaagatggataacgaccgtgccgatcgtcaacgcttgaaagcctgcgaattcccagccaagatggacaacaaccatgccgatcgtcaagtttcgaaagcctgcgaatcgaaaggcaatgcctgtgaattgccaggcaagatggataatgaccaccccgtccgtcaaggtttgaaagcccgtggactactgcaacctaagtcggatgctagtgaagatggcgtatgcgaaggtttgaaagcttgtggattgacagccaacaagatggatgctactgaccaatgcgaccacaaaggctccaaagtatgtagggtggtgacaaccaagacggatactagtgaccaaggcgattgtcaaaccttcaaagtatgtgggatagcagccaagatggatgttaacgaccatgccgatcaccaaggctccaaagccagtggaatgccaaccaagacagatgctaatgatcaatgcagcaaccaaggttttgttacatgtccctttaagacagctgagaggttagatcatcttctgaaccaaccagcaaacagatactgtgctgattgtggtgctccagatccaaaatgggtgtcaatgacttttggtgttttcatttgcatcaagtgttcaggagctcatagaagtcttggagtacacatatccaaggcaagacatgtggtttcggtgaagctagacgagtgggcagatgaacaggttgatattttagctgattcaggtgggaatgctgcagtaaacatgatatatgaagcatttgtgcccgaaaactacgcgaagccaaggcaagattgttcagcggaggagcgcaatgattttattaggagaaaatacgaggctcaacaatttttgactaacccccagctttcatgtcctccacgacgcaacgagaaacataatcaccaacagcatagtactagttcaagtcgacatggtttaggccattcattcaggaacagctggaggagaaaagagcacgaggccaaatcaacaaagaaaacaatcgaggtgggcatggtagagtttgtcggattgattaagatcgacatcataagaggcacaaatctagctatccgtgatgtcatgtcgagtgatccttacgttatcattaacctaggacaccagacaatgaaaacgaaagtggtaaagagcagtctaaatcctgtatggaatgaaaggctcatgctttcgatacccgacccagtgccgctgcttaaactgcaagtctacgacaaggacacgttcaccactgacgaccggatgggggaggccgagatcaacatccagccactggttgctgcagccaaagcccacgagacctctgctatcgcagataccgcgcagctcaacaaatggctggcgaaagatggcatctggatcccgagggacagcgccatctccatcgtcaacggcaaggtgaagcaggtggtgaatgccaggctccagaacgtcgagcgcggccagcttgagatggagctcgagtgcgtccctctcactcaatagcttgctgctcagtaggagtcgagtcctgagtccagattcacttacttgtgtacttcttcattagtctgcctccctctgtttgtgatgacagccatctgaaccgatgcaaatacttattgggaatgacgattctgtgctgtatacttgccatggacgccgcggcgctggagtcgctcatcctggacctccacgccatcgaggtcgtgaagctgggctccttcacgctcaagtccggcatcaaatcgcccatctacctcgacctccgcgcgctcgtctcccacccgcgcctgctctccgccgtcgcctcgctccttcacgcgctcccggccacgcgcccctacggcctcgtctgcggtgtcccctacaccgcgctccccatcgccgccgtcctctccgtcgaccgctcaatccccatgctcatgcgccgcaaggaggtcaaggcccacggcaccgccaagtccatcgagggctccttcagccccggggacaccgtcctcatcatcgaggacctcgtcaccagtggcgcctccgtgctcgagaccgccgccccgctccgcgccgaggggctcgtcgtcgccgacgccgtagtcgtcgtcgaccgcgagcagggtggcagggagaacctcgccgctaatgggatcacgctgcactcgctcatgaccctcacggaggtgctggccgtgctgctcaagcacgggaaggtgaccgaggagaaggcgcaggaggtgaggcagttcctcgacgccaacaggaaggtggcggtgcctggggcagcacctgttacacccagggtgctcagaaagacattttcggagagggcgaatcttgccaccaaccctatggggaagaagctcttcgagctgatggagaccaagcagaccaacctgtgtgttgccgctgatgtcgggacaacaaaggaactccttgagctggctgacaaggtcggccctcaaatttgtatgttgaaaacccatgtggatatattatctgattttaccccagattttggctctaagctccgctcgattgctgagaagcacaactttttgatcttcgaagaccgcaagtttgctgacattggaaatacagtaaccatgcaatatgaaggaggaatattccgcatattggattgggccgatattgttaatgcgcatatagtacctggacctggaatcgtagatggcttgaagctgaagggtttgcctaaaggaagagggctacttctgctcgctgagatgagctctgccggcaaccttgcccatggagattacactgctgctgccgtaaagattgctgagcaacattctgattttgtgatgggatttatatcagtaaatcctgagtcttggtcagtaaaaccatcaagccctgcatttatccatgccacgcctggagttcagatggtcgcaggaggagatgatcttgggcaacaatacaacactcccgaatctgtgataaactacaggggcagtgacataatcatagttggccgtgggattataaaggcgagcgatcctatgaagaaggcgtgggagtaccgcttgcaagggtggcaggcatacaagaacagcttgctatgaaggaaggggggcgccatgagcatccccaagtataagggcgaatccagtcagtttggcgaaataagcgcatgcggaaaggttttcctgcagttgagtcaggacctaattgacatcagattcactgcagaggagactcatgccccatcatcgtttctgttacaataatttcctctcggtttaccctgttcttgctggttgagttaggcacgttgtgatgcctgtgcgcggttaaatcgtcttactgccatgccacttgaggtttggactcttgagcaagcaattttatcgatgccgagaattgtatgactctacgtgcttagtgctacttccgtcactgtgtgttggcgcggc

SEQ ID NO: 77739 - DNA, 4391 bp, Zea Mays
agaggacgattcacccgatgtaatacgcgattgttccaaccaagattcgaaggagaggcgacgcacggcctgactgtgcatcacatcgatgccttgcaccacatcgatgccttgcacctgtctctcatcacccccgtcctcggtggctggtgcggcgatcccttctccatccacagcgccgagagaggtctcaatggtgaggtctgccatcacgcacacaaacagtgggaagacctagaggcggcgggctgccatggtgaggtctgccgtctgccatcagcccatcacgcaggacgaataggaagaccatcagttgtgcgatcagcgtagggcgcctggttcggtccggtccggtccactgggccatcgggggcaaatcacaatgaaccagagagtgcaggagatacggcgggagggggtttatgtaaaattgctgctggacgttggatgaggaagggatggtccagattaaaagtgctcacatgtgcacgggagcgccatgagcacgggacacgatccctttttttttctcctcaaatctgaatcctgccaaaatacccgcagcccagctccgattccaacgaccaccgctccttcctcgccccagcctagcagcgcaggcgcggcgcagcgcaggccctgcgccgccctccgcgcacgtccaggtatccttcgaccgcaaccgcgcgcgcctctctccctcctcctgccgcaacacgtcctcctcgacgtcgtcgcctccgcccccaagaagtcgtacgtgatcgctccggacctccgtcgtttccttggatggatcggacgccattgttcatccggccggtctgcctccgttttgctcgctgaccgcccgcgctgagcccgcccgcccgctccctggcacgaggacgatgtagaggagcgcaagaacgggaggcggcgttggggacgacggggacgagatggaggggcgcaatcccgtgcagagattcgttgatagcccaaagccatacaacagaaggaaagcgcgcggtatgcaaacaaggatggattcgagtgaccacggcgaccgccaaggtccgagagcctgtgaagaattgccaggcaagatggataacgaccgtgccgatcgtcaacgcttgaaagcctgcgaattcccagccaagatggacaacaaccatgccgatcgtcaagtttcgaaagcctgcgaatcgaaaggcaatgcctgtgaattgccaggcaagatggataatgaccaccccgtccgtcaaggtttgaaagcccgtggactactgcaacctaagtcggatgctagtgaagatggcgtatgcgaaggtttgaaagcttgtggattgacagccaacaagatggatgctactgaccaatgcgaccacaaaggctccaaagtatgtagggtggtgacaaccaagacggatactagtgaccaaggcgattgtcaaaccttcaaagtatgtgggatagcagccaagatggatgttaacgaccatgccgatcaccaaggctccaaagccagtggaatgccaaccaagacagatgctaatgatcaatgcagcaaccaaggtccctttaagacagctgagaggttagatcatcttctgaaccaaccagcaaacagatactgtgctgattgtggtgctccagatccaaaatgggtgtcaatgacttttggtgttttcatttgcatcaagtgttcaggagctcatagaagtcttggagtacacatatccaaggtggtttcggtgaagctagacgagtgggcagatgaacaggttgatattttagctgattcaggtgggaatgctgcagtaaacatgatatatgaagcatttgtgcccgaaaactacgcgaagccaaggcaagattgttcagcggaggagcgcaatgattttattaggagaaaatacgaggctcaacaatttttgactaacccccagctttcatgtcctccacgacgcaacgagaaacataatcaccaacagcatagtactagttcaagtcgacatggtttaggccattcattcaggaacagctggaggagaaaagagcacgaggccaaatcaacaaagaaaacaatcgaggtgggcatggtagagtttgtcggattgattaagatcgacatcataagaggcacaaatctagctatccgtgatgtcatgtcgagtgatccttacgttatcattaacctaggacaccagacaatgaaaacgaaagtggtaaagagcagtctaaatcctgtatggaatgaaaggctcatgctttcgatacccgacccagtgccgctgcttaaactgcaagtctacgacaaggacacgttcaccactgacgaccggatgggggaggccgagatcaacatccagccactggttgctgcagccaaagcccacgagacctctgctatcgcagataccgcgcagctcaacaaatggctggcgaaagatggcatctggatcccgagggacagcgccatctccatcgtcaacggcaaggtgaagcaggtggtgaatgccaggctccagaacgtcgagcgcggccagcttgagatggagctcgaccatctgaaccgatgcaaatacttattgggaatgacgattctgtgctgtatacttgccatggacgccgcggcgctggagtcgctcatcctggacctccacgccatcgaggtcgtgaagctgggctccttcacgctcaagtccggcatcaaatcgcccatctacctcgacctccgcgcgctcgtctcccacccgcgcctgctctccgccgtcgcctcgctccttcacgcgctcccggccacgcgcccctacggcctcgtctgcggtgtcccctacaccgcgctccccatcgccgccgtcctctccgtcgaccgctcaatccccatgctcatgcgccgcaaggaggtcaaggcccacggcaccgccaagtccatcgagggctccttcagccccggggacaccgtcctcatcatcgaggacctcgtcaccagtggcgcctccgtgctcgagaccgccgccccgctccgcgccgaggggctcgtcgtcgccgacgccgtagtcgtcgtcgaccgcgagcagggtggcagggagaacctcgccgctaatgggatcacgctgcactcgctcatgaccctcacggaggtgctggccgtgctgctcaagcacgggaaggtgaccgaggagaaggcgcaggaggtgaggcagttcctcgacgccaacaggaaggtggcggtgcctggggcagcacctgttacacccagggtgctcagaaagacattttcggagagggcgaatcttgccaccaaccctatggggaagaagctcttcgagctgatggagaccaagcagaccaacctgtgtgttgccgctgatgtcgggacaacaaaggaactccttgagctggctgacaaggtcggccctcaaatttgtatgttgaaaacccatgtggatatattatctgattttaccccagattttggctctaagctccgctcgattgctgagaagcacaactttttgatcttcgaagaccgcaagtttgctgacattggaaatacagtaaccatgcaatatgaaggaggaatattccgcatattggattgggccgatattgttaatgcgcatatagtacctggacctggaatcgtagatggcttgaagctgaagggtttgcctaaaggaagagggctacttctgctcgctgagatgagctctgccggcaaccttgcccatggagattacactgctgctgccgtaaagattgctgagcaacattctgattttgtgatgggatttatatcagtaaatcctgagtcttggtcagtaaaaccatcaagccctgcatttatccatgccacgcctggagttcagatggtcgcaggaggagatgatcttgggcaacaatacaacactcccgaatctgtgataaactacaggggcagtgacataatcatagttggccgtgggattataaaggcgagcgatcctatgaagaaggcgtgggagtaccgcttgcaagggtggcaggcatacaagaacagcttgctatgaaggaaggggggcgccatgagcatccccaagtataagggcgaatccagtcagtttggcgaaataagcgcatgcggaaaggttttcctgcagttgagtcaggacctaattgacatcagattcactgcagaggagactcatgccccatcatcgtttctgttacaataatttcctctcggtttaccctgttcttgctggttgagttaggcacgttgtgatgcctgtgcgcggttaaatcgtcttactgccatgccacttgaggtttggactcttgagcaagcaattttatcgatgccgagaattgtatgactctacgtgcttagtgctacttccgtcactgtgtgttggcgcggc

SEQ ID NO: 77740 - DNA, 4038 bp, Zea Mays
agaggacgattcacccgatgtaatacgcgattgttccaaccaagattcgaaggagaggcgacgcacggcctgactgtgcatcacatcgatgccttgcaccacatcgatgccttgcacctgtctctcatcacccccgtcctcggtggctggtgcggcgatcccttctccatccacagcgccgagagaggtctcaatggtgaggtctgccatcacgcacacaaacagtgggaagacctagaggcggcgggctgccatggtgaggtctgccgtctgccatcagcccatcacgcaggacgaataggaagaccatcagttgtgcgatcagcgtagggcgcctggttcggtccggtccggtccactgggccatcgggggcaaatcacaatgaaccagagagtgcaggagatacggcgggagggggtttatgtaaaattgctgctggacgttggatgaggaagggatggtccagattaaaagtgctcacatgtgcacgggagcgccatgagcacgggacacgatccctttttttttctcctcaaatctgaatcctgccaaaatacccgcagcccagctccgattccaacgaccaccgctccttcctcgccccagcctagcagcgcaggcgcggcgcagcgcaggccctgcgccgccctccgcgcacgtccaggtatccttcgaccgcaaccgcgcgcgcctctctccctcctcctgccgcaacacgtcctcctcgacgtcgtcgcctccgcccccaagaagtcgtacgtgatcgctccggacctccgtcgtttccttggatggatcggacgccattgttcatccggccggtctgcctccgttttgctcgctgaccgcccgcgctgagcccgcccgcccgctccctggcacgaggacgatgtagaggagcgcaagaacgggaggcggcgttggggacgacggggacgagatggaggggcgcaatcccgtgcagagattcgttgatagcccaaagccatacaacagaaggaaagcgcgcggtatgcaaacaaggatggattcgagtgaccacggcgaccgccaaggtccgagagcctgtgaagaattgccaggcaagatggataacgaccgtgccgatcgtcaacgcttgaaagcctgcgaattcccagccaagatggacaacaaccatgccgatcgtcaagtttcgaaagcctgcgaatcgaaaggcaatgcctgtgaattgccaggcaagatggataatgaccaccccgtccgtcaaggtttgaaagcccgtggactactgcaacctaagtcggatgctagtgaagatggcgtatgcgaaggtttgaaagcttgtggattgacagccaacaagatggatgctactgaccaatgcgaccacaaaggctccaaagtatgtagggtggtgacaaccaagacggatactagtgaccaaggcgattgtcaaaccttcaaagtatgtgggatagcagccaagatggatgttaacgaccatgccgatcaccaaggctccaaagccagtggaatgccaaccaagacagatgctaatgatcaatgcagcaaccaaggtccctttaagacagctgagaggttagatcatcttctgaaccaaccagcaaacagatactgtgctgattgtggtgctccagatccaaaatgggtgtcaatgacttttggtgttttcatttgcatcaagtgttcaggagctcatagaagtcttggagtacacatatccaaggtggtttcggtgaagctagacgagtgggcagatgaacaggttgatattttagctgattcaggtgggaatgctgcagtaaacatgatatatgaagcatttgtgcccgaaaactacgcgaagccaaggcaagattgttcagcggaggagcgcaatgattttattaggagaaaatacgaggctcaacaatttttgactaacccccagctttcatgtcctccacgacgcaacgagaaacataatcaccaacagcatagtactagttcaagtcgacatggtttaggccattcattcaggaacagctggaggagaaaagagcacgaggccaaatcaacaaagaaaacaatcgaggtgggcatggtagagtttgtcggattgattaagatcgacatcataagaggcacaaatctagctatccgtgatgtcatgtcgagtgatccttacgttatcattaacctaggacaccagacaatgaaaacgaaagtggtaaagagcagtctaaatcctgtatggaatgaaaggctcatgctttcgatacccgacccagtgccgctgcttaaactgcaagtctacgacaaggacacgttcaccactgacgaccggatgggggaggccgagatcaacatccagccactggttgctgcagccaaagcccacgagacctctgctatcgcagataccgcgcagctcaacaaatggctggcgaaagatggcatctggatcccgagggacagcgccatctccatcgtcaacggcaaggtgaagcaggtggtgaatgccaggctccagaacgtcgagcgcggccagcttgagatggagctcgaccatctgaaccgatgcaaatacttattgggaatgacgattctgtgctgtatacttgccatggacgccgcggcgctggagtcgctcatcctggacctccacgccatcgaggtcgtgaagctgggctccttcacgctcaagtccggcatcaaatcgcccatctacctcgacctccgcgcgctcgtctcccacccgcgcctgctctccgccgtcgcctcgctccttcacgcgctcccggccacgcgcccctacggcctcgtctgcggtgtcccctacaccgcgctccccatcgccgccgtcctctccgtcgaccgctcaatccccatgctcatcacctgttacacccagggtgctcagaaagacattttcggagagggcgaatcttgccaccaaccctatggggaagaagctcttcgagctgatggagaccaagcagaccaacctgtgtgttgccgctgatgtcgggacaacaaaggaactccttgagctggctgacaaggtcggccctcaaatttgtatgttgaaaacccatgtggatatattatctgattttaccccagattttggctctaagctccgctcgattgctgagaagcacaactttttgatcttcgaagaccgcaagtttgctgacattggaaatacagtaaccatgcaatatgaaggaggaatattccgcatattggattgggccgatattgttaatgcgcatatagtacctggacctggaatcgtagatggcttgaagctgaagggtttgcctaaaggaagagggctacttctgctcgctgagatgagctctgccggcaaccttgcccatggagattacactgctgctgccgtaaagattgctgagcaacattctgattttgtgatgggatttatatcagtaaatcctgagtcttggtcagtaaaaccatcaagccctgcatttatccatgccacgcctggagttcagatggtcgcaggaggagatgatcttgggcaacaatacaacactcccgaatctgtgataaactacaggggcagtgacataatcatagttggccgtgggattataaaggcgagcgatcctatgaagaaggcgtgggagtaccgcttgcaagggtggcaggcatacaagaacagcttgctatgaaggaaggggggcgccatgagcatccccaagtataagggcgaatccagtcagtttggcgaaataagcgcatgcggaaaggttttcctgcagttgagtcaggacctaattgacatcagattcactgcagaggagactcatgccccatcatcgtttctgttacaataatttcctctcggtttaccctgttcttgctggttgagttaggcacgttgtgatgcctgtgcgcggttaaatcgtcttactgccatgccacttgaggtttggactcttgagcaagcaattttatcgatgccgagaattgtatgactctacgtgcttagtgctacttccgtcactgtgtgttggcgcggc

SEQ ID NO: 77741 - DNA, 2059 bp, Zea Mays
gtttgtcctcgcttacactttcccctctccctccggcggcggcggacacctttcccctctctctctccggcggcggcgggcacctttcccctctctctctccggcggcggcgggcacctttccatcgcatttacagaccccactctgctgtgctgtcccggtcaccgcgtcgactgcacggcccccttttgccaccggcgtttgcccgttcctcaattccaccgacatcatggaaggaggtcctcgaagccgcagggctaagcccacgcccaacggcaaaggtgtctctccgatgagggattcctgtctggagctgagcggtaaaggtgtctcgtcggagagggattctggtctggagctgagcaagtcgcctccgccgccgcccgctccatggtggactgatccttcggcgccggtgaccggagaccatagctggctgatcctcgaccgcatcgtccaccgcagccggaagcggtgcggggacgctacgacctcggcgctcgcccacgagtgcgtcggccggccgatccgtgcctccctccggatcgcggacccccccgcggtgtcccgtctctacgtccactggaccagcattccagccattgactgcatgaaggagcctgtcgtcatcgccgcccaccacaactccattctattccgggtgtctgtccccttcgacgatccctgtttctggagccgaatgatctactttcctgatgattactttgtctactcgtcctcctcgtcgccgccgtcccttactcggcttcccccttgcttcacccgggttcccctttgcttcggcggtggacgcaccgaccccgagttggataagtggttacaaccgcaccggcgccagcaacagcggaccatgattgaagaagatatgggcatcctctgccatggagacaagggtgaattcacggtggcggatctcacctaccgtttcaaccaggaggtccaactctgcttgctgcaccatcccccttctgcctctgatgctgaaatgaaatggagtgttgagaagctgcagatccctgccgatatgaagatcagcctctactcgtttaagactgatgccgtcgtcactattggcgagaggtgcttgtgctgggttgactactaccatggtatgctgctcattgatgtcctcgctggcagcaacaacaacagcaggctccgttatataccactcccatctaaggctttgaagactggccgtgtgtacaaggacggtgaacctgattcctttcggcgtctcagtgtctgtgatggtggcatcattaagctcgtctgcattattaccaaagagcacccttctccttatcccttcaccatagaaacatggactttggttgatatccaccaaggtagatgggagaaggatgtcaacttgaccatgggagccagcgagttcttcaatctttacaacgacactgccaagagtcgcctcccacgagtgatgccaagttttcctgtggtgagcttggttgatccagatgtcatttgcttccgcctcgaggacaagttccgtgaccctttctggatggttcaagtcaacatgcggaataagttgctgctgtcaagttccatctatatcaacgaagaagaagaagaaggataccctcctaaaagggactgcaggaactatttcatttttcatgacttcattgccagcaagttctcctcttacttgagtgaagacgccatcaaaagtaagaccgatgcaaccctgctccttggtggcttggtacaaggcttcaaaatatctgaatcgagaattaagtgagacaatgcacaaggtgaaagaggcgagcatggcacaaaagtgtgaacaagcgacagagtgattagttgaacggatgccaatcttttgaagacgcccactgctaattctcttgctcgtggggttgatgtttttttaatgtgttgtgctttcaaacatctgcctttatcatgtgtgagaaaccttaatcggtactcaaactttggcatgagagcattttttgaatgtgttgtaatgcaccctccaaggaagaatttgtgatactctatgcga

SEQ ID NO: 77742 - DNA, 2052 bp, Zea Mays
caaacatttcgcatgggatgcgcgcccgtatccttggccagtggcttcagcgtttgtcctcgcttacactttcccctctccctccggcggcggcggacacctttcccctctctctctccggcggcggcgggcacctttcccctctctctctccggcggcggcgggcacctttccatcgcatttacagaccccactctgctgtgctgtcccggtcaccgcgtcgactgcacggcccccttttgccaccggcgtttgcccgttcctcaattccaccgacatcatggaaggaggtcctcgaagccgcagggctaagcccacgcccaacggcaaaggtgtctctccgatgagggattcctgtctggagctgagcggtaaaggtgtctcgtcggagagggattctggtctggagctgagcaagtcgcctccgccgccgcccgctccatggtggactgatccttcggcgccggtgaccggagaccatagctggctgatcctcgaccgcatcgtccaccgcagccggaagcggtgcggggacgctacgacctcggcgctcgcccacgagtgcgtcggccggccgatccgtgcctccctccggatcgcggacccccccgcggtgtcccgtctctacgtccactggaccagcattccagccattgactgcatgaaggagcctgtcgtcatcgccgcccaccacaactccattctattccgggtgtctgtccccttcgacgatccctgtttctggagccgaatgatctactttcctgatgattactttgtctactcgtcctcctcgtcgccgccgtcccttactcggcttcccccttgcttcacccgggttcccctttgcttcggcggtggacgcaccgaccccgagttggataagtggttacaaccgcaccggcgccagcaacagcggaccatgattgaagaagatatgggcatcctctgccatggagacaagggtgaattcacggtggcggatctcacctaccgtttcaaccaggaggtccaactctgcttgctgcaccatcccccttctgcctctgatgctgaaatgaaatggagtgttgagaagctgcagatccctgccgatatgaagatcagcctctactcgtttaagactgatgccgtcgtcactattggcgagaggtgcttgtgctgggttgactactaccatggtatgctgctcattgatgtcctcgctggcagcaacaacaacagcaggctccgttatataccactcccatctaaggctttgaagactggccgtgtgtacaaggacggtgaacctgattcctttcggcgtctcagtgtctgtgatggtggcatcattaagctcgtctgcattattaccaaagagcacccttctccttatcccttcaccatagaaacatggactttggttgatatccaccaaggtagatgggagaaggatgtcaacttgaccatgggagccagcgagttcttcaatctttacaacgacactgccaagagtcgcctcccacgagtgatgccaagttttcctgtggtgagcttggttgatccagatgtcatttgcttccgcctcgaggacaagttccgtgaccctttctggatggttcaagtcaacatgcggaataagttgctgctgtcaagttccatctatatcaacgaagaagaagaagaaggataccctcctaaaagggactgcaggaactatttcatttttcatgacttcattgccagcaagttctcctcttacttgagtgaagacgccatcaaaagtcgagaattaagtgagacaatgcacaaggtgaaagaggcgagcatggcacaaaagtgtgaacaagcgacagagtgattagttgaacggatgccaatcttttgaagacgcccactgctaattctcttgctcgtggggttgatgtttttttaatgtgttgtgctttcaaacatctgcctttatcatgtgtgagaaaccttaatcggtactcaaactttggcatgagagcattttttgaatgtgttgtaatgcaccctccaaggaagaatttgtgatactctatgcga

SEQ ID NO: 77743 - DNA, 798 bp, Zea Mays
cgggagccttctctgacctcgtcatgagccacctgacttcaagacaaggaaggtgatgagttgcataggaactccgatgtgctagaaatcctcatgaataccaggtttctaatggtctatgtgcagtatgagcgttcactagaaacaatcataggacacgatcaaatcatctggctcgggggcctaaattaccgaatcatgctttcccatcagttagtgaaggcccttgtcgagatgcgcaattctagagaaagattagggtgatggtttttgcattatcggttctttagcgtgtcgactgtatattttgttgaaccatggctttcattcaagatttttgaagatctatctagaacttccaccaatagtccaaccattacaaatggaagaggatctagagcaactgaaagtttttgaaaacagctatcggatgaaggtgatcaaagtggagcaaaatgcccgtggtgtggatgcacctgaggtgcattgagaaaatcgaagcgctgacgtgagcgagaaatatccagtagaaaatgatggcagagcgagtgctttgcattgctatcagtgtaggcttgataggagacttttggttgtgatatcttattttctaaatagtatgataccagataggggggccgtaagggcgccttttgctctagtattaggctgtctccagcaacgtctcctaaatttcgtcctttaaagtaatattctttatcatttacagcatcctctaaaaaattcgtcctctatattttcttcatctccaacaacgtcctctaaaatcgatcctct

SEQ ID NO: 77744 - DNA, 2195 bp, Zea Mays
cggacatcaatattgcagcagtttgtacgggctaaccaagaagatgtggctgaggataacgctatgcttcttcctaggtcctatggtgattgtcatgtacccagatagtcattggtaatcggagctccgaccgagggactgcaaccgtgctctgtgaccatgtccaggtcgaggggttcagctcgggagccttctctgacctcgtcatgagggttcaattcgatttgcatgtcattgcaccaaacaagtttatgcttcgtctgcagccacctgacttcaagacaaggaaggtgatgagttgcataggaactccgatgtgctagaaatcctcatgaataccaggtttctaatggtctatgtgcagtatgagcgttcactagaaacaatcataggacacgatcaaatcatctggctcgggggcctaaattaccgaatcatgctttcccatcagttagtgaaggcccttgtcgagatgcgcaattctagagaaagattaggccttgaaaagtcaggaacggccctgacactgacattctctcgtctgcgcggcgtacattctcctagccgccatcctcaccatgccgctgcggatcccgcccgcggtatgactccctcctcacctacgtggccacgcgcgacgcagccgcaacgacctaacccccatgtcgtcgctgacctcgcgtcccgtctcgctgctacgatgccttcgtggaagcttgaaggtatgatgtcccttccatctctcttctttgatggactgctctttgttgttccagttcactactaatgtgggttttgcctattggtaggaaaaaaaattctttacatctgggatgtaaagaatctcttttacagcccctcacatacaccagctgctggtatatataaatagaagaaaaaaataaattactaaaagattattttgtaaattttgatctgtctttgtgggcctttaagtggtgcatgtgaggggctgtaaaaggtggtgttcacatgcggtatgtatagattttttttcccggtggtaagcctggtgcgatggcgttggtaacaaaaaaaaagtagaatgcacgctttatttattttgatgccaaaaattcgaatcgaaactgcaattggccgcttacaatattattgttgacaaaaaatgaaatgcgtgctagcatcatagctaacgatattatcatacatgttttggtacatttagcactaaaaggtgtgctctgatgctatttgcatcaattaaaccatctttaagaatatgtcattggttacttcatataattttgtcttgtaatttgtttgaacttgtaatgcctggagaagtctgcagtaaaaaattgttaggatgcagtcgtactgccaggttcattaattaggtgaatttaggtatttgtagttttcaaaatgatgaatatgtacacagatgaatatgtatattatctaaaatttattggatgtaacgttcaattgtttcatgatacacatgtgttggttattggaggggaacggtggtgttctgtgttaggtttcacgacatatctctgtggagcagattggcatatgtgaaattgataagacggtggtagatggtgatggtttttgcattatcggttctttagcgtgtcgactgtatattttgttgaaccatgtaagctgtcgtcttctctcagtgcaagctttgtgggagagatggaacaattgtgatgattcatgggctttcattcaagatttttgaagatctatctagaacttccaccaatagtccaaccattacaaatggaagaggatctagagcaactgaaagtttttgaaaacagctatcggatgaaggtgatcaaagtggagcaaaatgcccgtggtgtggatgcacctgaggtgcattgagaaaatcgaagcgctgacgtgagcgagaaatatccagtagaaaatgatggcagagcgagtgctttgcattgctatcagtgtaggcttgataggagacttttggttgtgatatcttattttctaaatagtatgataccagataggggggccgtaagggcgccttttgctctagtattaggctgtctccagcaacgtctcctaaatttcgtcctttaaagtaatattctttatcatttacagcatcctctaaaaaattcgtcctctatattttcttcatctccaacaacgtcctctaaaatcgatcctct

SEQ ID NO: 77745 - DNA, 1326 bp, Zea Mays
cggacatcaatattgcagcagtttgtacgggctaaccaagaagatgtggctgaggataacgctatgcttcttcctaggtcctatggtgattgtcatgtacccagatagtcattggtaatcggagctccgaccgagggactgcaaccgtgctctgtgaccatgtccaggtcgaggggttcagctcgggagccttctctgacctcgtcatgagggttcaattcgatttgcatgtcattgcaccaaacaagtttatgcttcgtctgcagccacctgacttcaagacaaggaaggtgatgagttgcataggaactccgatgtgctagaaatcctcatgaataccaggtttctaatggtctatgtgcagtatgagcgttcactagaaacaatcataggacacgatcaaatcatctggctcgggggcctaaattaccgaatcatgctttcccatcagttagtgaaggcccttgtcgagatgcgcaattctagagaaagattaggccttgaaaagtcaggaacggccctgacactgacattctctcgtctgcgcggcgtacattctcctagccgccatcctcaccatgccgctgcggatcccgcccgcggtatgactccctcctcacctacgtggccacgcgcgacgcagccgcaacgacctaacccccatgtcgtcgctgacctcgcgtcccgtctcgctgctacgatgccttcgtggaagcttgaagggtgatggtttttgcattatcggttctttagcgtgtcgactgtatattttgttgaaccatgtaagctgtcgtcttctctcagtgcaagctttgtgggagagatggaacaattgtgatgattcatgggctttcattcaagatttttgaagatctatctagaacttccaccaatagtccaaccattacaaatggaagaggatctagagcaactgaaagtttttgaaaacagctatcggatgaaggtgatcaaagtggagcaaaatgcccgtggtgtggatgcacctgaggtgcattgagaaaatcgaagcgctgacgtgagcgagaaatatccagtagaaaatgatggcagagcgagtgctttgcattgctatcagtgtaggcttgataggagacttttggttgtgatatcttattttctaaatagtatgataccagataggggggccgtaagggcgccttttgctctagtattaggctgtctccagcaacgtctcctaaatttcgtcctttaaagtaatattctttatcatttacagcatcctctaaaaaattcgtcctctatattttcttcatctccaacaacgtcctctaaaatcgatcctct

SEQ ID NO: 77746 - DNA, 5046 bp, Zea Mays
cggacatcaatattgcagcagtttgtacgggctaaccaagaagatgtggctgaggataacgctatgcttcttcctaggtcctatggtgattgtcatgtacccagatagtcattggtaatcggagctccgaccgagggactgcaaccgtgctctgtgaccatgtccaggtcgaggggttcagctcgggagccttctctgacctcgtcatgagggttcaattcgatttgcatgtcattgcaccaaacaagtttatgcttcgtctgcagccacctgacttcaagacaaggaaggtgatgagttgcataggaactccgatgtgctagaaatcctcatgaataccaggtttctaatggtctatgtgcagtatgagcgttcactagaaacaatcataggacacgatcaaatcatctggctcgggggcctaaattaccgaatcatgctttcccatcagttagtgaaggcccttgtcgagatgcgcaattctagagaaagattaggtgagagcttggtaaccctcaggtttcttttggttacccagtagtccagctaccaacacttgaaacaagctcttcagatgagaagcagcagaagcaacttttctttagaatctacttggtttctaaggattgtcagcatcataagttttccgccacatcctttcttatagagtgcaaagaaactccatgtgggtgtcccattgagcctcttcctctttatgtcaaatatttatttcctatgagagccgcgtcacctattatttttgccagaggtacagaaaagtctccttttattctagataccatttttggaaattcaatgctggattacatagttcataatatcatggtttcagtgtccagaatggagccgctaataatttgtcaactagatcaactaaagaaaaattgaatcagtctcaagcacaatcgtttaatagtgtgaaaattggatgaaactaatcgatcaagtgaagaagacaaaggaaaaatataggttttgttttttgccggtcagcaggtgtttagagaagaaattgaccggattaatagggtagacggtcgtactattaagaggggtcaatgaacttgatcggtgtaaaacttagtgcctcgtataatataaacggttgcatttacatgagggctaacaacgcttcgttttttaaaatacaaaatcttttgaaaaagcgcaaaaatatcaactctgtggttggtagaacgtccgagccaggaggccagctcgtccgcgactctgtcagagaagtctgctggcgccttgtctctgtctcccttcgctaccatccaagccaggaggctggaccgtccgcataaactgaattgagtttgggcagggaaagtgtgtttttgagtccttgcactatggactgtccggggtttttagccggacggtaagtggtccatgtgcagaccgtccggccataaaatggcggacactccgctcggattgttttaactgacgagtgctatgatattccatgttgacaggtcccggaccgtccggcccaggagggtggatcgtccaggcttgactttttctgacagcactgacaggtttcaacggtctttatagccgttactggtacgatggaccgtccggccatggggcgtggaccgtccatgtgtgcgcagaagttgtgctatttgcacataatgactaggtttgagttgtgggctataaatagaaatggagcttgtgtgtgagggctctcttgaccactcctagcatacattgagctcatttgtgatcctctaactcaaactctcatacttgttgcttgagatcgcattctagtgagtgattgagaagttctagtgcatttgcatcctttgagaagttctaccgcccccttccgcatactattcctccccgcaccaccgcagcaaacgtcggccccatcccgccatcttcctctccgcgctgcccctctccctgctcggatcggcacgcatggtactgttgtttctcctactcctctcttcttcgaggttctcgatctctcagctgaggcgtctgtgtcacctgccattccctagtagtctctccttcgggtgtcctaacatactcctctctccttctcgtgtcgtcgccccgaagcatgctactcctcgcgccaccgcagtttccgtgacccctccccgtttgtctccatggcggcgcggaatccgacttgacatggcggcattcttgacagacctcacccctcttctctgttagcaactctgtcggctagggcacgaactaacagtcgctagaggtgtggagaacgggaagatatgacatggggaagaagaagatagcagggaaggcgataatagaattgttatttttgttcttcgataccctctcctgtacagatacacgccatttatatatggacgcggtcacacaagtgtatcagtattgaggcccatattacatggcccaacgtggcccaaccacatttatatttggccaggggctggcgcactttgatctcctcgactgcgcttaagccttctcttctgccgcgtctgtttctgttgtcttgttcatccctttccacttatgattgcttgctaacagcttcatcgccttgtattgacctccagttgcctccccacttgccaacctatgtggtgaccatggcagtatgtctgaccagggccgtacctgtgggggtgccaagggtgcggccgcaccaggcccccaaaatcagagggtcccctagccactagacgctaacacttttttcctgttaaacctatctattctagacacaaatacgcaaagagcgatgcgctatcaactagtctcatttagattgttaaactaatgtctcaattgcttatcgaatactccatccgataaaaaatagtatttgttttagctcttgattttttatgtttatattcaactagatgatgatgaatccactaaagaagcaaaacaaattttattttgatatagagagagtattatttactatacacatgatggttgcatcggcagagagaagctttttaaaattgaaatatttttgtgaactatttatggtcaacaataacttaagagaggttaaacggcttgacgattctatatatcgaaaaaaagttgttggatgaaattgatctcaatgatataagcgatgactttgtatcacaaaatgttagaagatatttttaatgatatcaaataagaagtaagtgcttttagctatattttacatttgttatcttataagcatcaaaacagagcataataatttttatatgttaaatattcgatactgtatgtataattatatatatttgtgtgtggatggaccctccatatcggatttcgttcaaggccttgaaaagtcaggaacggccctgacactgacattctctcgtctgcgcggcgtacattctcctagccgccatcctcaccatgccgctgcggatcccgcccgcggtatgactccctcctcacctacgtggccacgcgcgacgcagccgcaacgacctaacccccatgtcgtcgctgacctcgcgtcccgtctcgctgctacgatgccttcgtggaagcttgaaggtatgatgtcccttccatctctcttctttgatggactgctctttgttgttccagttcactactaatgtgggttttgcctattggtaggaaaaaaaattctttacatctgggatgtaaagaatctcttttacagcccctcacatacaccagctgctggtatatataaatagaagaaaaaaataaattactaaaagattattttgtaaattttgatctgtctttgtgggcctttaagtggtgcatgtgaggggctgtaaaaggtggtgttcacatgcggtatgtatagattttttttcccggtggtaagcctggtgcgatggcgttggtaacaaaaaaaaagtagaatgcacgctttatttattttgatgccaaaaattcgaatcgaaactgcaattggccgcttacaatattattgttgacaaaaaatgaaatgcgtgctagcatcatagctaacgatattatcatacatgttttggtacatttagcactaaaaggtgtgctctgatgctatttgcatcaattaaaccatctttaagaatatgtcattggttacttcatataattttgtcttgtaatttgtttgaacttgtaatgcctggagaagtctgcagtaaaaaattgttaggatgcagtcgtactgccaggttcattaattaggtgaatttaggtatttgtagttttcaaaatgatgaatatgtacacagatgaatatgtatattatctaaaatttattggatgtaacgttcaattgtttcatgatacacatgtgttggttattggaggggaacggtggtgttctgtgttaggtttcacgacatatctctgtggagcagattggcatatgtgaaattgataagacggtggtagatggtgatggtttttgcattatcggttctttagcgtgtcgactgtatattttgttgaaccatgtaagctgtcgtcttctctcagtgcaagctttgtgggagagatggaacaattgtgatgattcatgggctttcattcaagatttttgaagatctatctagaacttccaccaatagtccaaccattacaaatggaagaggatctagagcaactgaaagtttttgaaaacagctatcggatgaaggtgatcaaagtggagcaaaatgcccgtggtgtggatgcacctgaggtgcattgagaaaatcgaagcgctgacgtgagcgagaaatatccagtagaaaatgatggcagagcgagtgctttgcattgctatcagtgtaggcttgataggagacttttggttgtgatatcttattttctaaatagtatgataccagataggggggccgtaagggcgccttttgctctagtattaggctgtctccagcaacgtctcctaaatttcgtcctttaaagtaatattctttatcatttacagcatcctctaaaaaattcgtcctctatattttcttcatctccaacaacgtcctctaaaatcgatcctct

SEQ ID NO: 77747 - DNA, 1031 bp, Zea Mays
ctagaactggtggaagtttgtacgggctaaccaagaagatgtggctgaggataacgctatgcttcttcctaggtcctatggtgattgtcatgtacccagatagtcattggtaatcggagctccgaccgagggactgcaaccgtgctctgtgaccatgtccaggtcgaggggttcagctcgggagccttctctgacctcgtcatgagggttcaattcgatttgcatgtcattgcaccaaacaagtttatgcttcgtctgcagccacctgacttcaagacaaggaaggtgatgagttgcataggaactccgatgtgctagaaatcctcatgaataccaggtttctaatggtctatgtgcagtatgagcgttcactagaaacaatcataggacacgatcaaatcatctggctcgggggcctaaattaccgaatcatgctttcccatcagttagtgaaggcccttgtcgagatgcgcaattctagagaaagattagggtgatggtttttgcattatcggttctttagcgtgtcgactgtatattttgttgaaccatggctttcattcaagatttttgaagatctatctagaacttccaccaatagtccaaccattacaaatggaagaggatctagagcaactgaaagtttttgaaaacagctatcggatgaaggtgatcaaagtggagcaaaatgcccgtggtgtggatgcacctgaggtgcattgagaaaatcgaagcgctgacgtgagcgagaaatatccagtagaaaatgatggcagagcgagtgctttgcattgctatcagtgtaggcttgataggagacttttggttgtgatatcttattttctaaatagtatgataccagataggggggccgtaagggcgccttttgctctagtattaggctgtctccagcaacgtctcctaaatttcgtcctttaaagtaatattctttatcatttacagcatcctctaaaaaattcgtcctctatattttcttcatctccaacaacgtcctctaaaatcgatcctct

SEQ ID NO: 77748 - DNA, 1266 bp, Zea Mays
ctagaactggtggaagtttgtacgggctaaccaagaagatgtggctgaggataacgctatgcttcttcctaggtcctatggtgattgtcatgtacccagatagtcattggtaatcggagctccgaccgagggactgcaaccgtgctctgtgaccatgtccaggtcgaggggttcagctcgggagccttctctgacctcgtcatgagggttcaattcgatttgcatgtcattgcaccaaacaagtttatgcttcgtctgcagccacctgacttcaagacaaggaaggtgatgagttgcataggaactccgatgtgctagaaatcctcatgaataccaggtttctaatggtctatgtgcagtatgagcgttcactagaaacaatcataggacacgatcaaatcatctggctcgggggcctaaattaccgaatcatgctttcccatcagttagtgaaggcccttgtcgagatgcgcaattctagagaaagattaggtgagagcttggtaaccctcaggtttcttttggttacccagtagtccagctaccaacacttgaaacaagctcttcagatgagaagcagcagaagcaacttttctttagaatctacttggtttctaaggattgtcagcatcataagttttccgccacatcctttcttatagggtgatggtttttgcattatcggttctttagcgtgtcgactgtatattttgttgaaccatgtaagctgtcgtcttctctcagtgcaagctttgtgggagagatggaacaattgtgatgattcatgggctttcattcaagatttttgaagatctatctagaacttccaccaatagtccaaccattacaaatggaagaggatctagagcaactgaaagtttttgaaaacagctatcggatgaaggtgatcaaagtggagcaaaatgcccgtggtgtggatgcacctgaggtgcattgagaaaatcgaagcgctgacgtgagcgagaaatatccagtagaaaatgatggcagagcgagtgctttgcattgctatcagtgtaggcttgataggagacttttggttgtgatatcttattttctaaatagtatgataccagataggggggccgtaagggcgccttttgctctagtattaggctgtctccagcaacgtctcctaaatttcgtcctttaaagtaatattctttatcatttacagcatcctctaaaaaattcgtcctctatattttcttcatctccaacaacgtcctctaaaatcgatcctct

SEQ ID NO: 77749 - DNA, 4690 bp, Zea Mays
gctaatctcctctatccaggctctgctagaactggtggaagtttgtacgggctaaccaagaagatgtggctgaggataacgctatgcttcttcctaggtcctatggtgattgtcatgtacccagatagtcattggtaatcggagctccgaccgagggactgcaaccgtgctctgtgaccatgtccaggtcgaggggttcagctcgggagccttctctgacctcgtcatgagggttcaattcgatttgcatgtcattgcaccaaacaagtttatgcttcgtctgcagccacctgacttcaagacaaggaaggtgatgagttgcataggaactccgatgtgctagaaatcctcatgaataccaggtttctaatggtctatgtgcagtatgagcgttcactagaaacaatcataggacacgatcaaatcatctggctcgggggcctaaattaccgaatcatgctttcccatcagttagtgaaggcccttgtcgagatgcgcaattctagagaaagattaggtgagagcttggtaaccctcaggtttcttttggttacccagtagtccagctaccaacacttgaaacaagctcttcagatgagaagcagcagaagcaacttttctttagaatctacttggtttctaaggattgtcagcatcataagttttccgccacatcctttcttataggtgattgtttgatccccaacctagactcaaagaaactttactgttagttgcagaattgatgctcagttcctttaaaaatgtctcttatagatggaatcggaacacacttgtgcagattagtatcacgatgtaattatttttatttataataatgagtattatttattcctagagttctcagtttttcttgttgtattcaatgaatacgccgttctaatacggtactcttcataataatatgcatgtttgtcagtcgttaagggaacttacaagctaaagaatttcacaactgctgttaaatatgattagaatttatccttagaaatgaccagacatcaaggaccatttactacagtctactaatctatacatgtaggcaagaaactgcacgtgggtgtcccattgagcctcttcctttttatgtcaaatatttctttcctatattttcttgtctttgacatttttttgtcgttcatatttggcctgtcattagagtgcaaagaaactccatgtgggtgtcccattgagcctcttcctctttatgtcaaatatttatttcctatgagagccgcgtcacctattatttttgccagaggtacagaaaagtctccttttattctagataccatttttggaaattcaatgctggattacatagttcataatatcatggtttcagtgtccagaatggagccgctaataatttgtcaactagatcaactaaagaaaaattgaatcagtctcaagcacaatcgtttaatagtgtgaaaattggatgaaactaatcgatcaagtgaagaagacaaaggaaaaatataggttttgttttttgccggtcagcaggtgtttagagaagaaattgaccggattaatagggtagacggtcgtactattaagaggggtcaatgaacttgatcggtgtaaaacttagtgcctcgtataatataaacggttgcatttacatgagggctaacaacgcttcgttttttaaaatacaaaatcttttgaaaaagcgcaaaaatatcaactctgtggttggtagaacgtccgagccaggaggccagctcgtccgcgactctgtcagagaagtctgctggcgccttgtctctgtctcccttcgctaccatccaagccaggaggctggaccgtccgcataaactgaattgagtttgggcagggaaagtgtgtttttgagtccttgcactatggactgtccggggtttttagccggacggtaagtggtccatgtgcagaccgtccggccataaaatggcggacactccgctcggattgttttaactgacgagtgctatgatattccatgttgacaggtcccggaccgtccggcccaggagggtggatcgtccaggcttgactttttctgacagcactgacaggtttcaacggtctttatagccgttactggtacgatggaccgtccggccatggggcgtggaccgtccatgtgtgcgcagaagttgtgctatttgcacataatgactaggtttgagttgtgggctataaatagaaatggagcttgtgtgtgagggctctcttgaccactcctagcatacattgagctcatttgtgatcctctaactcaaactctcatacttgttgcttgagatcgcattctagtgagtgattgagaagttctagtgcatttgcatcctttgagaagttctaccgcccccttccgcatactattcctccccgcaccaccgcagcaaacgtcggccccatcccgccatcttcctctccgcgctgcccctctccctgctcggatcggcacgcatggtactgttgtttctcctactcctctcttcttcgaggttctcgatctctcagctgaggcgtctgtgtcacctgccattccctagtagtctctccttcgggtgtcctaacatactcctctctccttctcgtgtcgtcgccccgaagcatgctactcctcgcgccaccgcagtttccgtgacccctccccgtttgtctccatggcggcgcggaatccgacttgacatggcggcattcttgacagacctcacccctcttctctgttagcaactctgtcggctagggcacgaactaacagtcgctagaggtgtggagaacgggaagatatgacatggggaagaagaagatagcagggaaggcgataatagaattgttatttttgttcttcgataccctctcctgtacagatacacgccatttatatatggacgcggtcacacaagtgtatcagtattgaggcccatattacatggcccaacgtggcccaaccacatttatatttggccaggggctggcgcactttgatctcctcgactgcgcttaagccttctcttctgccgcgtctgtttctgttgtcttgttcatccctttccacttatgattgcttgctaacagcttcatcgccttgtattgacctccagttgcctccccacttgccaacctatgtggtgaccatggcagtatgtctgaccagggccgtacctgtgggggtgccaagggtgcggccgcaccaggcccccaaaatcagagggtcccctagccactagacgctaacacttttttcctgttaaacctatctattctagacacaaatacgcaaagagcgatgcgctatcaactagtctcatttagattgttaaactaatgtctcaattgcttatcgaatactccatccgataaaaaatagtatttgttttagctcttgattttttatgtttatattcaactagatgatgatgaatccactaaagaagcaaaacaaattttattttgatatagagagagtattatttactatacacatgatggttgcatcggcagagagaagctttttaaaattgaaatatttttgtgaactatttatggtcaacaataacttaagagaggttaaacggcttgacgattctatatatcgaaaaaaagttgttggatgaaattgatctcaatgatataagcgatgactttgtatcacaaaatgttagaagatatttttaatgatatcaaataagaagtaagtgcttttagctatattttacatttgttatcttataagcatcaaaacagagcataataatttttatatgttaaatattcgatactgtatgtataattatatatatttgtgtgtggatggaccctccatatcggatttcgttcaaggccttgaaaagtcaggaacggccctgacactgacattctctcgtctgcgcggcgtacattctcctagccgccatcctcaccatgccgctgcggatcccgcccgcggtatgactccctcctcacctacgtggccacgcgcgacgcagccgcaacgacctaacccccatgtcgtcgctgacctcgcgtcccgtctcgctgctacgatgccttcgtggaagcttgaagggtgatggtttttgcattatcggttctttagcgtgtcgactgtatattttgttgaaccatgtaagctgtcgtcttctctcagtgcaagctttgtgggagagatggaacaattgtgatgattcatgggctttcattcaagatttttgaagatctatctagaacttccaccaatagtccaaccattacaaatggaagaggatctagagcaactgaaagtttttgaaaacagctatcggatgaaggtgatcaaagtggagcaaaatgcccgtggtgtggatgcacctgaggtgcattgagaaaatcgaagcgctgacgtgagcgagaaatatccagtagaaaatgatggcagagcgagtgctttgcattgctatcagtgtaggcttgataggagacttttggttgtgatatcttattttctaaatagtatgataccagataggggggccgtaagggcgccttttgctctagtattaggctgtctccagcaacgtctcctaaatttcgtcctttaaagtaatattctttatcatttacagcatcctctaaaaaattcgtcctctatattttcttcatctccaacaacgtcctctaaaatcgatcctct

SEQ ID NO: 77750 - DNA, 4631 bp, Zea Mays
tgctaatctcctctatccaggctctgctagaactggtggaagagcagtttgtacgggctaaccaagaagatgtggctgaggataacgctatgcttcttcctaggtcctatggtgattgtcatgtacccagatagtcattggtaatcggagctccgaccgagggactgcaaccgtgctctgtgaccatgtccaggtcgaggggttcagctcgggagccttctctgacctcgtcatgagggttcaattcgatttgcatgtcattgcaccaaacaagtttatgcttcgtctgcagccacctgacttcaagacaaggaaggtgatgagttgcataggaactccgatgtgctagaaatcctcatgaataccaggtttctaatggtctatgtgcagtatgagcgttcactagaaacaatcataggacacgatcaaatcatctggctcgggggcctaaattaccgaatcatgctttcccatcagttagtgaaggcccttgtcgagatgcgcaattctagagaaagattaggtgagagcttggtaaccctcaggtttcttttggttacccagtagtccagctaccaacacttgaaacaagctcttcagatgagaagcagcagaagcaacttttctttagaatctacttggtttctaaggattgtcagcatcataagttttccgccacatcctttcttataggtgattgtttgatccccaacctagactcaaagaaactttactgttagttgcagaattgatgctcagttcctttaaaaatgtctcttatagatggaatcggaacacacttgtgcagattagtatcacgatgtaattatttttatttataataatgagtattatttattcctagagttctcagtttttcttgttgtattcaatgaatacgccgttctaatacggtactcttcataataatatgcatgtttgtcagtcgttaagggaacttacaagctaaagaatttcacaactgctgttaaatatgattagaatttatccttagaaatgaccagacatcaaggaccatttactacagtctactaatctatacatgtaggcaagaaactgcacgtgggtgtcccattgagcctcttcctttttatgtcaaatatttctttcctatattttcttgtctttgacatttttttgtcgttcatatttggcctgtcattagagtgcaaagaaactccatgtgggtgtcccattgagcctcttcctctttatgtcaaatatttatttcctatgagagccgcgtcacctattatttttgccagaggtacagaaaagtctccttttattctagataccatttttggaaattcaatgctggattacatagttcataatatcatggtttcagtgtccagaatggagccgctaataatttgtcaactagatcaactaaagaaaaattgaatcagtctcaagcacaatcgtttaatagtgtgaaaattggatgaaactaatcgatcaagtgaagaagacaaaggaaaaatataggttttgttttttgccggtcagcaggtgtttagagaagaaattgaccggattaatagggtagacggtcgtactattaagaggggtcaatgaacttgatcggtgtaaaacttagtgcctcgtataatataaacggttgcatttacatgagggctaacaacgcttcgttttttaaaatacaaaatcttttgaaaaagcgcaaaaatatcaactctgtggttggtagaacgtccgagccaggaggccagctcgtccgcgactctgtcagagaagtctgctggcgccttgtctctgtctcccttcgctaccatccaagccaggaggctggaccgtccgcataaactgaattgagtttgggcagggaaagtgtgtttttgagtccttgcactatggactgtccggggtttttagccggacggtaagtggtccatgtgcagaccgtccggccataaaatggcggacactccgctcggattgttttaactgacgagtgctatgatattccatgttgacaggtcccggaccgtccggcccaggagggtggatcgtccaggcttgactttttctgacagcactgacaggtttcaacggtctttatagccgttactggtacgatggaccgtccggccatggggcgtggaccgtccatgtgtgcgcagaagttgtgctatttgcacataatgactaggtttgagttgtgggctataaatagaaatggagcttgtgtgtgagggctctcttgaccactcctagcatacattgagctcatttgtgatcctctaactcaaactctcatacttgttgcttgagatcgcattctagtgagtgattgagaagttctagtgcatttgcatcctttgagaagttctaccgcccccttccgcatactattcctccccgcaccaccgcagcaaacgtcggccccatcccgccatcttcctctccgcgctgcccctctccctgctcggatcggcacgcatggtactgttgtttctcctactcctctcttcttcgaggttctcgatctctcagctgaggcgtctgtgtcacctgccattccctagtagtctctccttcgggtgtcctaacatactcctctctccttctcgtgtcgtcgccccgaagcatgctactcctcgcgccaccgcagtttccgtgacccctccccgtttgtctccatggcggcgcggaatccgacttgacatggcggcattcttgacagacctcacccctcttctctgttagcaactctgtcggctagggcacgaactaacagtcgctagaggtgtggagaacgggaagatatgacatggggaagaagaagatagcagggaaggcgataatagaattgttatttttgttcttcgataccctctcctgtacagatacacgccatttatatatggacgcggtcacacaagtgtatcagtattgaggcccatattacatggcccaacgtggcccaaccacatttatatttggccaggggctggcgcactttgatctcctcgactgcgcttaagccttctcttctgccgcgtctgtttctgttgtcttgttcatccctttccacttatgattgcttgctaacagcttcatcgccttgtattgacctccagttgcctccccacttgccaacctatgtggtgaccatggcagtatgtctgaccagggccgtacctgtgggggtgccaagggtgcggccgcaccaggcccccaaaatcagagggtcccctagccactagacgctaacacttttttcctgttaaacctatctattctagacacaaatacgcaaagagcgatgcgctatcaactagtctcatttagattgttaaactaatgtctcaattgcttatcgaatactccatccgataaaaaatagtatttgttttagctcttgattttttatgtttatattcaactagatgatgatgaatccactaaagaagcaaaacaaattttattttgatatagagagagtattatttactatacacatgatggttgcatcggcagagagaagctttttaaaattgaaatatttttgtgaactatttatggtcaacaataacttaagagaggttaaacggcttgacgattctatatatcgaaaaaaagttgttggatgaaattgatctcaatgatataagcgatgactttgtatcacaaaatgttagaagatatttttaatgatatcaaataagaagtaagtgcttttagctatattttacatttgttatcttataagcatcaaaacagagcataataatttttatatgttaaatattcgatactgtatgtataattatatatatttgtgtgtggatggaccctccatatcggatttcgttcaaggccttgaaaagtcaggaacggccctgacactgacattctctcgtctgcgcggcgtacattctcctagccgccatcctcaccatgccgctgcggatcccgcccgcggtatgactccctcctcacctacgtggccacgcgcgacgcagccgcaacgacctaacccccatgtcgtcgctgacctcgcgtcccgtctcgctgctacgatgccttcgtggaagcttgaagggtgatggtttttgcattatcggttctttagcgtgtcgactgtatattttgttgaaccatggctttcattcaagatttttgaagatctatctagaacttccaccaatagtccaaccattacaaatggaagaggatctagagcaactgaaagtttttgaaaacagctatcggatgaaggtgatcaaagtggagcaaaatgcccgtggtgtggatgcacctgaggtgcattgagaaaatcgaagcgctgacgtgagcgagaaatatccagtagaaaatgatggcagagcgagtgctttgcattgctatcagtgtaggcttgataggagacttttggttgtgatatcttattttctaaatagtatgataccagataggggggccgtaagggcgccttttgctctagtattaggctgtctccagcaacgtctcctaaatttcgtcctttaaagtaatattctttatcatttacagcatcctctaaaaaattcgtcctctatattttcttcatctccaacaacgtcctctaaaatcgatcctct

SEQ ID NO: 77751 - DNA, 3529 bp, Zea Mays
ctgctaatctcctctatccaggctctgctagaactggtggaagcagtttgtacgggctaaccaagaagatgtggctgaggataacgctatgcttcttcctaggtcctatggtgattgtcatgtacccagatagtcattggtaatcggagctccgaccgagggactgcaaccgtgctctgtgaccatgtccaggtcgaggggttcagctcgggagccttctctgacctcgtcatgagggttcaattcgatttgcatgtcattgcaccaaacaagtttatgcttcgtctgcagccacctgacttcaagacaaggaaggtgatgagttgcataggaactccgatgtgctagaaatcctcatgaataccaggtttctaatggtctatgtgcagtatgagcgttcactagaaacaatcataggacacgatcaaatcatctggctcgggggcctaaattaccgaatcatgctttcccatcagttagtgaaggcccttgtcgagatgcgcaattctagagaaagattaggccttgaaaagtcaggaacggccctgacactgacattctctcgtctgcgcggcgtacattctcctagccgccatcctcaccatgccgctgcggatcccgcccgcggtatgactccctcctcacctacgtggccacgcgcgacgcagccgcaacgacctaacccccatgtcgtcgctgacctcgcgtcccgtctcgctgctacgatgccttcgtggaagcttgaaggtatgatgtcccttccatctctcttctttgatggactgctctttgttgttccagttcactactaatgtgggttttgcctattggtaggaaaaaaaattctttacatctgggatgtaaagaatctcttttacagcccctcacatacaccagctgctggtatatataaatagaagaaaaaaataaattactaaaagattattttgtaaattttgatctgtctttgtgggcctttaagtggtgcatgtgaggggctgtaaaaggtggtgttcacatgcggtatgtatagattttttttcccggtggtaagcctggtgcgatggcgttggtaacaaaaaaaaagtagaatgcacgctttatttattttgatgccaaaaattcgaatcgaaactgcaattggccgcttacaatattattgttgacaaaaaatgaaatgcgtgctagcatcatagctaacgatattatcatacatgttttggtacatttagcactaaaaggtgtgctctgatgctatttgcatcaattaaaccatctttaagaatatgtcattggttacttcatataattttgtcttgtaatttgtttgaacttgtaatgcctggagaagtctgcagtaaaaaattgttaggatgcagtcgtactgccaggttcattaattaggtgaatttaggtatttgtagttttcaaaatgatgaatatgtacacagatgaatatgtatattatctaaaatttattggatgtaacgttcaattgtttcatgatacacatgtgttggttattggaggggaacggtggtgttctgtgttaggtttcacgacatatctctgtggagcagattggcatatgtgaaattgataagacggtggtagatgtaagatctcgcttcctgtatgtgcataatactgtgcagtgaccactgatattatgttttattgacttttagatgtttgagagcatttgctttctgttagatttctctgaacaccaataatttggtctatgtgtctttatctacattcagttgaggaatgcaattgattttactgatgtcacttgatttttcgacactgatgttagctgctcctactatgccttcttcaatttttaaaatgcattcattttcgtattttggtactacatgatatgaggacagcaaatgagatgactcatgacgtggttaattgagattcctttagtcttctgaatttccttcttttatgttatttgcttagtaggttgggttggattctgtgaggggtactgattcatgattaaaattgggtggacaggaggcatatttttgtaaaaggacaacaacagaggattgttcatttgttccttctcaagggtcatgctattttgcaaactaggttacctaggaaaatatatgctttatgattcacaagcaatgggattgcttttttgttaatatgatttcttgtattgtgatcattggcagggtgatggtttttgcattatcggttctttagcgtgtcgactgtatattttgttgaaccatgtaagctgtcgtcttctctcagtgcaagctttgtgggagagatggaacaattgtgatgattcatggtcagtggatgccacttactccctccgcttgtttttatttgttgccggttagtacaaaattgaattaagtagcgtcaaataaataaaaatggaggtagtactattgagcagagctagaaagaaacgaagacttgtttgatggtgtttgactgcagaggctatgaacctgttgatatttccattggagctggctggtaggctgagtctgtatgttttttcttgatctatcatgaatgttaatgactgcttacacatacaaaaccaatgttttagatgtaaataattaatattttcatagttattcgattttcatagttattcgcattcaagaaatgaactctggtattatattcagtactgcagttttcagcacagctgttacttcactgaaactagaagatgcattcgatacgaatagagtgaagtgtgttgtggataatctgggctacgtgatattttttaagagggctgattccattcaataagtgaggcacaaatagctatttaactcttatattgactgtattttttcacatgaaaatcttctggccctgaccatttcagatcagggaacgtcaatccaaaaaatccatatcttcttcatcttggaatcgcataccttatcaagcttatgcttatttatttatatttgatacatggtcctttgattaaccgactttcatttggctaattaattgactaactgctctctctcacacagggctttcattcaagatttttgaagatctatctagaacttccaccaatagtccaaccattacaaatggaagaggatctagagcaactgaaagtttttgaaaacagctatcggatgaaggtgatcaaagtggagcaaaatgcccgtggtgtggatgcacctgaggtgcattgagaaaatcgaagcgctgacgtgagcgagaaatatccagtagaaaatgatggcagagcgagtgctttgcattgctatcagtgtaggcttgataggagacttttggttgtgatatcttattttctaaatagtatgataccagataggggggccgtaagggcgccttttgctctagtattaggctgtctccagcaacgtctcctaaatttcgtcctttaaagtaatattctttatcatttacagcatcctctaaaaaattcgtcctctatattttcttcatctccaacaacgtcctctaaaatcgatcctct

SEQ ID NO: 77752 - DNA, 4711 bp, Zea Mays
gtctagcactgctaatctcctctatccaggctctgctagaactggtggaagcagtttgtacgggctaaccaagaagatgtggctgaggataacgctatgcttcttcctaggtcctatggtgattgtcatgtacccagatagtcattggtaatcggagctccgaccgagggactgcaaccgtgctctgtgaccatgtccaggtcgaggggttcagctcgggagccttctctgacctcgtcatgagccacctgacttcaagacaaggaaggtgatgagttgcataggaactccgatgtgctagaaatcctcatgaataccaggtttctaatggtctatgtgcagtatgagcgttcactagaaacaatcataggacacgatcaaatcatctggctcgggggcctaaattaccgaatcatgctttcccatcagttagtgaaggcccttgtcgagatgcgcaattctagagaaagattaggtgagagcttggtaaccctcaggtttcttttggttacccagtagtccagctaccaacacttgaaacaagctcttcagatgagaagcagcagaagcaacttttctttagaatctacttggtttctaaggattgtcagcatcataagttttccgccacatcctttcttataggtgattgtttgatccccaacctagactcaaagaaactttactgttagttgcagaattgatgctcagttcctttaaaaatgtctcttatagatggaatcggaacacacttgtgcagattagtatcacgatgtaattatttttatttataataatgagtattatttattcctagagttctcagtttttcttgttgtattcaatgaatacgccgttctaatacggtactcttcataataatatgcatgtttgtcagtcgttaagggaacttacaagctaaagaatttcacaactgctgttaaatatgattagaatttatccttagaaatgaccagacatcaaggaccatttactacagtctactaatctatacatgtaggcaagaaactgcacgtgggtgtcccattgagcctcttcctttttatgtcaaatatttctttcctatattttcttgtctttgacatttttttgtcgttcatatttggcctgtcattagagtgcaaagaaactccatgtgggtgtcccattgagcctcttcctctttatgtcaaatatttatttcctatgagagccgcgtcacctattatttttgccagaggtacagaaaagtctccttttattctagataccatttttggaaattcaatgctggattacatagttcataatatcatggtttcagtgtccagaatggagccgctaataatttgtcaactagatcaactaaagaaaaattgaatcagtctcaagcacaatcgtttaatagtgtgaaaattggatgaaactaatcgatcaagtgaagaagacaaaggaaaaatataggttttgttttttgccggtcagcaggtgtttagagaagaaattgaccggattaatagggtagacggtcgtactattaagaggggtcaatgaacttgatcggtgtaaaacttagtgcctcgtataatataaacggttgcatttacatgagggctaacaacgcttcgttttttaaaatacaaaatcttttgaaaaagcgcaaaaatatcaactctgtggttggtagaacgtccgagccaggaggccagctcgtccgcgactctgtcagagaagtctgctggcgccttgtctctgtctcccttcgctaccatccaagccaggaggctggaccgtccgcataaactgaattgagtttgggcagggaaagtgtgtttttgagtccttgcactatggactgtccggggtttttagccggacggtaagtggtccatgtgcagaccgtccggccataaaatggcggacactccgctcggattgttttaactgacgagtgctatgatattccatgttgacaggtcccggaccgtccggcccaggagggtggatcgtccaggcttgactttttctgacagcactgacaggtttcaacggtctttatagccgttactggtacgatggaccgtccggccatggggcgtggaccgtccatgtgtgcgcagaagttgtgctatttgcacataatgactaggtttgagttgtgggctataaatagaaatggagcttgtgtgtgagggctctcttgaccactcctagcatacattgagctcatttgtgatcctctaactcaaactctcatacttgttgcttgagatcgcattctagtgagtgattgagaagttctagtgcatttgcatcctttgagaagttctaccgcccccttccgcatactattcctccccgcaccaccgcagcaaacgtcggccccatcccgccatcttcctctccgcgctgcccctctccctgctcggatcggcacgcatggtactgttgtttctcctactcctctcttcttcgaggttctcgatctctcagctgaggcgtctgtgtcacctgccattccctagtagtctctccttcgggtgtcctaacatactcctctctccttctcgtgtcgtcgccccgaagcatgctactcctcgcgccaccgcagtttccgtgacccctccccgtttgtctccatggcggcgcggaatccgacttgacatggcggcattcttgacagacctcacccctcttctctgttagcaactctgtcggctagggcacgaactaacagtcgctagaggtgtggagaacgggaagatatgacatggggaagaagaagatagcagggaaggcgataatagaattgttatttttgttcttcgataccctctcctgtacagatacacgccatttatatatggacgcggtcacacaagtgtatcagtattgaggcccatattacatggcccaacgtggcccaaccacatttatatttggccaggggctggcgcactttgatctcctcgactgcgcttaagccttctcttctgccgcgtctgtttctgttgtcttgttcatccctttccacttatgattgcttgctaacagcttcatcgccttgtattgacctccagttgcctccccacttgccaacctatgtggtgaccatggcagtatgtctgaccagggccgtacctgtgggggtgccaagggtgcggccgcaccaggcccccaaaatcagagggtcccctagccactagacgctaacacttttttcctgttaaacctatctattctagacacaaatacgcaaagagcgatgcgctatcaactagtctcatttagattgttaaactaatgtctcaattgcttatcgaatactccatccgataaaaaatagtatttgttttagctcttgattttttatgtttatattcaactagatgatgatgaatccactaaagaagcaaaacaaattttattttgatatagagagagtattatttactatacacatgatggttgcatcggcagagagaagctttttaaaattgaaatatttttgtgaactatttatggtcaacaataacttaagagaggttaaacggcttgacgattctatatatcgaaaaaaagttgttggatgaaattgatctcaatgatataagcgatgactttgtatcacaaaatgttagaagatatttttaatgatatcaaataagaagtaagtgcttttagctatattttacatttgttatcttataagcatcaaaacagagcataataatttttatatgttaaatattcgatactgtatgtataattatatatatttgtgtgtggatggaccctccatatcggatttcgttcaaggccttgaaaagtcaggaacggccctgacactgacattctctcgtctgcgcggcgtacattctcctagccgccatcctcaccatgccgctgcggatcccgcccgcggtatgactccctcctcacctacgtggccacgcgcgacgcagccgcaacgacctaacccccatgtcgtcgctgacctcgcgtcccgtctcgctgctacgatgccttcgtggaagcttgaaggtttcacgacatatctctgtggagcagattggcatatgtgaaattgataagacggtggtagatggtgatggtttttgcattatcggttctttagcgtgtcgactgtatattttgttgaaccatgtaagctgtcgtcttctctcagtgcaagctttgtgggagagatggaacaattgtgatgattcatgggctttcattcaagatttttgaagatctatctagaacttccaccaatagtccaaccattacaaatggaagaggatctagagcaactgaaagtttttgaaaacagctatcggatgaaggtgatcaaagtggagcaaaatgcccgtggtgtggatgcacctgaggtgcattgagaaaatcgaagcgctgacgtgagcgagaaatatccagtagaaaatgatggcagagcgagtgctttgcattgctatcagtgtaggcttgataggagacttttggttgtgatatcttattttctaaatagtatgataccagataggggggccgtaagggcgccttttgctctagtattaggctgtctccagcaacgtctcctaaatttcgtcctttaaagtaatattctttatcatttacagcatcctctaaaaaattcgtcctctatattttcttcatctccaacaacgtcctctaaaatcgatcctct

SEQ ID NO: 77753 - DNA, 2130 bp, Zea Mays
aagagggtctagcactgctaatctcctctatccaggctctgctagaactggtggaagcagtttgtacgggctaaccaagaagatgtggctgaggataacgctatgcttcttcctaggtcctatggtgattgtcatgtacccagatagtcattggtaatcggagctccgaccgagggactgcaaccgtgctctgtgaccatgtccaggtcgaggggttcagctcgggagccttctctgacctcgtcatgagggttcaattcgatttgcatgtcattgcaccaaacaagtttatgcttcgtctgcagccacctgacttcaagacaaggaaggtgatgagttgcataggaactccgatgtgctagaaatcctcatgaataccaggtttctaatggtctatgtgcagtatgagcgttcactagaaacaatcataggacacgatcaaatcatctggctcgggggcctaaattaccgaatcatgctttcccatcagttagtgaaggcccttgtcgagatgcgcaattctagagaaagattaggtgagagcttggtaaccctcaggtttcttttggttacccagtagtccagctaccaacacttgaaacaagctcttcagatgagaagcagcagaagcaacttttctttagaatctacttggtttctaaggattgtcagcatcataagttttccgccacatcctttcttataggtgattgtttgatccccaacctagactcaaagaaactttactgttagttgcagaattgatgctcagttcctttaaaaatgtctcttatagatggaatcggaacacacttgtgcagattagtatcacgatgtaattatttttatttataataatgagtattatttattcctagagttctcagtttttcttgttgtattcaatgaatacgccgttctaatacggtactcttcataataatatgcatgtttgtcagtcgttaagggaacttacaagctaaagaatttcacaactgctgttaaatatgattagaatttatccttagaaatgaccagacatcaaggaccatttactacagtctactaatctatacatgtaggcaagaaactgcacgtgggtgtcccattgagcctcttcctttttatgtcaaatatttctttcctatattttcttgtctttgacatttttttgtcgttcatatttggcctgtcattagagtgcaaagaaactccatgtgggtgtcccattgagcctcttcctctttatgtcaaatatttatttcctatgagagccgcgtcacctattatttttgccagaggccttgaaaagtcaggaacggccctgacactgacattctctcgtctgcgcggcgtacattctcctagccgccatcctcaccatgccgctgcggatcccgcccgcggtatgactccctcctcacctacgtggccacgcgcgacgcagccgcaacgacctaacccccatgtcgtcgctgacctcgcgtcccgtctcgctgctacgatgccttcgtggaagcttgaagggtgatggtttttgcattatcggttctttagcgtgtcgactgtatattttgttgaaccatgtaagctgtcgtcttctctcagtgcaagctttgtgggagagatggaacaattgtgatgattcatgggctttcattcaagatttttgaagatctatctagaacttccaccaatagtccaaccattacaaatggaagaggatctagagcaactgaaagtttttgaaaacagctatcggatgaaggtgatcaaagtggagcaaaatgcccgtggtgtggatgcacctgaggtgcattgagaaaatcgaagcgctgacgtgagcgagaaatatccagtagaaaatgatggcagagcgagtgctttgcattgctatcagtgtaggcttgataggagacttttggttgtgatatcttattttctaaatagtatgataccagataggggggccgtaagggcgccttttgctctagtattaggctgtctccagcaacgtctcctaaatttcgtcctttaaagtaatattctttatcatttacagcatcctctaaaaaattcgtcctctatattttcttcatctccaacaacgtcctctaaaatcgatcctct

SEQ ID NO: 77754 - DNA, 2999 bp, Zea Mays
aagagggtctagcactgctaatctcctctatccaggctctgctagaactggtggaagcagtttgtacgggctaaccaagaagatgtggctgaggataacgctatgcttcttcctaggtcctatggtgattgtcatgtacccagatagtcattggtaatcggagctccgaccgagggactgcaaccgtgctctgtgaccatgtccaggtcgaggggttcagctcgggagccttctctgacctcgtcatgagggttcaattcgatttgcatgtcattgcaccaaacaagtttatgcttcgtctgcagccacctgacttcaagacaaggaaggtgatgagttgcataggaactccgatgtgctagaaatcctcatgaataccaggtttctaatggtctatgtgcagtatgagcgttcactagaaacaatcataggacacgatcaaatcatctggctcgggggcctaaattaccgaatcatgctttcccatcagttagtgaaggcccttgtcgagatgcgcaattctagagaaagattaggtgagagcttggtaaccctcaggtttcttttggttacccagtagtccagctaccaacacttgaaacaagctcttcagatgagaagcagcagaagcaacttttctttagaatctacttggtttctaaggattgtcagcatcataagttttccgccacatcctttcttataggtgattgtttgatccccaacctagactcaaagaaactttactgttagttgcagaattgatgctcagttcctttaaaaatgtctcttatagatggaatcggaacacacttgtgcagattagtatcacgatgtaattatttttatttataataatgagtattatttattcctagagttctcagtttttcttgttgtattcaatgaatacgccgttctaatacggtactcttcataataatatgcatgtttgtcagtcgttaagggaacttacaagctaaagaatttcacaactgctgttaaatatgattagaatttatccttagaaatgaccagacatcaaggaccatttactacagtctactaatctatacatgtaggcaagaaactgcacgtgggtgtcccattgagcctcttcctttttatgtcaaatatttctttcctatattttcttgtctttgacatttttttgtcgttcatatttggcctgtcattagagtgcaaagaaactccatgtgggtgtcccattgagcctcttcctctttatgtcaaatatttatttcctatgagagccgcgtcacctattatttttgccagaggccttgaaaagtcaggaacggccctgacactgacattctctcgtctgcgcggcgtacattctcctagccgccatcctcaccatgccgctgcggatcccgcccgcggtatgactccctcctcacctacgtggccacgcgcgacgcagccgcaacgacctaacccccatgtcgtcgctgacctcgcgtcccgtctcgctgctacgatgccttcgtggaagcttgaaggtatgatgtcccttccatctctcttctttgatggactgctctttgttgttccagttcactactaatgtgggttttgcctattggtaggaaaaaaaattctttacatctgggatgtaaagaatctcttttacagcccctcacatacaccagctgctggtatatataaatagaagaaaaaaataaattactaaaagattattttgtaaattttgatctgtctttgtgggcctttaagtggtgcatgtgaggggctgtaaaaggtggtgttcacatgcggtatgtatagattttttttcccggtggtaagcctggtgcgatggcgttggtaacaaaaaaaaagtagaatgcacgctttatttattttgatgccaaaaattcgaatcgaaactgcaattggccgcttacaatattattgttgacaaaaaatgaaatgcgtgctagcatcatagctaacgatattatcatacatgttttggtacatttagcactaaaaggtgtgctctgatgctatttgcatcaattaaaccatctttaagaatatgtcattggttacttcatataattttgtcttgtaatttgtttgaacttgtaatgcctggagaagtctgcagtaaaaaattgttaggatgcagtcgtactgccaggttcattaattaggtgaatttaggtatttgtagttttcaaaatgatgaatatgtacacagatgaatatgtatattatctaaaatttattggatgtaacgttcaattgtttcatgatacacatgtgttggttattggaggggaacggtggtgttctgtgttaggtttcacgacatatctctgtggagcagattggcatatgtgaaattgataagacggtggtagatggtgatggtttttgcattatcggttctttagcgtgtcgactgtatattttgttgaaccatgtaagctgtcgtcttctctcagtgcaagctttgtgggagagatggaacaattgtgatgattcatgggctttcattcaagatttttgaagatctatctagaacttccaccaatagtccaaccattacaaatggaagaggatctagagcaactgaaagtttttgaaaacagctatcggatgaaggtgatcaaagtggagcaaaatgcccgtggtgtggatgcacctgaggtgcattgagaaaatcgaagcgctgacgtgagcgagaaatatccagtagaaaatgatggcagagcgagtgctttgcattgctatcagtgtaggcttgataggagacttttggttgtgatatcttattttctaaatagtatgataccagataggggggccgtaagggcgccttttgctctagtattaggctgtctccagcaacgtctcctaaatttcgtcctttaaagtaatattctttatcatttacagcatcctctaaaaaattcgtcctctatattttcttcatctccaacaacgtcctctaaaatcgatcctct

SEQ ID NO: 77755 - DNA, 4772 bp, Zea Mays
aagagggtctagcactgctaatctcctctatccaggctctgctagaactggtggaagcagtttgtacgggctaaccaagaagatgtggctgaggataacgctatgcttcttcctaggtcctatggtgattgtcatgtacccagatagtcattggtaatcggagctccgaccgagggactgcaaccgtgctctgtgaccatgtccaggtcgaggggttcagctcgggagccttctctgacctcgtcatgagggttcaattcgatttgcatgtcattgcaccaaacaagtttatgcttcgtctgcagccacctgacttcaagacaaggaaggtgatgagttgcataggaactccgatgtgctagaaatcctcatgaataccaggtttctaatggtctatgtgcagtatgagcgttcactagaaacaatcataggacacgatcaaatcatctggctcgggggcctaaattaccgaatcatgctttcccatcagttagtgaaggcccttgtcgagatgcgcaattctagagaaagattaggtgagagcttggtaaccctcaggtttcttttggttacccagtagtccagctaccaacacttgaaacaagctcttcagatgagaagcagcagaagcaacttttctttagaatctacttggtttctaaggattgtcagcatcataagttttccgccacatcctttcttataggtgattgtttgatccccaacctagactcaaagaaactttactgttagttgcagaattgatgctcagttcctttaaaaatgtctcttatagatggaatcggaacacacttgtgcagattagtatcacgatgtaattatttttatttataataatgagtattatttattcctagagttctcagtttttcttgttgtattcaatgaatacgccgttctaatacggtactcttcataataatatgcatgtttgtcagtcgttaagggaacttacaagctaaagaatttcacaactgctgttaaatatgattagaatttatccttagaaatgaccagacatcaaggaccatttactacagtctactaatctatacatgtaggcaagaaactgcacgtgggtgtcccattgagcctcttcctttttatgtcaaatatttctttcctatattttcttgtctttgacatttttttgtcgttcatatttggcctgtcattagagtgcaaagaaactccatgtgggtgtcccattgagcctcttcctctttatgtcaaatatttatttcctatgagagccgcgtcacctattatttttgccagaggtacagaaaagtctccttttattctagataccatttttggaaattcaatgctggattacatagttcataatatcatggtttcagtgtccagaatggagccgctaataatttgtcaactagatcaactaaagaaaaattgaatcagtctcaagcacaatcgtttaatagtgtgaaaattggatgaaactaatcgatcaagtgaagaagacaaaggaaaaatataggttttgttttttgccggtcagcaggtgtttagagaagaaattgaccggattaatagggtagacggtcgtactattaagaggggtcaatgaacttgatcggtgtaaaacttagtgcctcgtataatataaacggttgcatttacatgagggctaacaacgcttcgttttttaaaatacaaaatcttttgaaaaagcgcaaaaatatcaactctgtggttggtagaacgtccgagccaggaggccagctcgtccgcgactctgtcagagaagtctgctggcgccttgtctctgtctcccttcgctaccatccaagccaggaggctggaccgtccgcataaactgaattgagtttgggcagggaaagtgtgtttttgagtccttgcactatggactgtccggggtttttagccggacggtaagtggtccatgtgcagaccgtccggccataaaatggcggacactccgctcggattgttttaactgacgagtgctatgatattccatgttgacaggtcccggaccgtccggcccaggagggtggatcgtccaggcttgactttttctgacagcactgacaggtttcaacggtctttatagccgttactggtacgatggaccgtccggccatggggcgtggaccgtccatgtgtgcgcagaagttgtgctatttgcacataatgactaggtttgagttgtgggctataaatagaaatggagcttgtgtgtgagggctctcttgaccactcctagcatacattgagctcatttgtgatcctctaactcaaactctcatacttgttgcttgagatcgcattctagtgagtgattgagaagttctagtgcatttgcatcctttgagaagttctaccgcccccttccgcatactattcctccccgcaccaccgcagcaaacgtcggccccatcccgccatcttcctctccgcgctgcccctctccctgctcggatcggcacgcatggtactgttgtttctcctactcctctcttcttcgaggttctcgatctctcagctgaggcgtctgtgtcacctgccattccctagtagtctctccttcgggtgtcctaacatactcctctctccttctcgtgtcgtcgccccgaagcatgctactcctcgcgccaccgcagtttccgtgacccctccccgtttgtctccatggcggcgcggaatccgacttgacatggcggcattcttgacagacctcacccctcttctctgttagcaactctgtcggctagggcacgaactaacagtcgctagaggtgtggagaacgggaagatatgacatggggaagaagaagatagcagggaaggcgataatagaattgttatttttgttcttcgataccctctcctgtacagatacacgccatttatatatggacgcggtcacacaagtgtatcagtattgaggcccatattacatggcccaacgtggcccaaccacatttatatttggccaggggctggcgcactttgatctcctcgactgcgcttaagccttctcttctgccgcgtctgtttctgttgtcttgttcatccctttccacttatgattgcttgctaacagcttcatcgccttgtattgacctccagttgcctccccacttgccaacctatgtggtgaccatggcagtatgtctgaccagggccgtacctgtgggggtgccaagggtgcggccgcaccaggcccccaaaatcagagggtcccctagccactagacgctaacacttttttcctgttaaacctatctattctagacacaaatacgcaaagagcgatgcgctatcaactagtctcatttagattgttaaactaatgtctcaattgcttatcgaatactccatccgataaaaaatagtatttgttttagctcttgattttttatgtttatattcaactagatgatgatgaatccactaaagaagcaaaacaaattttattttgatatagagagagtattatttactatacacatgatggttgcatcggcagagagaagctttttaaaattgaaatatttttgtgaactatttatggtcaacaataacttaagagaggttaaacggcttgacgattctatatatcgaaaaaaagttgttggatgaaattgatctcaatgatataagcgatgactttgtatcacaaaatgttagaagatatttttaatgatatcaaataagaagtaagtgcttttagctatattttacatttgttatcttataagcatcaaaacagagcataataatttttatatgttaaatattcgatactgtatgtataattatatatatttgtgtgtggatggaccctccatatcggatttcgttcaaggccttgaaaagtcaggaacggccctgacactgacattctctcgtctgcgcggcgtacattctcctagccgccatcctcaccatgccgctgcggatcccgcccgcggtatgactccctcctcacctacgtggccacgcgcgacgcagccgcaacgacctaacccccatgtcgtcgctgacctcgcgtcccgtctcgctgctacgatgccttcgtggaagcttgaaggtttcacgacatatctctgtggagcagattggcatatgtgaaattgataagacggtggtagatggtgatggtttttgcattatcggttctttagcgtgtcgactgtatattttgttgaaccatgtaagctgtcgtcttctctcagtgcaagctttgtgggagagatggaacaattgtgatgattcatgggctttcattcaagatttttgaagatctatctagaacttccaccaatagtccaaccattacaaatggaagaggatctagagcaactgaaagtttttgaaaacagctatcggatgaaggtgatcaaagtggagcaaaatgcccgtggtgtggatgcacctgaggtgcattgagaaaatcgaagcgctgacgtgagcgagaaatatccagtagaaaatgatggcagagcgagtgctttgcattgctatcagtgtaggcttgataggagacttttggttgtgatatcttattttctaaatagtatgataccagataggggggccgtaagggcgccttttgctctagtattaggctgtctccagcaacgtctcctaaatttcgtcctttaaagtaatattctttatcatttacagcatcctctaaaaaattcgtcctctatattttcttcatctccaacaacgtcctctaaaatcgatcctct

SEQ ID NO: 77756 - DNA, 2727 bp, Zea Mays
gacaaagttcaagctcttctcaaccacagctcttacctttgtcacgatcatgatggagatcttaatagcagtattccacgttccgtttggttttagggactaaaaattaattcattcattttagttttatttagtagctaaattggcaaataagttgcaataaaacagggactaaactgttttagtctttagtccgtcaaagatctattaaatgagactaactcatattaattcaatattttgactctccttcatttgtccatggatcgctctggtcttgcatcttacaatttgttggtcagtttatataagattcctaatgttgtatctacatgtgttgcacaatattgatattttttgctatacactctcctgttgcagcccaaactataagtcctttatgtatctagaaaagctaaaacgacttataattaggaggagggtgtataacgctaatatttttttgtttcactatccatatttctttactgtcattttttactatattattggctttagacagattactatgatacttttcgtttttcttcaatagtgctcaacataatttaggatgagaaactggctcccactaattgttgttgcattgtccctctgttagttgttgcattgtcatttgttgaactacaggtgaaccatgaattaagacttgggatcatatcatcgtcattctctcttagtctctttcttgaaaaataattttttgtgcatggaaaaatgtgataaactgtgtttgaacaggacatatgtcaggcatcaaccaataagagggaaaagtggagacatggtttttgggacatatgtcactttttgggagggaaataggcttttttctcgatgttgaaacatggttttgtctttggtcacttgggctcatttcattagcattgtatggatcatcattggcagtaagaccgatgcaaccctactccttgatggcttggtacaaggcttcaaaatatctgaagtaagcaaatctgctagcctctcaaagtgagcctgagacctgcaaacctcaaagtgtcgggaattaagtgagacaatgtagaaggtgaaagaggcgagcatggcacaaaagtgtgaacaagcgacagtgatttgttgaacgaatgacaatcttttgaagacgcccactgccaattctctgcctttgtcatgtgtacaagagcacaatggttgttgtagcatatgaaccctgccgtggttattcatactaaatgtgaataacagaattcttgctttgtttgtggcctttgatctgcaagagggtctagcactgctaatctcctctatccaggctctgctagaactggtggaagcagtttgtacgggctaaccaagaagatgtggctgaggataacgctatgcttcttcctaggtcctatggtgattgtcatgtacccagatagtcattggtaatcggagctccgaccgagggactgcaaccgtgctctgtgaccatgtccaggtcgaggggttcagctcgggagccttctctgacctcgtcatgagggttcaattcgatttgcatgtcattgcaccaaacaagtttatgcttcgtctgcagccacctgacttcaagacaaggaaggtgatgagttgcataggaactccgatgtgctagaaatcctcatgaataccaggtttctaatggtctatgtgcagtatgagcgttcactagaaacaatcataggacacgagtaagcaaagaaccttacaacggattcatgaagtttactccatatgcatttggtgtgacattggttcctttgttttgcctttcattacagtcaaatcatctggctcgggggcctaaattaccgaatcatgctttcccatcagttagtgaaggcccttgtcgagatgcgcaattctagagaaagattaggtgagagcttggtaaccctcaggtttcttttggttacccagtagtccagctaccaacacttgaaacaagctcttcagatgagaagcagcagaagcaacttttctttagaatctacttggtttctaaggattgtcagcatcataagttttccgccacatcctttcttatagggtgatggtttttgcattatcggttctttagcgtgtcgactgtatattttgttgaaccatgtaagctgtcgtcttctctcagtgcaagctttgtgggagagatggaacaattgtgatgattcatgggctttcattcaagatttttgaagatctatctagaacttccaccaatagtccaaccattacaaatggaagaggatctagagcaactgaaagtttttgaaaacagctatcggatgaaggtattttggcatggaacgctagaatctgagatagaccgtgtctggtgatcaaagtggagcaaaatgcccgtggtgtggatgcacctgaggtgcattgagaaaatcgaagcgctgacgtgagcgagaaatatccagtagaaaatgatggcagagcgagtgctttgcattgctatcagtgtaggcttgataggagacttttggttgtgatatcttattttctaaatagtatgataccagataggggggccgtaagggcgccttttgctctagtattaggctgtctccagcaacgtctcctaaatttcgtcctttaaagtaatattctttatcatttacagcatcctctaaaaaattcgtcctctatattttcttcatctccaacaacgtcctctaaaatcgatcctct

SEQ ID NO: 77757 - DNA, 1278 bp, Zea Mays
aagagggtctagcactgctaatctcctctatccaggctctgctagaactggtggaagcagtttgtacgggctaaccaagaagatgtggctgaggataacgctatgcttcttcctaggtcctatggtgattgtcatgtacccagatagtcattggtaatcggagctccgaccgagggactgcaaccgtgctctgtgaccatgtccaggtcgaggggttcagctcgggagccttctctgacctcgtcatgagggttcaattcgatttgcatgtcattgcaccaaacaagtttatgcttcgtctgcagccacctgacttcaagacaaggaaggtgatgagttgcataggaactccgatgtgctagaaatcctcatgaataccaggtttctaatggtctatgtgcagtatgagcgttcactagaaacaatcataggacacgatcaaatcatctggctcgggggcctaaattaccgaatcatgctttcccatcagttagtgaaggcccttgtcgagatgcgcaattctagagaaagattaggtgagagcttggtaaccctcaggtttcttttggttacccagtagtccagctaccaacacttgaaacaagctcttcagatgagaagcagcagaagcaacttttctttagaatctacttggtttctaaggattgtcagcatcataagttttccgccacatcctttcttatagagtgcaaagaaactccatgtgggtgtcccattgagcctcttcctctttatgtcaaatatttatttcctatgagagccgcgtcacctattatttttgccagaggccttgaaaagtcaggaacggccctgacactgacattctctcgtctgcgcggcgtacattctcctagccgccatcctcaccatgccgctgcggatcccgcccgcggtatgactccctcctcacctacgtggccacgcgcgacgcagccgcaacgacctaacccccatgtcgtcgctgacctcgcgtcccgtctcgctgctacgatgccttcgtggaagcttgaagggtgatggtttttgcattatcggttctttagcgtgtcgactgtatattttgttgaaccatgtaagctgtcgtcttctctcagtgcaagctttgtgggagagatggaacaattgtgatgattcatgggctttcattcaagatttttgaagatctatctagaacttccaccaatagtccaaccattacaaatggaagaggatctagagcaactgaaagtttttgaaaacagctatcggatgaagttc

SEQ ID NO: 77758 - DNA, 2232 bp, Zea Mays
gacaaagttcaagctcttctcaaccacagctcttacctttgtcacgatcatgatggagatcttaatagcagtattccacgttccgtttggttttagggactaaaaattaattcattcattttagttttatttagtagctaaattggcaaataagttgcaataaaacagggactaaactgttttagtctttagtccgtcaaagatctattaaatgagactaactcatattaattcaatattttgactctccttcatttgtccatggatcgctctggtcttgcatcttacaatttgttggtcagtttatataagattcctaatgttgtatctacatgtgttgcacaatattgatattttttgctatacactctcctgttgcagcccaaactataagtcctttatgtatctagaaaagctaaaacgacttataattaggaggagggtgtataacgctaatatttttttgtttcactatccatatttctttactgtcattttttactatattattggctttagacagattactatgatacttttcgtttttcttcaatagtgctcaacataatttaggatgagaaactggctcccactaattgttgttgcattgtccctctgttagttgttgcattgtcatttgttgaactacaggtgaaccatgaattaagacttgggatcatatcatcgtcattctctcttagtctctttcttgaaaaataattttttgtgcatggaaaaatgtgataaactgtgtttgaacaggacatatgtcaggcatcaaccaataagagggaaaagtggagacatggtttttgggacatatgtcactttttgggagggaaataggcttttttctcgatgttgaaacatggttttgtctttggtcacttgggctcatttcattagcattgtatggatcatcattggcagtaagaccgatgcaaccctactccttgatggcttggtacaaggcttcaaaatatctgaagtaagcaaatctgctagcctctcaaagtgagcctgagacctgcaaacctcaaagtgtcgggaattaagtgagacaatgtagaaggtgaaagaggcgagcatggcacaaaagtgtgaacaagcgacagtgatttgttgaacgaatgacaatcttttgaagacgcccactgccaattctctgcctttgtcatgtacaagagcacaatggttgttgtagcatatgaaccctgccgtggttattcatactaaatgtgaataacagaattcttgctttgtttgtggcctttgatctgcaagagggtctagcactgctaatctcctctatccaggctctgctagaactggtggaagcagtttgtacgggctaaccaagaagatgtggctgaggataacgctatgcttcttcctaggtcctatggtgattgtcatgtacccagatagtcattggtaatcggagctccgaccgagggactgcaaccgtgctctgtgaccatgtccaggtcgaggggttcagctcgggagccttctctgacctcgtcatgagggttcaattcgatttgcatgtcattgcaccaaacaagtttatgcttcgtctgcagccacctgacttcaagacaaggaaggtgatgagttgcataggaactccgatgtgctagaaatcctcatgaataccaggtttctaatggtctatgtgcagtatgagcgttcactagaaacaatcataggacacgatcaaatcatctggctcgggggcctaaattaccgaatcatgctttcccatcagttagtgaaggcccttgtcgagatgcgcaattctagagaaagattaggtgagagcttggtaaccctcaggtttcttttggttacccagtagtccagctaccaacacttgaaacaagctcttcagatgagaagcagcagaagcaacttttctttagaatctacttggtttctaaggattgtcagcatcataagttttccgccacatcctttcttatagggtgatggtttttgcattatcggttctttagcgtgtcgactgtatattttgttgaaccatgtaagctgtcgtcttctctcagtgcaagctttgtgggagagatggaacaattgtgatgattcatgggctttcattcaagatttttgaagatctatctagaacttccaccaatagtccaaccattacaaatggaagaggatctagagcaactgaaagtttttgaaaacagctatcggatgaagttc

SEQ ID NO: 77759 - DNA, 2183 bp, Zea Mays
atggacgcggaggggttgctggcgtcggcggcgatcaatctgggactggcgctggtggcgctctcgctcttctccctgctcaagaagcagccggggaacgcgcccgtttaccgtccccgccggatggcgaccggcgaccttcgtgctgatggtggctttctaccgctcggccacgggcgactaaccccgtcgttccggtggataggcgcggccttccggctctctgaagacgacgtgctgcggcgccacggcctcgacgctctcgtcatcgtccgcctcttcaagtttgggatcaattgtttcagtgtttgctcgattgttggactactggtccttgctccaacaaattatactagtgaaggtcgcgctgaaatcagaagatcgaattccatggaactgttcacggttaccaatgtgacacggggatctaataggaatacagagaaattactatgagaagaattgagcacttgaagcatcactacaaaagatatgatcaatacaccgttttggtgcgaggaattccaacatgtccagaccatggggcttacgggtgttatgtggatcacttcttctcaaagcattatcggacataccgatcataccaaatcgtacatgacataggaaacattgaggcattgcagaagctggcgtcctccattgagaaacggatacagaggaaaagggagaccagtaaatgtagtctcttgggacggatctggagcaagtttacatcggatgcaacaggcattcacaaccatgaagagaaactgaaaaatgtgcaagatactatccgcctcctacagtgtgaaaatatgcttaaacaaaaggaggtacctgtagcctttgtgtcgttcaaatcccggttggaggctgcccaagctgcggagacgcagcagctcgccaatccactgtcgctggtcacaacctacgcgcccgaaccaacggacacgatatggaagaacctgtccatcccgttctggcgcatggctacgtacaggctcggagtcttcgctgccgcggtcttgctgacggtgttcttcaccatccccgtaacggccgtgcaggggatagcgcagttcgagaagatgaagaggtggttcccgccggcgcgagctgtgcagctcatacctggcttgaactccgtggtgaccgggtaccttccgggcatgatcctgaacggcttcatctacctggttccttccgcgatgctcggcatggcctcgttcgaaggctgcgtcgccagcagccagagggagatcagggcctgcgacatggtcttctacttcttgctcggaaacgtgttcttcctcagcgttctctcgggctctctgctcgaccagatcggagagtccttcacgcaccccaagaacatccccaaccgtctcgcgagcgctgtttctgcgcagtcggatttcttcatcacgtacatcttgaccaacggcatgtcagggttctccttggaggtccttcagttcggtctgttgatatggcagtttttaaaggcgcgttcaattggacacagcgaggaaccatatctgtatggcttcccttacttccgagtcgtgcccgtggtttccatcgcaatattgatcggagtggtgtacgctgtggttgcgccccttctgctcccgatccttctggtgtacttcctgctcggttacgcagtgtacatcaaccagatggaagatgtttatgagatcacatacgacacatgcgggcagtactggcccaaaattcaccactacatattcctatcaatagcgctcatgcaagtcaccatgataggactgtttgggctcaagtcgaagccaggagcctccttggccacagttcccttgcttgtgctcaacatccttttcaacgagtactgcaaggcccggtttcttccaactttcaggcatcgaccagtccaggctgccaatgagcttgatgaggctgagggtacgactgaaggcgacgttgacgatgcaatctgcgcttataggccaccatggatgcgtccgacgaacctggaatctagttctgtggagcctttgaatgtttgatctgtcttttccacggtggcaccatggacctccaggcatcgcggtttcgtctgtcaacttgtaaaacacaccgcatatcacggacctggactagttggagaagcagaagacatgcttcttgttgttacacctggg

SEQ ID NO: 77760 - DNA, 2417 bp, Zea Mays
ctcgcggcaggccacgtgtccctcgaggctcctccggcgaccacgtcgccgcccgccatatgaccaacgcaccaatcagactccgccggcgggaagctgatcgttcactgctactagcgcagtgcccacgctggtgcagcaccggatcatctgtgtgacaaggaagaagaatggacgcggaggggttgctggcgtcggcggcgatcaatctgggactggcgctggtggcgctctcgctcttctccctgctcaagaagcagccggggaacgcgcccgtttaccgtccccgccggatggcgaccggcgaccttcgtgctgatggtggctttctaccgctcggccacgggcgactaaccccgtcgttccggtggataggcgcggccttccggctctctgaagacgacgtgctgcggcgccacggcctcgacgctctcgtcatcgtccgcctcttcaagtttgggatcaattgtttcagtgtttgctcgattgttggactactggtccttgctccaacaaattatactagtgaaggtcgcgctgaaatcagaagatcgaattccatggaactgttcacggttaccaatgtgacacggggatctaataggctttgggtgcattattcatgcctttgctttatatccttgtatgtggtatatttgcttcataaggaatacagagaaattactatgagaagaattgagcacttgaagcatcactacaaaagatatgatcaatacaccgttttggtgcgaggaattccaacatgtccagaccatggggcttacgggtgttatgtggatcacttcttctcaaagcattatcggacataccgatcataccaaatcgtacatgacataggaaacattgaggcattgcagaagctggcgtcctccattgagaaacggatacagaggaaaagggagaccagtaaatgtagtctcttgggacggatctggagcaagtttacatcggatgcaacaggcattcacaaccatgaagagaaactgaaaaatgtgcaagatactatccgcctcctacagtgtgaaaatatgcttaaacaaaaggaggtacctgtagcctttgtgtcgttcaaatcccggttggaggctgcccaagctgcggagacgcagcagctcgccaatccactgtcgctggtcacaacctacgcgcccgaaccaacggacacgatatggaagaacctgtccatcccgttctggcgcatggctacgtacaggctcggagtcttcgctgccgcggtcttgctgacggtgttcttcaccatccccgtaacggccgtgcaggggatagcgcagttcgagaagatgaagaggtggttcccgccggcgcgagctgtgcagctcatacctggcttgaactccgtggtgaccgggtaccttccgggcatgatcctgaacggcttcatctacctggttccttccgcgatgctcggcatggcctcgttcgaaggctgcgtcgccagcagccagagggagatcagggcctgcgacatggtcttctacttcttgctcggaaacgtgttcttcctcagcgttctctcgggctctctgctcgaccagatcggagagtccttcacgcaccccaagaacatccccaaccgtctcgcgagcgctgtttctgcgcagtcggatttcttcatcacgtacatcttgaccaacggcatgtcagggttctccttggaggtccttcagttcggtctgttgatatggcagtttttaaaggcgcgttcaattggacacagcgaggaaccatatctgtatggcttcccttacttccgagtcgtgcccgtggtttccatcgcaatattgatcggagtggtgtacgctgtggttgcgccccttctgctcccgatccttctggtgtacttcctgctcggttacgcagtgtacatcaaccagatggaagatgtttatgagatcacatacgacacatgcgggcagtactggcccaaaattcaccactacatattcctatcaatagcgctcatgcaagtcaccatgataggactgtttgggctcaagtcgaagccaggagcctccttggccacagttcccttgcttgtgctcaacatccttttcaacgagtactgcaaggcccggtttcttccaactttcaggcatcgaccagtccaggctgccaatgagcttgatgaggctgagggtacgactgaaggcgacgttgacgatgcaatctgcgcttataggccaccatggatgcgtccgacgaacctggaatctagttctgtggagcctttgaatgtttgatctgtcttttccacggtggcaccatggacctccaggcatcgcggtttcgtctgtcaacttgtaaaacacaccgcatatcacggacctggactagttggagaagcagaagacatgcttcttgttgttacacctggg

SEQ ID NO: 77761 - DNA, 2021 bp, Zea Mays
cagggtccctgcgccacagaagatacgacgaacgcattcaaaatccagctcccctccgaagtccgaacgcttcttggacgattcttgaaagcgtccagccacgccgccctcgccgccgccgcccccttccgaatccaaaggaacccgaatctcgcaacgatcaccaccacctgaccttccttgttcgcgtcgccccaacccttgcccgtccaggagttcagcgaaaccttccctttctttggccttgccttgcctgcctcccttccctcggtcgccgctcggataagcaacccggagtcccggaccgctccaagaaaccaataagtccccgcgccatggtgctgaggaagccagcgcgcaagaagcccaaagaccccagcgccgtgccggccgggggtccgggaagcaggggtcgctctggcggcatggccccggcgccgccggcccccaactacatgagggcgacgacctgctccggcgccaggtccagcgccgccgccgcgccgcatcctcagccagggagagagaaggcggtgctgacggctgcggcgctgcgcgcgtgcagggccacgtgctcctccgccatgaaggggcccggggccgccgggtcggcggacgcctgcccctacgcgtactgctccttcaagggccacgcccacgcggcagcacccgtgccgcccctgggcgccttcgtggcggcgcggaggcggctcatcaagacgcagcagcgcatgaagctcaagggcgcctcgccgttccgcaacgccgccgccggtcacggaagcggctacttcgtcgagatacgcgccggctcggacgtgaccagcagcgatctctcgtccgacgaagtggggcggacggagcacgtcgtgttcggtcccctgggctgctgcggtggcgacgcggagggttcgggcgctgcttccgtggacgggtcctgcgcgtccagcgacgtgatctcggctggctcgtttgagccgtcggggacgaccaagcatcgcggccttgaggagaagaagaccttggtggaccatggaggggaggacatgggtgactgcaggtctgacatctccgaggagctggacgttaaacacggaggaaacaatcctcaaggtggcgtgggtggtggtgctccaaaggaatcgtcggtcgatagcgtttccagctcgctcagtgggataagctttgaagatgttagctctgcctgtgcctatgcagcagcatcctctcagcagcagaacgggtcgagcattgccaggaggaggagaacatctgaacagggtgtcaagcgaatgcgtcctttcaaacccaggcttccgaatttccttccgtcagagaaggtcgatctcaagcatcagtcggtgggcgatcccagagccgctgaggagtggatgctcgactacgctcttcggaaggaagtgaagaagctggcccgtgctcagaagaggaaagttgagatgcttgtccaggccttcgaatctgttatgcccacgcttgcaaacgagaagaagcccgagcaacacgacaatggtgacaatgacaagagaacattcactcttgcatggccttcccaagtatgtagctgatagatagccttttaagcttgtggtttagctggaaccaaccatggtctgaagtctgaacttctgaaggttctaactcagcagtcactgccagaaaaaattcttaccgctattgttttcttatctgatagttgagctactaggataggagctcgctgagttcggttagtggagggcctagtgcatgtacatatgtctcgtgtgctcagtttagtgatgaggaacgagtgtaggagactagcacaccggcaagaatgttgagatgtgttcctttaggcagatatcaataaagctctcattaacagcatttatttcccggttcagatgacaccttcagtttcatttatttgtcctgattgattttcttatcggcatcttgtatagctcaccttgtaatgcctcatttccaacatttcattgatatttagtgttgaacag

SEQ ID NO: 77762 - DNA, 696 bp, Zea Mays
ccatcctgttgtccaggttcaggttcaccaagctcgtgctgctggtgccgctcgcactgtacacgccgcagccgccgccgccggaaggctcgccgtacatgggcgcggcgttgaccgccgtgtgcgcgtcctcgcgggacatgaccatggccgccgactgcacgagctcgaggcagagccggagcttgttgggctcgatgtgcgcgagccccggcacggcgcccttgaagaggaggtcggaggtgagcgtgcggaggatgtccagcggcgtcacgccctcgacggtgcgcacgttggggtcggcgtggtggtcgagaagcacggcgaccatgtcggggcacaccatctcggcggccacgtggagcggcgtcttcccggcggggcccgcggtgtggttcacgtcggcggcgcccagctccagcagcgccttcaccacctcccggctgcagttctccacggcgtagtgcagcgccagcgcctcgtccaggttcagcccctcgcccatcaccatgagcttcacgagctccacgtcggaggagtcgagcgcgcgccgcatgcgccggatcttgtggtggtcgtcgatgtcggccgcggacgaggcctccatgccgccccccggtgccgggtggtggtggtgcgcgaggaacggcgagcggcgggacagcgaggacttgaggcggagctcccacctcgttc

SEQ ID NO: 77763 - DNA, 506 bp, Zea Mays
cggggaccagcacggacagagagcagctcgatcgctttggcacctgctgcttcggcgactgccaccgacgcagcagctgctttcttggctcgatcagctgtggtcctgctgcacgcagacgcagctgctcaaactcgagccgccgcctgcgctgcatccttcctccccatctctttgcgtcatcagctccttcttcttcttcttctcttctgtctggctgtctgtcaccactcaccaccacttcctcctccgatccgatcccttcggttctgcttcttcactactgctacttgtttgttacttttttttctgcttcttttccctccgtcctcccccctctttctcttgcgcgtctctctccagagaaagagagagagagaggtggactggaggctaggctactgttactgtatgtgccagcccatgccgatggagatttttttggaggggaggggaggctcaaggctgtgtcgcaagggagggggttgaggcgtatgtatatgggg

SEQ ID NO: 77764 - DNA, 1684 bp, Zea Mays
gggccaaaacccactcgcttccgttcaccatggggccgccggtccaaattcgcgtcacggcccaaaacagtgaaaggcttgccgagccagacagacggagtgcttccagttgcagccaagccaaccgaaaccgatggcgtcgggctcccgcggcggcggcgggagcgacttctccgtggtcgtggtgggctccgacgccggcgccggcgcagcgctcctcgttccctccgaccgccactcgtggcacgactgcctcgccgaggcggacgcctgcttctccgacctcgaggagcgccaggtcgtgcgcgtccagggcaccgatcgggcccgccgaaccatcgtccgtgtcgtcggcaagttcttcccgggtgtgagcttgccggttgcaatcctacagtaacgatcgatgctgcagattgtggaatgcggaccaaccaacttctattcaatggatggtacaccatacgtgttctctaaaaacaaaatttggatacgtgggatcgtgagattgaatttatcagaaatctaggtttccagtgtaacatgcccaccttatttacatgtttcaagtacaagatccgacgtaggctgtagcttattttatgtattgaagctcatataccagcaaagtgcatattttcttatggtcattctaaattaagggtggatggtcaatctgcttgttggactgtacgaatttattagttccagccagtatatcagcagacctgacctgaccaatgttccgattctttcactattgctattaacaacccaacaagctgaataaggcttccatagcttcatcatcctcgtgctttgttgctaaaggcttagtgttattgcgtcccagacttctcttggtgtcagtgtttacatggcatttacttcggaattttggtttccagctccagcaattgacggtgaacgtctgaaaaagtatgtgttctacaaactccgcaccgaattgcctgtgggtccattctgcatcttgtacatgcacagtactgtgcagtctgatgataacaaccctggagtgtcaatcttgaggacaatttatgaggagctttcacctgagtacaaggaaaggcttcaggttttctacttcttgcatcctgggcttcgctccaggctggccatcgccacacttggcaggctatttttaagtggagggttgtattggaaaatcaagtacattagtcgactggagtatctctggggcgatataagaaagggagaggttgaaattccagattttgttattgaacatgataaggttcttgagcaccggccactcactgattatggcatagaaccagatcccctacatcttgctgatgtacctgctgaggaagtggggtactcgcttggaagatacgaagataaatggactccagaagatcgatggtattcagggaattacatgtgattttttctgctgtcgctgaagcctaaaagattattattgtatagtaacacgataatatgagatctgtatgtcagattgctgtgaaaacattggcaaactgtgtttccaacttcatgattcaaattcttttgaggggaaaaggctatagggaaactcctacaacggaattttattaaaaccttttgtaatgaaaatacgattacaaggggaaaagaggacaagaaaagaagaagtttcttgtcatcgtgaatttag

SEQ ID NO: 77765 - DNA, 1161 bp, Zea Mays
gggccaaaacccactcgcttccgttcaccatggggccgccggtccaaattcgcgtcacggcccaaaacagtgaaaggcttgccgagccagacagacggagtgcttccagttgcagccaagccaaccgaaaccgatggcgtcgggctcccgcggcggcggcgggagcgacttctccgtggtcgtggtgggctccgacgccggcgccggcgcagcgctcctcgttccctccgaccgccactcgtggcacgactgcctcgccgaggcggacgcctgcttctccgacctcgaggagcgccaggtcgtgcgcgtccagggcaccgatcgggcccgccgaaccatcgtccgtgtcgtcggcaagttcttcccgggtgcgcgaatcggccacctccagcaattgacggtgaacgtctgaaaaagtatgtgttctacaaactccgcaccgaattgcctgtgggtccattctgcatcttgtacatgcacagtactgtgcagtctgatgataacaaccctggagtgtcaatcttgaggacaatttatgaggagctttcacctgagtacaaggaaaggcttcaggttttctacttcttgcatcctgggcttcgctccaggctggccatcgccacacttggcaggctatttttaagtggagggttgtattggaaaatcaagtacattagtcgactggagtatctctggggcgatataagaaagggagaggttgaaattccagattttgttattgaacatgataaggttcttgagcaccggccactcactgattatggcatagaaccagatcccctacatcttgctgatgtacctgctgaggaagtggggtactcgcttggaagatacgaagataaatggactccagaagatcgatggtattcagggaattacatgtgattttttctgctgtcgctgaagcctaaaagattattattgtatagtaacacgataatatgagatctgtatgtcagattgctgtgaaaacattggcaaactgtgtttccaacttcatgattcaaattcttttgaggggaaaaggctatagggaaactcctacaacggaattttattaaaaccttttgtaatgaaaatacgattacaaggggaaaagaggacaagaaaagaagaagtttcttgtcatcgtgaatttag

SEQ ID NO: 77766 - DNA, 984 bp, Zea Mays
ctcccacgctatgttgggccgtgtgtgccatacgcgggcctcttcgtgacatccaatgcggttcccctcccctcctacagtcccacagcagacagcaccaccggataaggcaggcaaccgctgcccgctcacgtctggcgtctgggagcctccgattctgagagcagcccatggcgcggggcgcccacgtcgtccgagcactctcccagccacctcgttttgtccgagccagcagctgcgccaggccggtgccgggagcctcgcggcggcggcggcggggccggctcatggtggtgcgggccggtgggccgcccagcaccaacgcgctcatcctcgccttcgtgcttccgctctccctcttcgtcggcacgctcgtcaccgccgcccgcgtcgccgacgacctcgacgaccgcttcctgagggagatggagataaaccgagcgatactggaagagaacgaggcgtccgacgaggacggtgccggtgaggaagacgacgatggggaggaggaagagggggtcgacctgccggtggtggtggaggaggagcccgccgttgtcggtccacgcaccaggaacaggccgagaagacgagtgttctcttctcaatagtgttggttctgatttacaggattatgtgcaccaaaggttcgtgacgacgtagtgttttgaattcttgtaaggctcctcttcaaagcccacgccgaagcacatctgagtacttcaaatttaatgtatatccatatgagcaatctaacgagttcaagaattttaatttatcgcctgtgcaatcatagtggacagaagcgtggtccgggtcagtggccgatccaggggtaatttagatggaaaaattcctactatgccatcagattttatactcattccttatgtattattgagtaacatgtatgtatacttttttgtgtatgacatgtggggccgatgacatagaagtaacgagctctcgactacctgtagtctg

SEQ ID NO: 77767 - DNA, 2309 bp, Zea Mays
aagctcctatatagagaggctccctcccctgcatggacagccaccgccttctccaaccccctcttctctctccgtcttcctcttcttaccttgtcgcgtcatctcatcaagaaactttgctcgacaacaggaaaccccatctcttttctttctctctctctctctctctctctctctctgccttctgtttccaggacgtcccaactgcccagcgccgaccggcccggccaccatgaagccgccatcatcactggtgcactacttcaagctgctggtcctgctggcgctcgcccaggctgaccatgcacgtccccgacgaggacgtgctcttgtccctcggcgcgctgcgcctcgacggccatttcagtttccacgacgtctccgccatggcgcgggacttcggcaaccagtgcagcttcctgccggccgccgtgctccaccctggctcggtctccgacatcgccgccaccgttaggcacgtcttctccctgggcgagggctcgccgctcacggtcgcggcgcgcgggcacgggcactccctcatgggccagtcccaggccgcccaggggatcgtggtcaggatggagtcgctccggggtcctaggcttcaggtcaacgacgccggcgtgtcgccaccgtctgtcgatgctcccggaggagagctctggatcaacgtgctgcgtgagacgctcaagcacggtctggcacccaagtcgtggacggactacctccatctcacggtcggtggcaccttgtctaatgcgggggtcagcgggcaggcgttccgccacggaccgcaggtcagcaatgtcaatcaactggagattgtgacaggaagaggagatgtcgttacctgctcacccgatgataacgctgatctcttctatgctgctctcggtggtcttggtcagttcgggatcatcaccagagcaaggattgcacttgagcctgctccaaagatggtgaggtggataagagttctttactcggattttgaaagcttcaccgaggaccaggagatgctgataatggcagagaactcctttgactacgttgaaggttttgtcatcataaacaggacaggcgtcctcaacaactggagggcgtccttcaagccacaagacccagtcgaagcaagccattttcagtcggatggaagagtactatactgcctcgagctaaccaagaacttcaatagtgacgacactggagttcttggacagggtgcacacctctgagttgaaactgagggcacaaggcctctgggaagttccacatccttggctgaatcttctaataccgaggagctccatccgcagatttgctaaggaagtctttggcaagatcctgaaagatagcaacaatggtcccatattgctttatccagtgaacaaatcaaagtgggacaacagaacgtcagtagtcataccagatgaggaaattttctacctagtggggttcctttcttcagcaccgtctctctcaggttacggcagcattgcacattcaatgaacctgaacaaacagatagtggagttctgtgaagaggctggtattgggatgaaacagtatctggcaccctacaccacacagcagcagtggaaagcccactttggagcaaggtgggagacatttgaacggaggaaacacagatatgatcccctagccatcctagcgccaggacagagaatattcccaaaggcgtcactgccattgcctttgtgacagttcctgctacttgaaggattctgtagagcatacgtttacgttgtacaaaagtgtaggtaaaaagtatcccctgtaaagacaatatctacggaaggtagctagcctgaagaacacagcatagcgactttttttatagtggccgaagacacctcagagcaatacttcaaagtggagcaatgtcacctgaactctgacacctttggaggcaatcactggaggatcgtagcggtccaagaaacctgtatgttgttacagcgttgataattgagacgagctgtgatgatcaactgatcactaaccagtatcccggttatcaacagtgcagaaagttgcttgagggtagtagtgccttgattaacaaataacactgcctgttatttcacttgtaactagcatctcatcccactcaggagtgcctgcgtaaatgtagcaggtttacattactttccatgagtcagaatattatatgctcatgcaaaaacagtaaagtctcttatcaatcatggtgctcagaaacagaaaacgttttggaattctctcaagttgtccattaaaccttagcaacttgcagtgtgaatttg

SEQ ID NO: 77768 - DNA, 2361 bp, Zea Mays
aagctcctatatagagaggctccctcccctgcatggacagccaccgccttctccaaccccctcttctctctccgtcttcctcttcttaccttgtcgcgtcatctcatcaagaaactttgctcgacaacaggaaaccccatctcttttctttctctctctctctctctctctctctctctgccttctgtttccaggacgtcccaactgcccagcgccgaccggcccggccaccatgaagccgccatcatcactggtgcactacttcaagctgctggtcctgctggcgctcgcccaggctgaccatgcacgtccccgacgaggacgtgctcttgtccctcggcgcgctgcgcctcgacggccatttcagtttccacgacgtctccgccatggcgcgggacttcggcaaccagtgcagcttcctgccggccgccgtgctccaccctggctcggtctccgacatcgccgccaccgttaggcacgtcttctccctgggcgagggctcgccgctcacggtcgcggcgcgcgggcacgggcactccctcatgggccagtcccaggccgcccaggggatcgtggtcaggatggagtcgctccggggtcctaggcttcaggtcaacgacgccggcgtgtcgccaccgtctgtcgatgctcccggaggagagctctggatcaacgtgctgcgtgagacgctcaagcacggtctggcacccaagtcgtggacggactacctccatctcacggtcggtggcaccttgtctaatgcgggggtcagcgggcaggcgttccgccacggaccgcaggaagaggagatgtcgttacctgctcacccgatgataacgctgatctcttctatgctgctctcggtggtcttggtcagttcgggatcatcaccagagcaaggattgcacttgagcctgctccaaagatggtgaggtggataagagttctttactcggattttgaaagcttcaccgaggaccaggagatgctgataatggcagagaactcctttgactacgttgaaggttttgtcatcataaacaggacaggcgtcctcaacaactggagggcgtccttcaagccacaagacccagtcgaagcaagccattttcagtcggatggaagagtactatactgcctcgagctaaccaagaacttcaatagtgacgacactgataccatggaacaggaagttactgtactgctatctcgacttagattcatacagtctactctattccacaccgatgtcacgtacctggagttcttggacagggtgcacacctctgagttgaaactgagggcacaaggcctctgggaagttccacatccttggctgaatcttctaataccgaggagctccatccgcagatttgctaaggaagtctttggcaagatcctgaaagatagcaacaatggtcccatattgctttatccagtgaacaaatcaaagtgggacaacagaacgtcagtagtcataccagatgaggaaattttctacctagtggggttcctttcttcagcaccgtctctctcaggttacggcagcattgcacattcaatgaacctgaacaaacagatagtggagttctgtgaagaggctggtattgggatgaaacagtatctggcaccctacaccacacagcagcagtggaaagcccactttggagcaaggtgggagacatttgaacggaggaaacacagatatgatcccctagccatcctagcgccaggacagagaatattcccaaaggcgtcactgccattgcctttgtgacagttcctgctacttgaaggattctgtagagcatacgtttacgttgtacaaaagtgtaggtaaaaagtatcccctgtaaagacaatatctacggaaggtagctagcctgaagaacacagcatagcgactttttttatagtggccgaagacacctcagagcaatacttcaaagtggagcaatgtcacctgaactctgacacctttggaggcaatcactggaggatcgtagcggtccaagaaacctgtatgttgttacagcgttgataattgagacgagctgtgatgatcaactgatcactaaccagtatcccggttatcaacagtgcagaaagttgcttgagggtagtagtgccttgattaacaaataacactgcctgttatttcacttgtaactagcatctcatcccactcaggagtgcctgcgtaaatgtagcaggtttacattactttccatgagtcagaatattatatgctcatgcaaaaacagtaaagtctcttatcaatcatggtgctcagaaacagaaaacgttttggaattctctcaagttgtccattaaaccttagcaacttgcagtgtgaatttg

SEQ ID NO: 77769 - DNA, 1349 bp, Zea Mays
tgcggctccgcccaacgccagttaccactcaccagtcaccagtctccactctggagtctggaactcccctcatcctccacatctccaccgcatcggaactaggaaggcgaagccgaaggcgcggcgcggcgcggcacggatcgagcgatggcggtggcccctcctacggcggcggcgctggagcagctaagcagcagcaagatgttcgacggcttcaatctccgcttccgccaccagagcgccacccttggctgcgccatgactttctccatctacctgcccccgtccccggcgtccaaccttcccgtgctgtactggctctcgggtctcacctgcaccgacgagaatttcatcataaagtccggcgcccagcgcgccgccgctgcccacggcatcgccctcgtggcacctgacacctccccacgtgggttaaatattgaaggagagtcagacagctatgattttggtgtgggcatcaatttttgggcactcaatgggagggcatggcgcgctgacaatttacttgaaaaacactgataaatacaagtcggtgtcagcatttgctccaattgccaatccgataaactgcccttggggtcagaaagcattctcaaattacctgggctcaactaaatcagattgggaggaatatgacgcaacctgcctgattaaaaagaacagcaaagttcccactactatcctaattgaccagggggaggccgacaagttcctggctgagcagcagttgctacctcacaagttcgaggaggcgtgcaaggccgcaggggctgctctgaccttgcgcatgcagcctggatatgaccactcgtactatttcatcgctacgttcgtggacgatcacattgcgcaccatgctcagtttctcaagagcgcctgactgtaaatgtgtagcgtgaggaagacaaggaggcagcctagcatgggtgttttatctatgccgacagtgttgtctcgtgtggcagcttgaggagaggtgaacagcacaccccacatgcgaaataagatggaagatttgctgttcctgtccattgacattgacgagctcgaatgggactgatgttgcaccgaatgtagtttccctgtcattcgctatgcgcaattatgttataacggccctggtgcaaggaatgattgcccgagtgcttgtgtgtgcggcgcgcgcggttgactcttcttggcattctgcagggggtgtacaaatctgtatggatcagagcttggtttagtgttgtcctcctgttcgaaccagaattgagcgcggacggtccggccctgaggccggacggtccgcggtccggacggtccgcgcctgtgggccggacggtccg

SEQ ID NO: 77770 - DNA, 1470 bp, Zea Mays
tgcggctccgcccaacgccagttaccactcaccagtcaccagtctccactctggagtctggaactcccctcatcctccacatctccaccgcatcggaactaggaaggcgaagccgaaggcgcggcgcggcgcggcacggatcgagcgatggcggtggcccctcctacggcggcggcgctggagcagctaagcagcagcaagatgttcgacggcttcaatctccgcttccgccaccagagcgccacccttggctgcgccatgactttctccatctacctgcccccgtccccggcgtccaaccttccgtgctgtactggctctcgggtctcacctgcaccgacgagaatttcatcataaagtccggcgcccagcgcgccgccgctgcccacggcatcgccctcgtggcacctgacacctccccacgtgggttaaatattgaaggagagtcagacagctatgattttggtgtgggtgccgggttttatttgaatgccacaaatgaaaagtggaaaaactggcgcatgtatgactacattgtgaaggaacttccaaaagttttaagtgataactttgaacaactcaacacgtcacaggcatcaatttttgggcactcaatgggagggcatggcgcgctgacaatttacttgaaaaacactgataaatacaagtcggtgtcagcatttgctccaattgccaatccgataaactgcccttggggtcagaaagcattctcaaattacctgggctcaactaaatcagattgggaggaatatgacgcaacctgcctgattaaaaagaacagcaaagttcccactactatcctaattgaccagggggaggccgacaagttcctggctgagcagcagttgctacctcacaagttcgaggaggcgtgcaaggccgcaggggctgctctgaccttgcgcatgcagcctggatatgaccactcgtactatttcatcgctacgttcgtggacgatcacattgcgcaccatgctcagtttctcaagagcgcctgactgtaaatgtgtagcgtgaggaagacaaggaggcagcctagcatgggtgttttatctatgccgacagtgttgtctcgtgtggcagcttgaggagaggtgaacagcacaccccacatgcgaaataagatggaagatttgctgttcctgtccattgacattgacgagctcgaatgggactgatgttgcaccgaatgtagtttccctgtcattcgctatgcgcaattatgttataacggccctggtgcaaggaatgattgcccgagtgcttgtgtgtgcggcgcgcgcggttgactcttcttggcattctgcagggggtgtacaaatctgtatggatcagagcttggtttagtgttgtcctcctgttcgaaccagaattgagcgcggacggtccggccctgaggccggacggtccgcggtccggacggtccgcgcctgtgggccggacggtccg

SEQ ID NO: 77771 - DNA, 2260 bp, Zea Mays
ctttgcattactgcatgccgcgaaccgtctgccatactgtctattaattacacgaccaatggcatcatcgaaaagcagatcaagcaaagccatccagggtctaaatccccgacctttttctagctggccccgcagcgccctccatatcctcctatgttcgttatatatatcccgcctgtctcgatcccccctctcctttttcatcaaatgactatatattcaagcgaacgaggataaatctagacacatatgtaaaatacatccctcaagtctttgatgaattcaccgttgacttaaaacgaaatttattttgatacggatggagtattagattaaaataaaatatatttttacagaaagcctattgataagatgtagatattatagactttaagaaagtttattagctggctgggcatcgagcatccacatcttctttctttgtatgtaaccatgtgatgaaggcaaggcaacggcacccacggtcccacgcctgttctggtctggtctgatgatgtccctctctgggtccagtctcctccaggtccagctcgctggatggagttggagcttggaggggcagacatgccatctctgtcgtgggaggatggacagcgagggttctgtctcgtctcttgctcttgttgcctcaccctttcctctcatctccgcatgcggtcttgtccgcccttccccttcattccttgccttgggtccagtgcctccctttgttaccatctgccagaccgcggtggaacccagggtgctgcttcgtcatatgcccctcaagggaggaagctgacaaggcggtgaatgcctaccacaacaagcaaacgctctctggggcatcaagtcctttgcaagtaaaatatgctgatggggagttggagaggcttgaacataagcttttcattggaatgcttccgaaaaatgttacagacactgagttgactgatttgttttccaaatatgggaatgtcacggatttgcaaattttgagaggttcacaacaaacaaacaaagctggctgtgccttcattaaatatcaaacaaaagatcaagcattggcagctattgaagctctaaacgggaagcacaaaatagagggttctagcgtgccattggttgtcaaatgggctgatacagaaaaggaaaggcaggctcggaaagcacaaaaagctcagtcacagctatctcatatacccaatgcaagtccaatgcagcagcactcttcagtatttggtgctttacagatgggatatatgcctcaatacaatggatttggttatcagccaccagggacatacggacttatgcagtaccctctatctcctatgcaaaatcaaggccccttccagaatatggttcaacctcttaaccaagggaactcgataagaggagtcaatcctgaagtgtctcccagttcagttcaaaggtcatttaatgcaatgcagctaggcagcccttatcctgctatgcctggtatgcagtatcctggatcatatcccggtggtcccatgggcaaccgtcatttgggaaattctcacaatccgattaaagctccaaattcgaatgccaattccactgtttcttctagtcccagcagcaatgctggtgggcaggttgaaggtcctcctggagccaacctatttatttatcatatcccacaagaatacggtgaccaggagctttccagcgccttccagagtttcggaagagtagtaagcgctaaggtgttcgtagataaagcaacgggcgtgagcaaatgcttcggttttgtgagctacgactctcctgcctccgcgcaggcagccatcaacaggatgaacggctaccagttaggcggtaaaaagctcaaggtacaactgaagagagaaaacaacaccaagcacagtagtaaaccgttttgacagacaaggcagcagccgtccggtacccggtacatattaattgaccatcaacacattgcagcagcagcctcagggcctggggagggaagagacccgtgtacccctctttgttcacttcaacattcttggagattcgtcagtcagctcagctcgtgtaattcattgcagcagacataggccgtagcagcagtttgtaccatgatcagatcacttgtacacatgattcattcaattgttactgacagccggctttcatcctagaataattcgctgtgacaaccttatcatttgctgacgaatgaagtcaggtagacttgttcatctatggaatgatggcaactttcgagcga

SEQ ID NO: 77772 - DNA, 4387 bp, Zea Mays
atgcgacgccacacccccggccttctcgccgccaatctcctccgcgcctcgtcgctcctcagacccccgtccgtcctcgccgcccgcgcggccttgctccaccatgcgccggacgacgcccaccgcctgctcgacgaaacgccgcgcgggagggcggccgccatcgtacgtgccctcacgtccgcaccgtcttcctcctccggtgacacggcctgcatcgcgtgcctccactgcgcggccctcaagtcaggcgccgtgctggacccgccagtgcgcacgtccctgctcgcggcgtacgccagggccggccgcggcgcgggagcgggagccggagcaggcgccgccctggcgctcttccgcgaggccgttgcgcccgacgtgatcctgtggaacgcggccgtcggcgccctgacgacgagctgccggtacgacgacgccgcggctctgttccggcggatggcgcgcgagctcggggagtttgactccaccaccgtggtcgtcatgctgtcgggggcgtcccgcgcgggtaaccttcggcgtggaatggagctccatggcatggcggccaagagttgtctcggcgctcattgtctcggcgcgtggaacgctctcgttgacatgtatgcaaagtgtggtgagtttaggtccgcagaggttgtgtttcatagcatgccgtgcagggacaccacctcatggaactctgtcataagtgggagcatttttaacgggctcgctgaggtgtcagcgtgctacttcagggaaatgagttgctccatcttccagccagatgaggtgagcctctcttctgtcctctcagcctgctctcgtctggatgatctcttctcctttggggagtctgtgcatagctgtgcagtcaaactcggttatgaggacaccgcgtcttgctcagtagcgaattctctcgtgacgttctactctgagtttggaatgccagaggctgcgaagaaggtcttcgccagcaatttgaacaggaatttggtatcatggaatgctatgatcaagggtctagtccagaatgaaagagtaaccgaggcccttgctgttttgaggcaaatgagattggagaaccagccagatgtcgccactttggtgaccatagtttcaggctgtgctgatcaaggcctactttctgaaggggaaacactccatggatacgtaatcagaaaaggacttcttcgtgaggagccttccatgggaaatagcttactcgatctgtatttgaaatgtgacgaaccatctaatgcaggcctgttgtttatgacaatgccaagaagggacttgatatcgtggaacacaatgatttctggttactcaagatatggcccactgagagaagaggctcagttaatgttcaaaggattactttctgaaggttcatcgtgcagcttggccactatgctagctgtcataccatcatgctccattccggaagaacttagctttgggaaagcacttcactctttcagcctgaagtgtggatttacatctagtggggtttcggctgttaatgctttgatacacatgtatatgagctgtggtgatccactggccgccttttcgcttattgaaagaataataccggtatcagatatcatttcctggaatacggtcatagttgggtgtctgcaaaatgaactccataaagatgcattggaaatctttcggttcatgtattgttctttggccataaaccctgacagtattacaatagttagtgtcttatcagcatgtggagatcttaatctactagcacttgggaaatccatccactgcatgatcctgaagcacttgtttgcttccaatttgagggtgaaaaattcattattgaccatgtattttcgctttggagatactagaagtgctgagttagtcttttatagcatgggagacacaaatttgtgctcctggaactgtatgatctctggctttgcacagaataacaaaggctggagagcattgcagttctatcagaagatggaggatttcgaacctaatgaaatatctgttgtcggtatcatctgtgcttgcacacagcttggtggttatagacaaggaaagagcatacacgggcatgtgttcaggtctgttctgcacaataatgtttttatttcagcatcacttgttgatatgtattgcaagtgtgggagactggacattgctgtcagagtatttgaagcttctgccgaaaaatcgattgccgggtggaactccttgatatcagcttttggattccatggccatgggatgaaatctatagatcttttctggaagatgcatgattctggaatgaaagccacgaaaagcacatttattgctctactgtcagcttgcagtcactctggacttgttgatgaagggtggaagtattattgccttatgtcagaaaagtttgggatcacaccagccccagagcaccatgtctgcattgtagacatgcttgggcgggctggtcggctgcaggaagcgcacaagtttgtggagagcttgccgtctcaacaaacacacggaatttggggcgcactgttaaatgcttgcagtagcaggagtgaactcaagatgggcgaatccatcgcaaaacatttgctacatttggagcctggaaatagcggttattatgtaactgcagcaaacctttatgcatacaaagacatgtggagtggtgtggcccaagttaggagcgttttgcaagataaagggctggtgaagccccatggtcgtagcactgttggttaagcggtgggtcataaaccatggaagccatacaatatgacgaatcgccatgaatgtttgtcaacttcccaagttcttctcacaagccgtctcaattatgagctgcaagttgcacgctggtatagtggtatcttattcggtgctgcttcgtcatatgcccctcaagggaggaagctgacaaggcggtgaatgcctaccacaacaagcaaacgctctctggggcatcaagtcctttgcaagtaaaatatgctgatggggagttggagaggcttgaacataagcttttcattggaatgcttccgaaaaatgttacagacactgagttgactgatttgttttccaaatatgggaatgtcacggatttgcaaattttgagaggttcacaacaaacaaacaaagctggctgtgccttcattaaatatcaaacaaaagatcaagcattggcagctattgaagctctaaacgggaagcacaaaatagagggttctagcgtgccattggttgtcaaatgggctgatacagaaaaggaaaggcaggctcggaaagcacaaaaagctcagtcacagctatctcatatacccaatgcaagtccaatgcagcagcactcttcagtatttggtgctttacagatgggatatatgcctcaatacaatggatttggttatcagccaccagggacatacggacttatgcagtaccctctatctcctatgcaaaatcaaggccccttccagaatatggttcaacctcttaaccaagggaactcgataagaggagtcaatcctgaagtgtctcccagttcagttcaaaggtcatttaatgcaatgcagctaggcagcccttatcctgctatgcctggtatgcagtatcctggatcatatcccggtggtcccatgggcaaccgtcatttgggaaattctcacaatccgattaaagctccaaattcgaatgccaattccactgtttcttctagtcccagcagcaatgctggtgggcaggttgaaggtcctcctggagccaacctatttatttatcatatcccacaagaatacggtgaccaggagctttccagcgccttccagagtttcggaagagtagtaagcgctaaggtgttcgtagataaagcaacgggcgtgagcaaatgcttcggttttgtgagctacgactctcctgcctccgcgcaggcagccatcaacaggatgaacggctaccagttaggcggtaaaaagctcaaggtacaactgaagagagaaaacaacaccaagcacagtagtaaaccgttttgacagacaaggcagcagccgtccggtacccggtacatattaattgaccatcaacacattgcagcagcagcctcagggcctggggagggaagagacccgtgtacccctctttgttcacttcaacattcttggagattcgtcagtcagctcagctcgtgtaattcattgcagcagacataggccgtagcagcagtttgtaccatgatcagatcacttgtacacatgattcattcaattgttactgacagccggctttcatcctagaataattcgctgtgacaaccttatcatttgctgacgaatgaagtcaggtagacttgttcatctatggaatgatggcaactttcgagcga

SEQ ID NO: 77773 - DNA, 4619 bp, Zea Mays
atgcgacgccacacccccggccttctcgccgccaatctcctccgcgcctcgtcgctcctcagacccccgtccgtcctcgccgcccgcgcggccttgctccaccatgcgccggacgacgcccaccgcctgctcgacgaaacgccgcgcgggagggcggccgccatcgtacgtgccctcacgtccgcaccgtcttcctcctccggtgacacggcctgcatcgcgtgcctccactgcgcggccctcaagtcaggcgccgtgctggacccgccagtgcgcacgtccctgctcgcggcgtacgccagggccggccgcggcgcgggagcgggagccggagcaggcgccgccctggcgctcttccgcgaggccgttgcgcccgacgtgatcctgtggaacgcggccgtcggcgccctgacgacgagctgccggtacgacgacgccgcggctctgttccggcggatggcgcgcgagctcggggagtttgactccaccaccgtggtcgtcatgctgtcgggggcgtcccgcgcgggtaaccttcggcgtggaatggagctccatggcatggcggccaagagttgtctcggcgctcattgtctcggcgcgtggaacgctctcgttgacatgtatgcaaagtgtggtgagtttaggtccgcagaggttgtgtttcatagcatgccgtgcagggacaccacctcatggaactctgtcataagtgggagcatttttaacgggctcgctgaggtgtcagcgtgctacttcagggaaatgagttgctccatcttccagccagatgaggtgagcctctcttctgtcctctcagcctgctctcgtctggatgatctcttctcctttggggagtctgtgcatagctgtgcagtcaaactcggttatgaggacaccgcgtcttgctcagtagcgaattctctcgtgacgttctactctgagtttggaatgccagaggctgcgaagaaggtcttcgccagcaatttgaacaggaatttggtatcatggaatgctatgatcaagggtctagtccagaatgaaagagtaaccgaggcccttgctgttttgaggcaaatgagattggagaaccagccagatgtcgccactttggtgaccatagtttcaggctgtgctgatcaaggcctactttctgaaggggaaacactccatggatacgtaatcagaaaaggacttcttcgtgaggagccttccatgggaaatagcttactcgatctgtatttgaaatgtgacgaaccatctaatgcaggcctgttgtttatgacaatgccaagaagggacttgatatcgtggaacacaatgatttctggttactcaagatatggcccactgagagaagaggctcagttaatgttcaaaggattactttctgaaggttcatcgtgcagcttggccactatgctagctgtcataccatcatgctccattccggaagaacttagctttgggaaagcacttcactctttcagcctgaagtgtggatttacatctagtggggtttcggctgttaatgctttgatacacatgtatatgagctgtggtgatccactggccgccttttcgcttattgaaagaataataccggtatcagatatcatttcctggaatacggtcatagttgggtgtctgcaaaatgaactccataaagatgcattggaaatctttcggttcatgtattgttctttggccataaaccctgacagtattacaatagttagtgtcttatcagcatgtggagatcttaatctactagcacttgggaaatccatccactgcatgatcctgaagcacttgtttgcttccaatttgagggtgaaaaattcattattgaccatgtattttcgctttggagatactagaagtgctgagttagtcttttatagcatgggagacacaaatttgtgctcctggaactgtatgatctctggctttgcacagaataacaaaggctggagagcattgcagttctatcagaagatggaggatttcgaacctaatgaaatatctgttgtcggtatcatctgtgcttgcacacagcttggtggttatagacaaggaaagagcatacacgggcatgtgttcaggtctgttctgcacaataatgtttttatttcagcatcacttgttgatatgtattgcaagtgtgggagactggacattgctgtcagagtatttgaagcttctgccgaaaaatcgattgccgggtggaactccttgatatcagcttttggattccatggccatgggatgaaatctatagatcttttctggaagatgcatgattctggaatgaaagccacgaaaagcacatttattgctctactgtcagcttgcagtcactctggacttgttgatgaagggtggaagtattattgccttatgtcagaaaagtttgggatcacaccagccccagagcaccatgtctgcattgtagacatgcttgggcgggctggtcggctgcaggaagcgcacaagtttgtggagagcttgccgtctcaacaaacacacggaatttggggcgcactgttaaatgcttgcagtagcaggagtgaactcaagatgggcgaatccatcgcaaaacatttgctacatttggagcctggaaatagcggttattatgtaactgcagcaaacctttatgcatacaaagacatgtggagtggtgtggcccaagttaggagcgttttgcaagataaagggctggtgaagccccatggtcgtagcactgttggttaagcggtgggtcataaaccatggaagccatacaatatgacgaatcgccatgaatgtttgtcaacttcccaagttcttctcacaagccgtctcaattatgagctgcaagttgcacgctggtatagtggtatcttattccgcaaccgcccacagctcgtgacgaggcgacccaacccccccgtagcggcggcggcggcggcggcaggaggcggaggagccaaggagggcggcgaggagaggaccgtcaagctcttcgtgggccaggtgcccaagcacatggccgaggccgacctgctcgccttgttccgcgaggtagccgccgtcgacgaggtcaccgtcatcaaggacaaggccaccaaggtctcccgagggtgctgcttcgtcatatgcccctcaagggaggaagctgacaaggcggtgaatgcctaccacaacaagcaaacgctctctggggcatcaagtcctttgcaagtaaaatatgctgatggggagttggagaggcttgaacataagcttttcattggaatgcttccgaaaaatgttacagacactgagttgactgatttgttttccaaatatgggaatgtcacggatttgcaaattttgagaggttcacaacaaacaaacaaagctggctgtgccttcattaaatatcaaacaaaagatcaagcattggcagctattgaagctctaaacgggaagcacaaaatagagggttctagcgtgccattggttgtcaaatgggctgatacagaaaaggaaaggcaggctcggaaagcacaaaaagctcagtcacagctatctcatatacccaatgcaagtccaatgcagcagcactcttcagtatttggtgctttacagatgggatatatgcctcaatacaatggatttggttatcagccaccagggacatacggacttatgcagtaccctctatctcctatgcaaaatcaaggccccttccagaatatggttcaacctcttaaccaagggaactcgataagaggagtcaatcctgaagtgtctcccagttcagttcaaaggtcatttaatgcaatgcagctaggcagcccttatcctgctatgcctggtatgcagtatcctggatcatatcccggtggtcccatgggcaaccgtcatttgggaaattctcacaatccgattaaagctccaaattcgaatgccaattccactgtttcttctagtcccagcagcaatgctggtgggcaggttgaaggtcctcctggagccaacctatttatttatcatatcccacaagaatacggtgaccaggagctttccagcgccttccagagtttcggaagagtagtaagcgctaaggtgttcgtagataaagcaacgggcgtgagcaaatgcttcggttttgtgagctacgactctcctgcctccgcgcaggcagccatcaacaggatgaacggctaccagttaggcggtaaaaagctcaaggtacaactgaagagagaaaacaacaccaagcacagtagtaaaccgttttgacagacaaggcagcagccgtccggtacccggtacatattaattgaccatcaacacattgcagcagcagcctcagggcctggggagggaagagacccgtgtacccctctttgttcacttcaacattcttggagattcgtcagtcagctcagctcgtgtaattcattgcagcagacataggccgtagcagcagtttgtaccatgatcagatcacttgtacacatgattcattcaattgttactgacagccggctttcatcctagaataattcgctgtgacaaccttatcatttgctgacgaatgaagtcaggtagacttgttcatctatggaatgatggcaactttcgagcga

SEQ ID NO: 77774 - DNA, 4636 bp, Zea Mays
atgcgacgccacacccccggccttctcgccgccaatctcctccgcgcctcgtcgctcctcagacccccgtccgtcctcgccgcccgcgcggccttgctccaccatgcgccggacgacgcccaccgcctgctcgacgaaacgccgcgcgggagggcggccgccatcgtacgtgccctcacgtccgcaccgtcttcctcctccggtgacacggcctgcatcgcgtgcctccactgcgcggccctcaagtcaggcgccgtgctggacccgccagtgcgcacgtccctgctcgcggcgtacgccagggccggccgcggcgcgggagcgggagccggagcaggcgccgccctggcgctcttccgcgaggccgttgcgcccgacgtgatcctgtggaacgcggccgtcggcgccctgacgacgagctgccggtacgacgacgccgcggctctgttccggcggatggcgcgcgagctcggggagtttgactccaccaccgtggtcgtcatgctgtcgggggcgtcccgcgcgggtaaccttcggcgtggaatggagctccatggcatggcggccaagagttgtctcggcgctcattgtctcggcgcgtggaacgctctcgttgacatgtatgcaaagtgtggtgagtttaggtccgcagaggttgtgtttcatagcatgccgtgcagggacaccacctcatggaactctgtcataagtgggagcatttttaacgggctcgctgaggtgtcagcgtgctacttcagggaaatgagttgctccatcttccagccagatgaggtgagcctctcttctgtcctctcagcctgctctcgtctggatgatctcttctcctttggggagtctgtgcatagctgtgcagtcaaactcggttatgaggacaccgcgtcttgctcagtagcgaattctctcgtgacgttctactctgagtttggaatgccagaggctgcgaagaaggtcttcgccagcaatttgaacaggaatttggtatcatggaatgctatgatcaagggtctagtccagaatgaaagagtaaccgaggcccttgctgttttgaggcaaatgagattggagaaccagccagatgtcgccactttggtgaccatagtttcaggctgtgctgatcaaggcctactttctgaaggggaaacactccatggatacgtaatcagaaaaggacttcttcgtgaggagccttccatgggaaatagcttactcgatctgtatttgaaatgtgacgaaccatctaatgcaggcctgttgtttatgacaatgccaagaagggacttgatatcgtggaacacaatgatttctggttactcaagatatggcccactgagagaagaggctcagttaatgttcaaaggattactttctgaaggttcatcgtgcagcttggccactatgctagctgtcataccatcatgctccattccggaagaacttagctttgggaaagcacttcactctttcagcctgaagtgtggatttacatctagtggggtttcggctgttaatgctttgatacacatgtatatgagctgtggtgatccactggccgccttttcgcttattgaaagaataataccggtatcagatatcatttcctggaatacggtcatagttgggtgtctgcaaaatgaactccataaagatgcattggaaatctttcggttcatgtattgttctttggccataaaccctgacagtattacaatagttagtgtcttatcagcatgtggagatcttaatctactagcacttgggaaatccatccactgcatgatcctgaagcacttgtttgcttccaatttgagggtgaaaaattcattattgaccatgtattttcgctttggagatactagaagtgctgagttagtcttttatagcatgggagacacaaatttgtgctcctggaactgtatgatctctggctttgcacagaataacaaaggctggagagcattgcagttctatcagaagatggaggatttcgaacctaatgaaatatctgttgtcggtatcatctgtgcttgcacacagcttggtggttatagacaaggaaagagcatacacgggcatgtgttcaggtctgttctgcacaataatgtttttatttcagcatcacttgttgatatgtattgcaagtgtgggagactggacattgctgtcagagtatttgaagcttctgccgaaaaatcgattgccgggtggaactccttgatatcagcttttggattccatggccatgggatgaaatctatagatcttttctggaagatgcatgattctggaatgaaagccacgaaaagcacatttattgctctactgtcagcttgcagtcactctggacttgttgatgaagggtggaagtattattgccttatgtcagaaaagtttgggatcacaccagccccagagcaccatgtctgcattgtagacatgcttgggcgggctggtcggctgcaggaagcgcacaagtttgtggagagcttgccgtctcaacaaacacacggaatttggggcgcactgttaaatgcttgcagtagcaggagtgaactcaagatgggcgaatccatcgcaaaacatttgctacatttggagcctggaaatagcggttattatgtaactgcagcaaacctttatgcatacaaagacatgtggagtggtgtggcccaagttaggagcgttttgcaagataaagggctggtgaagccccatggtcgtagcactgttggttaagcggtgggtcataaaccatggaagccatacaatatgacgaatcgccatgaatgtttgtcaacttcccaagttcttctcacaagccgtctcaattatgagctgcaagttgcacgctggtatagtggtatcttattccatacaactgcggaggaaaaactccaggtcgtgtatgtttcacttcactaattgaaaattactgccagaacatggtaattttataaagggtgccttcctccaacatggtgtgctgggcagctggatggtgtttgggcgaagaagatgaagggcagagaggaacggagacggcctttgggcggcggctgcagataatataggaactgctggcagccgatactgcttgcgagttacccccgccaaagctgctggccgctcaagcgccggttgtcattcctggtgcctccatgggccacgagggcaccacacagccacaactgcatgcatgccttctcatgatccaaggaaaggaagaagacaggctgagatgtgtgaggagaagaaaaggaagggcggtgggcccaccaagaaacaggagcatacgtgcaaatatgcgaaaccggagagcagaagcaagcagttgtcaattgtcatcgggaggaggaggaggaggaggagaagaagatagggcctgcctgcaatagaatccctctggaatctggatgatggatggctgtcttttgaacacaccgccacccaatcactatcgtagtatctcgtcccactctgcaccactcaaacccgctgctcccctctgcatttcacccgtcctccacctcctcccagacaccacaccagcgctccctttctggctgcagcttccccggacagctagctgcctgcctctcactcgagagtcacagagaccacccctagctagggatggccgcagtgatgaaggctcttgctgtcgcctcgccggtgtcggcacgggcagcacagcatccccgtcggtaccacgtcgcaggtgtccctagccagcagcatcaacagcagaacttgagcctgcacctgcagtcgttgttccacggcgtatcgtcggttcagtgccctgggcgatggcggcgggcgcaggtggtggcgatggcgggccggcctgcgatccagttcatccagggcacggacgagcagacggtcccggacgtgcggctgaccaagtcccgcgacggcaccaacggcgtggccgtcttcgcgttcgagcgtccgtcggtgttcgactcgtcggcggagctgggcgacatcacgggcttttacatggtggacgacgagggcgtgctgcagtccgtggacgtgagcgccaagttcgtgaacggcaagccggcgcggatcgaggccaagtacgtgatgcgcacgcctcaggagtgggaccgcttcatgcgcttcatggagcggtactcccgggccaacggcctccagttcgtcaggaactgaatgaaagcaactcatgagcccgacgagcctgcctgcctgcctgctttgagctctctctctctcgctgcctgtctgtctctttctcctctgcgcccctgtgtgagttggaatgcttttggattaacggccggattggaagaggactaatcgtacagtctgacaagtattgtgcatcctctgattgctcgcacacaggctggccacatgcaacccctcctccctgttcattgtccgtggcagttgtaccgtcccgttagagccttggccttggcatgacacaaagcatgtggcgtgcgctgtgtcactgtgtctgtgtgaaggaacaaggaagggtatcgaaattcgaacaccctaaatcgatctatcgatgaatttgggccgttttgtgttatttctcactacaactgtcccaaggtatcgaggatgagcaagtacc

SEQ ID NO: 77775 - DNA, 4705 bp, Zea Mays
gtttccgtagcttttcttcgccggcctttcctcttctgagctgtcaattctcaacgatcacaaataaccggcctcggccttccaatgcaggagcggcgccgcagccgccgcctaagctcgacgcgccgcggcggtggatgcgacgccacacccccggccttctcgccgccaatctcctccgcgcctcgtcgctcctcagacccccgtccgtcctcgccgcccgcgcggccttgctccaccatgcgccggacgacgcccaccgcctgctcgacgaaacgccgcgcgggagggcggccgccatcgtacgtgccctcacgtccgcaccgtcttcctcctccggtgacacggcctgcatcgcgtgcctccactgcgcggccctcaagtcaggcgccgtgctggacccgccagtgcgcacgtccctgctcgcggcgtacgccagggccggccgcggcgcgggagcgggagccggagcaggcgccgccctggcgctcttccgcgaggccgttgcgcccgacgtgatcctgtggaacgcggccgtcggcgccctgacgacgagctgccggtacgacgacgccgcggctctgttccggcggatggcgcgcgagctcggggagtttgactccaccaccgtggtcgtcatgctgtcgggggcgtcccgcgcgggtaaccttcggcgtggaatggagctccatggcatggcggccaagagttgtctcggcgctcattgtctcggcgcgtggaacgctctcgttgacatgtatgcaaagtgtggtgagtttaggtccgcagaggttgtgtttcatagcatgccgtgcagggacaccacctcatggaactctgtcataagtgggagcatttttaacgggctcgctgaggtgtcagcgtgctacttcagggaaatgagttgctccatcttccagccagatgaggtgagcctctcttctgtcctctcagcctgctctcgtctggatgatctcttctcctttggggagtctgtgcatagctgtgcagtcaaactcggttatgaggacaccgcgtcttgctcagtagcgaattctctcgtgacgttctactctgagtttggaatgccagaggctgcgaagaaggtcttcgccagcaatttgaacaggaatttggtatcatggaatgctatgatcaagggtctagtccagaatgaaagagtaaccgaggcccttgctgttttgaggcaaatgagattggagaaccagccagatgtcgccactttggtgaccatagtttcaggctgtgctgatcaaggcctactttctgaaggggaaacactccatggatacgtaatcagaaaaggacttcttcgtgaggagccttccatgggaaatagcttactcgatctgtatttgaaatgtgacgaaccatctaatgcaggcctgttgtttatgacaatgccaagaagggacttgatatcgtggaacacaatgatttctggttactcaagatatggcccactgagagaagaggctcagttaatgttcaaaggattactttctgaaggttcatcgtgcagcttggccactatgctagctgtcataccatcatgctccattccggaagaacttagctttgggaaagcacttcactctttcagcctgaagtgtggatttacatctagtggggtttcggctgttaatgctttgatacacatgtatatgagctgtggtgatccactggccgccttttcgcttattgaaagaataataccggtatcagatatcatttcctggaatacggtcatagttgggtgtctgcaaaatgaactccataaagatgcattggaaatctttcggttcatgtattgttctttggccataaaccctgacagtattacaatagttagtgtcttatcagcatgtggagatcttaatctactagcacttgggaaatccatccactgcatgatcctgaagcacttgtttgcttccaatttgagggtgaaaaattcattattgaccatgtattttcgctttggagatactagaagtgctgagttagtcttttatagcatgggagacacaaatttgtgctcctggaactgtatgatctctggctttgcacagaataacaaaggctggagagcattgcagttctatcagaagatggaggatttcgaacctaatgaaatatctgttgtcggtatcatctgtgcttgcacacagcttggtggttatagacaaggaaagagcatacacgggcatgtgttcaggtctgttctgcacaataatgtttttatttcagcatcacttgttgatatgtattgcaagtgtgggagactggacattgctgtcagagtatttgaagcttctgccgaaaaatcgattgccgggtggaactccttgatatcagcttttggattccatggccatgggatgaaatctatagatcttttctggaagatgcatgattctggaatgaaagccacgaaaagcacatttattgctctactgtcagcttgcagtcactctggacttgttgatgaagggtggaagtattattgccttatgtcagaaaagtttgggatcacaccagccccagagcaccatgtctgcattgtagacatgcttgggcgggctggtcggctgcaggaagcgcacaagtttgtggagagcttgccgtctcaacaaacacacggaatttggggcgcactgttaaatgcttgcagtagcaggagtgaactcaagatgggcgaatccatcgcaaaacatttgctacatttggagcctggaaatagcggttattatgtaactgcagcaaacctttatgcatacaaagacatgtggagtggtgtggcccaagttaggagcgttttgcaagataaagggctggtgaagccccatggtcgtagcactgttggttaagcggtgggtcataaaccatggaagccatacaatatgacgaatcgccatgaatgtttgtcaacttcccaagttcttctcacaagccgtctcaattatgagctgcaagttgcacgctggtatagtggtatcttattcaacatggtaattttataaagggtgccttcctccaacatggtgtgctgggcagctggatggtgtttgggcgaagaagatgaagggcagagaggaacggagacggcctttgggcggcggctgcagataatataggaactgctggcagccgatactgcttgcgagttacccccgccaaagctgctggccgctcaagcgccggttgtcattcctggtgcctccatgggccacgagggcaccacacagccacaactgcatgcatgccttctcatgatccaaggaaaggaagaagacaggctgagatgtgtgaggagaagaaaaggaagggcggtgggcccaccaagaaacaggagcatacgtgcaaatatgcgaaaccggagagcagaagcaagcagttgtcaattgtcatcgggaggaggaggaggaggaggagaagaagatagggcctgcctgcaatagaatccctctggaatctggatgatggatggctgtcttttgaacacaccgccacccaatcactatcgtagtatctcgtcccactctgcaccactcaaacccgctgctcccctctgcatttcacccgtcctccacctcctcccagacaccacaccagcgctccctttctggctgcagcttccccggacagctagctgcctgcctctcactcgagagtcacagagaccacccctagctagggatggccgcagtgatgaaggctcttgctgtcgcctcgccggtgtcggcacgggcagcacagcatccccgtcggtaccacgtcgcaggtgtccctagccagcagcatcaacagcagaacttgagcctgcacctgcagtcgttgttccacggcgtatcgtcggttcagtgccctgggcgatggcggcgggcgcaggtggtggcgatggcgggccggcctgcgatccagttcatccagggcacggacgagcagacggtcccggacgtgcggctgaccaagtcccgcgacggcaccaacggcgtggccgtcttcgcgttcgagcgtccgtcggtgttcgactcgtcggcggagctgggcgacatcacgggcttttacatggtggacgacgagggcgtgctgcagtccgtggacgtgagcgccaagttcgtgaacggcaagccggcgcggatcgaggccaagtacgtgatgcgcacgcctcaggagtgggaccgcttcatgcgcttcatggagcggtactcccgggccaacggcctccagttcgtcaggaactgaatgaaagcaactcatgagcccgacgagcctgcctgcctgcctgctttgagctctctctctctcgctgcctgtctgtctctttctcctctgcgcccctgtgtgagttggaatgcttttggattaacggccggattggaagaggactaatcgtacagtctgacaagtattgtgcatcctctgattgctcgcacacaggctggccacatgcaacccctcctccctgttcattgtccgtggcagttgtaccgtcccgttagagccttggccttggcatgacacaaagcatgtggcgtgcgctgtgtcactgtgtctgtgtgaaggaacaaggaagggtatcgaaattcgaacaccctaaatcgatctatcgatgaatttgggccgttttgtgttatttctcactacaactgtcccaaggtatcgaggatgagcaagtacc

SEQ ID NO: 77776 - DNA, 1235 bp, Zea Mays
ctcctctctcaatacaattaatatcaggtgcggggtgtgagccattagtgcacgtttattcatgttaacaagagccaacaggcaacagccaagcagatacttcctacttccctccgtccctctccctgctcccttaacacgctgacacacacgctagacgaccagccgccggactttacaaccactcgcaccacgaaatctacctgtctgtgaccaaacgaacagaatggaagcaaccaactaataaagtagtagtaggctggaagaaaagttagaggctctacagtctacgctaccacacattactgacaaagtagaggtcgaaaaaggctaggcttattgcctcgattggaaatgggtcctctctctaatctaccgaggaggagattctgcgaggtggagaaagcaaggtgggaggggtttagcttggctcctactccatcgagtacatcgcaggttcggaagcagttcacgggtgcgcctatgatcagttccacgcgcaggaaatcggcaaaaaaaagattaactcgaatcaatcatacagcgtcatgcataaaccatggcagttggcacgacagacacacgatccgcaatgtgggggagaaaacgtgagctacggcaacagaagacgggatcgaagcagacaagcacgccccgacaaacaagcgcggcgcgggggacttacaggtgaactggagctcgctcggatggatctcgacgaggtcctggcccatcgccgccggccgcggaggtatcggccgcgagcagacgcgccaggctacacagcaagcacaagcgttgggcaccagtaatccgttggaggggcgcgagagagcccgagggcgaaccggcgggtggtgcgctatgaatcagcagcgtgtccccgtcatgaaggctcgtcgtcgcgcgcgacagggaccgcctcccagttgcggcagcggcaggggaggcgtcggagtgaatcagtgaagacgacggcgggagacggggaggataaagagggaaggcggtcgctctcggccccaccgctgattttggggtggtgcaggtgcagcagccagcagagtagcggtagcggaggcagcctcggggtcgggggacgcggagcgggcggcgaagtctccgaggcggggcgcgtgtggggtcgcctttccgcggttgcggggtccagccggcagaccttttttttgcagattggtccctaccagtacgaacaacacctcctggttcacgac

SEQ ID NO: 77777 - DNA, 2489 bp, Zea Mays
gtagaataagaggaaacaataatgtagcagatgtaattattgcccttgtaccaatagcaagcacagctgtttatttaataggccgtgaacgtaaagaaggaatccacaacaaatatgagtcagaattactacctctagtgtaaaacttatcttgccaccaccgataccgcaccaggacttgaagcagatgttaacaattactgaattgactttttttttctttacatgacaatttttttttttgaactttggcagaagctctgcctctcaattaagaagaagaaaaggaattgatcaagttttaaggaaaatcaggcccgaaacatacacagggtgcacaagcaaaccaaacaatggtagccccacacaaacaccatcaagggtcatcgttgccagctcaacataaaagacgagtagctctgactccccaagatgggcgacataatggcaaaacagaaaaaccgatgacatcaacacacaaataccggcacgtgaggaagaccgcagtgtgccgtcattgtcaagcctcgatacaccccacgcgaggcagctccgattcttcaccaacgagacttccaaacttgatcctctgtcctgccccgacaaacgccaagactccgaagcaatccagccacgaaggaggggggctcaccacgcgtcatcgttgtcgagccacatccctgacgtagcagctccgatttcagctgcaagaccgcacctccacccgcatataggacgccgaggagcgaaagcaacaaccgaagggcgacgtcgtggccgagacaaatttcaaaagcgacaccttcaggaaggtagtgacatcggggacaccaccgtcccatgtccgtgaaggaccgggctttcacccaaggaaaccagtgttgaggagagtgacgccctcaacgggtaaagcggcgcccatgggcgtcactgtcgccgaggctttcgtccaagaagcccccagcacaaacgccaggccaaggccccgggacaccacaggctacctccgccatcgtcagtgccctgacatcccgcacaaaccctcccagaagggcatcgacacgccggccggctaccacagcagccgcagagccacgacggacaccaccccctccggtcgggctcacggagccatgcggcgagcgtcccactgccgcaggcccgggtcgctgcacgcctgcaccccacgccgacaacaaggcaatcgtgagcaggcagagcaccgtgcaagaggcccacaaaagccaccgaaggggccaaccaatcggcaagccgctggccctgccagccgacgccaacaccgatgcacacgcccccgccctgccgccgcgccaacatgcaccctagtagatagcgcagagcaaccatcggacgtgcaggacacggacgaccgacgagcaagcacgataaccccggcagatgtgcgcacgccgccagcgggttggtgagcccctgccccctcgccgccactagcggcgccaagctgaaccgcagcgtacggtagaggcaaaggggcaagtgggtggcagagatctgcctgacacgcacccgcacctgcccttggcccggccttcgacgccgtcgaggataccgcgctcgcctacgatggagccgcgacccaccaccacggcgaccccgccaggctcaactcccccgagctcaggcacgacgggcagcaccacatctcgccgccccacactacggtcgacgacaagctccacgccaactgcggtggcacggatgttgtcagcgtcgttgccgcagagccagagccaatgccacgccacgaccgcgacgaccacagccacaccgagctccttccatggtgagcccacacgccaagaatcagagagctcacgtgacgtcaagatgccttgccgccgccgtcctaggggtccgcggggacatcccggccagcccatagtcacaagaaacaggtgcagtggtagcgaccctcgacctagaaaagtcgtccccaacctagatatgtagggtcattttcgttcccaccgtgtaaaacctctcataagtagcgtaccacgtttctcgaatctcgatcccgttcctcgaccctatcgaccctggaactttgcgattatggtccagcccctctggcggcggcgagacggagagaaggtgtaacgccccgaattttgcagtgaatttttttcttttctttactcgccaaaattcgggcgttaccttttcctcttctttttcccctcgctaaaccttgaccttttccaaagttctagcgggattcggtttggaattcccgtacgtataaaaaccctaaatactttatgttgtttgatgcaccatgccgcccttgcatttttttgaaagtgcaatcgcattcatctagaagatcggatttcgaaaacagggaagtaatcttttcttttttctttctctctttttctctcttctcttctctttttctctctcccgcgccgtgggccgaccccggccgacccaggcccctgcgc

SEQ ID NO: 77778 - DNA, 2505 bp, Zea Mays
tcttcttacacaactttttttgctgctacgggggagagatatactaggatgaaacacctatttttatgtgtttatttatacaactagatgtatccttaaatgtgcaatggaccatctagagtcgtaggaaatgtgttttaacgtaaaccaaaattattttttttcacatggacagctctcaacgtgtgtgatgtgcaatttgtccgcagtgatttggtggttcgatattgtaaaatgttggatgggttatggtgtccttcagcactgtacaaagaagatcagtgatgggggttttatagtcatagactcataggtagtacttgcttgcccgttacatccttgtgatgcctcaaccgaactttctcgggctggctgcatagcttcttacacagctttattgttgctccacagctgcggggatgaggaacatactaggataaaaataactattattagtgagggagggatgtctctggatcatgatgtgtatgcaggctaggggcacatgggtttccaggtggaccgagccagcccacttcttaccccttccttcttttttcttttcttttttcctattctttctccttcacgctggtgtgttgcatttccttacgttggtacctcatgcctcacttaccgaagttgtattgagactccatgcctcgctttaccaccttgataaccatggttccgcatttctattgatatagttctacttttctgagttatgttcgtttttaaatgttgaattcttgaaagtaactgctgctgatccaatgtataatttctttcttcctgcttagacaaatcaagatcacagggtggaccagaatctaagaaggacctgattatacatagggatgggaatagtcaaaatattgcagcacatactttcacttttcgtgaacttgctgcagccactaagaatttcaggcaagattgccttttaggggagggaggttttggtcgtgtatataaaggacgcttggagaatggacagatctgccaccagataaagaacctctagactggaacacacggatgaagatagctgcaggtgcagctaagggcttagagtaccttcacgacaagacgagtcctcctgttatttaccgggattttaagtcgtcaaacattcttcttggagaaggatttcatccgaagctatcagactttggccttgcaaaacttggcccggttggtgacaagacccatgtttcaacacgtgtgatgggtacatatggctactgtgccccagaatatgcaatgactgggcagctcacagttaaatccgatgtgtatagctttggagtcgtgttccttgaacttatcacagggcgcaaagcaattgacaacaccaagacccaaggggagcaaaacctagtggcatgggctcgtccactgttcaaggaccgcaggaaattccctaaaatggctgatccaatgcttcagggccgcttccctatgaggggtctatatcaggccttagctgttgctgccatgtgcttgcaagagcaagctgctacacgccctcacatcggggatgttgtcactgctctctcatatctcgcttctcaggcttatgacccaaacgcccctgttcaacacagccggagcaacgcatctacccccaggtccagaaaccctgctgcatggaacggtgatcagcgcagtgtgcgctcgcctaatcatcaccattctccagacccgcggcggagggaccctgccagggcatccaagtatggagcagaggttagcaggactagctctgccagcgattctggccggcggtcaggtctggatgacatggacccgaccgggtcgcaagtgggaagcccagctcaaaccggaagaagaagagaagctccaagggccaccgacagacagcgcgctgtcggagaggccaggatgtggggggagaactcaagggagcgaacgaatggccatggtagcttcgacagcacgcatgagtgaagccgtcaggttccactccaggcatcatttcagacgaacgatgggtttgagcccactcatcggcaccggtcggatctgatcttgggacatggcgtggtgccgcccggtccgggtgtctgtgaataaggctctctctcttgccctcatgtggcgaatgcaattctcctcatgtccatcccttccgaaggcgatgcttccggcgacggggagcctgaggagcctcctgtaggattcagtcagaggtagacaggtcagtgaagaaaaaggatgcgcggagtcacattggcgagtgtgtgtttttggtggctagagctgagtattttcagctgcatgtatccttttttgtgtatgggtaagagcaaccgtgtcaggtttggctacctgagagacctttgaagctagccagctgctgttgctgctgcttctgcttcttcctccccccttttgggagttcagagctggaatgtaggtaggataggcgatgatgttgagtacagcaactgttttacacccttccatgttgaacagtat

SEQ ID NO: 77779 - DNA, 2080 bp, Zea Mays
gcgttactgcgttaccagtgcgcgtccgtggggactggggactatgtgaaaccgcgttggggtagctggataaagacatacttcgtatacggtatccgaagtagtaggagtatccctcttttctgggtgggataaacaacggtgacctggtacaaactcatcgggatgtgtttggaccctacaccagaacaaatcaagatcacagggtggaccagaatctaagaaggacctgattatacatagggatgggaatagtcaaaatattgcagcacatactttcacttttcgtgaacttgctgcagccactaagaatttcaggcaagattgccttttaggggagggaggttttggtcgtgtatataaaggacgcttggagaatggacaggctgttgctgtgaagcaacttgatcgtaatggcctccaaggaaatagggaatttctggttgaggttctcatgctcagtctcttacatcacactaacctggtcaatctaattggctactgtgctgacggtgaccaacgccttcttgtttatgagtttatgccattggggtcactagaagatcatctgcatgatctgccaccagataaagaacctctagactggaacacacggatgaagatagctgcaggtgcagctaagggcttagagtaccttcacgacaagacgagtcctcctgttatttaccgggattttaagtcgtcaaacattcttcttggagaaggatttcatccgaagctatcagactttggccttgcaaaacttggcccggttggtgacaagacccatgtttcaacacgtgtgatgggtacatatggctactgtgccccagaatatgcaatgactgggcagctcacagttaaatccgatgtgtatagctttggagtcgtgttccttgaacttatcacagggcgcaaagcaattgacaacaccaagacccaaggggagcaaaacctagtggcatgggctcgtccactgttcaaggaccgcaggaaattccctaaaatggctgatccaatgcttcagggccgcttccctatgaggggtctatatcaggccttagctgttgctgccatgtgcttgcaagagcaagctgctacacgccctcacatcggggatgttgtcactgctctctcatatctcgcttctcaggcttatgacccaaacgcccctgttcaacacagccggagcaacgcatctacccccaggtccagaaaccctgctgcatggaacggtgatcagcgcagtgtgcgctcgcctaatcatcaccattctccagacccgcggcggagggaccctgccagggcatccaagtatggagcagaggttagcaggactagctctgccagcgattctggccggcggtcaggtctggatgacatggacccgaccgggtcgcaagtgggaagcccagctcaaaccggaagaagaagagaagctccaagggccaccgacagacagcgcgctgtcggagaggccaggatgtggggggagaactcaagggagcgaacgaatggccatggtagcttcgacagcacgcatgagtgaagccgtcaggttccactccaggcatcatttcagacgaacgatgggtttgagcccactcatcggcaccggtcggatctgatcttgggacatggcgtggtgccgcccggtccgggtgtctgtgaataaggctctctctcttgccctcatgtggcgaatgcaattctcctcatgtccatcccttccgaaggcgatgcttccggcgacggggagcctgaggagcctcctgtaggattcagtcagaggtagacaggtcagtgaagaaaaaggatgcgcggagtcacattggcgagtgtgtgtttttggtggctagagctgagtattttcagctgcatgtatccttttttgtgtatgggtaagagcaaccgtgtcaggtttggctacctgagagacctttgaagctagccagctgctgttgctgctgcttctgcttcttcctccccccttttgggagttcagagctggaatgtaggtaggataggcgatgatgttgagtacagcaactgttttacacccttccatgttgaacagtat

SEQ ID NO: 77780 - DNA, 2141 bp, Zea Mays
ctgacttttgctccgcttgcccgctggccttgccccagcctcatattctcctcctccttcctgtagctgtagctttcaccccactcccatagtccctctccctccagggcgccgcgcctccctccctttccctaatcccccgctaccgcggcgcttccccctcccccgctccctccacaattaggccagtagcccgcttgcagctgcggcgtcggtcgggaagaggccttgctccagtcccgcagatcgggggaggcgctcccccccgcccccgcctcgtcagctcggccgcttccccgccgccggtccctcccggaggcgccagcgtcgccgatgagctgcttcgtctgcttcgggtcggcggcgcacgacggggagtccaggaagccccccgccgcgggcgccggcaaagacgtcccgccggatcgcgcggtggtccgcgtcggatcagacaaatcaagatcacagggtggaccagaatctaagaaggacctgattatacatagggatgggaatagtcaaaatattgcagcacatactttcacttttcgtgaacttgctgcagccactaagaatttcaggcaagattgccttttaggggagggaggttttggtcgtgtatataaaggacgcttggagaatggacagataaagaacctctagactggaacacacggatgaagatagctgcaggtgcagctaagggcttagagtaccttcacgacaagacgagtcctcctgttatttaccgggattttaagtcgtcaaacattcttcttggagaaggatttcatccgaagctatcagactttggccttgcaaaacttggcccggttggtgacaagacccatgtttcaacacgtgtgatgggtacatatggctactgtgccccagaatatgcaatgactgggcagctcacagttaaatccgatgtgtatagctttggagtcgtgttccttgaacttatcacagggcgcaaagcaattgacaacaccaagacccaaggggagcaaaacctagtggcatgggctcgtccactgttcaaggaccgcaggaaattccctaaaatggctgatccaatgcttcagggccgcttccctatgaggggtctatatcaggccttagctgttgctgccatgtgcttgcaagagcaagctgctacacgccctcacatcggggatgttgtcactgctctctcatatctcgcttctcaggcttatgacccaaacgcccctgttcaacacagccggagcaacgcatctacccccaggtccagaaaccctgctgcatggaacggtgatcagcgcagtgtgcgctcgcctaatcatcaccattctccagacccgcggcggagggaccctgccagggcatccaagtatggagcagaggttagcaggactagctctgccagcgattctggccggcggtcaggtctggatgacatggacccgaccgggtcgcaagtgggaagcccagctcaaaccggaagaagaagagaagctccaagggccaccgacagacagcgcgctgtcggagaggccaggatgtggggggagaactcaagggagcgaacgaatggccatggtagcttcgacagcacgcatgagtgaagccgtcaggttccactccaggcatcatttcagacgaacgatgggtttgagcccactcatcggcaccggtcggatctgatcttgggacatggcgtggtgccgcccggtccgggtgtctgtgaataaggctctctctcttgccctcatgtggcgaatgcaattctcctcatgtccatcccttccgaaggcgatgcttccggcgacggggagcctgaggagcctcctgtaggattcagtcagaggtagacaggtcagtgaagaaaaaggatgcgcggagtcacattggcgagtgtgtgtttttggtggctagagctgagtattttcagctgcatgtatccttttttgtgtatgggtaagagcaaccgtgtcaggtttggctacctgagagacctttgaagctagccagctgctgttgctgctgcttctgcttcttcctccccccttttgggagttcagagctggaatgtaggtaggataggcgatgatgttgagtacagcaactgttttacacccttccatgttgaacagtat

SEQ ID NO: 77781 - DNA, 3095 bp, Zea Mays
ctgccctgtcaccgaggatccctgcccggtgctgagcagagctgacttttgctccgcttgcccgctggccttgccccagcctcatattctcctcctccttcctgtagctgtagctttcaccccactcccatagtccctctccctccagggcgccgcgcctccctccctttccctaatcccccgctaccgcggcgcttccccctcccccgctccctccacaattaggccagtagcccgcttgcagctgcggcgtcggtcgggaagaggccttgctccagtcccgcagatcgggggaggcgctcccccccgcccccgcctcgtcagctcggccgcttccccgccgccggtccctcccggaggcgccagcgtcgccgatgagctgcttcgtctgcttcgggtcggcggcgcacgacggggagtccaggaagccccccgccgcgggcgccggcaaagacgtcccgccggatcgcgcggtggtccgcgtcggatcagacaaatcaagatcacagggtggaccagaatctaagaaggacctgattatacatagggatgggaatagtcaaaatattgcagcacatactttcacttttcgtgaacttgctgcagccactaagaatttcaggcaagattgccttttaggggagggaggttttggtcgtgtatataaaggacgcttggagaatggacaggtaagcatatctgaaacatgacgcattgacattttgattgtaaagctaaatcctctcaaatttggcttctgagttgaaacattaagtaaaatgttggtgggaaatgctaacataacgattatacttgcgccctggattagccctggatactaacagagttttacttcccaggctgttgctgtgaagcaacttgatcgtaatggcctccaaggaaatagggaatttctggttgaggttctcatgctcagtctcttacatcacactaacctggtcaatctaattggctactgtgctgacggtgaccaacgccttcttgtttatgagtttatgccattggggtcactagaagatcatctgcatggtttgtgtatctcctctttgtcatctagtctccggaatattccatgagtgcctgtagctgtaatgaagcattgtgttattctataggagtggcgtgcttcatctgactgttaaatctattttgtatatagcatgactgtaactgcgcgcttaggttgatagatcgtaattgttggttcagcttaaaatgatcggcatgcatgttgtactactgttggatctatcgtataggtagggtgctatttttttgtattgtgtgcctggccatgtaaatttgcatgcactatctatattaaaaaaaacctcgaccagagggagagatgcccctatgattttgtttttaagaagtttgtgccacccttcaaacctgaactggtgatggggggtttcatcaacccccagacttcaacggctaactagtgtaactcgggagaagttggcttttcataggctaaaatgaatatgttgatgttttctctctcttccatttctttgcattcagttcacgggtcttgtaactgaaaagtatttatttgtgtagatctgccaccagataaagaacctctagactggaacacacggatgaagatagctgcaggtgcagctaagggcttagagtaccttcacgacaagacgagtcctcctgttatttaccgggattttaagtcgtcaaacattcttcttggagaaggatttcatccgaagctatcagactttggccttgcaaaacttggcccggttggtgacaagacccatgtttcaacacgtgtgatgggtacatatggctactgtgccccagaatatgcaatgactgggcagctcacagttaaatccgatgtgtatagctttggagtcgtgttccttgaacttatcacagggcgcaaagcaattgacaacaccaagacccaaggggagcaaaacctagtggcatgggctcgtccactgttcaaggaccgcaggaaattccctaaaatggctgatccaatgcttcagggccgcttccctatgaggggtctatatcaggccttagctgttgctgccatgtgcttgcaagagcaagctgctacacgccctcacatcggggatgttgtcactgctctctcatatctcgcttctcaggcttatgacccaaacgcccctgttcaacacagccggagcaacgcatctacccccaggtccagaaaccctgctgcatggaacggtgatcagcgcagtgtgcgctcgcctaatcatcaccattctccagacccgcggcggagggaccctgccagggcatccaagtatggagcagaggttagcaggactagctctgccagcgattctggccggcggtcaggtctggatgacatggacccgaccgggtcgcaagtgggaagcccagctcaaaccggaagaagaagagaagctccaagggccaccgacagacagcgcgctgtcggagaggccaggatgtggggggagaactcaagggagcgaacgaatggccatggtagcttcgacagcacgcatgagtgaagccgtcaggttccactccaggcatcatttcagacgaacgatgggtttgagcccactcatcggcaccggtcggatctgatcttgggacatggcgtggtgccgcccggtccgggtgtctgtgaataaggctctctctcttgccctcatgtggcgaatgcaattctcctcatgtccatcccttccgaaggcgatgcttccggcgacggggagcctgaggagcctcctgtaggattcagtcagaggtagacaggtcagtgaagaaaaaggatgcgcggagtcacattggcgagtgtgtgtttttggtggctagagctgagtattttcagctgcatgtatccttttttgtgtatgggtaagagcaaccgtgtcaggtttggctacctgagagacctttgaagctagccagctgctgttgctgctgcttctgcttcttcctccccccttttgggagttcagagctggaatgtaggtaggataggcgatgatgttgagtacagcaactgttttacacccttccatgttgaacagtat

SEQ ID NO: 77782 - DNA, 2805 bp, Zea Mays
ccaccacacacagccccctgtgccctcctgccgtccgtgacgtgacgcagccgagccgcgcgcgcgctccgggccggacgcctccgctcgaatcgatggacgccgaggccggcgtcgccggcgccgaccagcttccgcggaggcagtactacctgaatctactgcttttagcttaccagagctttggtgttgtttacggggacctgagcacatcgcctctctacgtgtataaaagtacgttctctggaaagctcagacactaccaagacgaggagacagtgttcggcgtactttcgctcatcttttggaccttcactctgattcctttgcttaagtatgtcatcatcgtcttgagtgctgatgataacggcgaaggtggaccattcgctctctattcgctcctttgcaggcatgcaaaactcagcttgctgccaaatcaacaagcagctgatgaggagctatcttcatactatagaaatgggttcgcgcctcgcaatggatcttcaccttggtcaagaaggtttctggagaagcacaaaaaaatgaggactctgtttcttctcatagttctctgtggcgctagcatggtgattggtgatggtgtccttaccccagcaatctcagtactctcgtctatgtctggattacacgttcgagctactggtctacatcatagttctgtagttctcctttcatgcattgtgttggttggtctatttgcattgcaacaccgaggtactcagaaggttgcattcatgtttgcaccaattgtcatcatctggctgctttccattggaggaattggtttatacaacattcttcattggaacccaaatgtatatcaagctctctctccatattatatggttaagttctttagaaagacaggtaaagatggatggattgctttaggagggatccttctttctatgacaggcagtgaggcaatgtttgctgaccttggtcactttacgagtgcatctgtcagggtggcttttattaccgtcatatacccatgccttatgctacaatatatgggtcatgctgcatttctgtcgaagaacacatttcacatgccgacaggtttttatgatactatcccagaaccagtgttttggcctgtctttgtggtggccacacttgctgctgttgttggtagccaagctgttatttcagcaacattctccattgtgaaacaatgccatgctttgggatgtttcccgcgagtgaaggttgtccacacatcgaggtggatctatgggcagatatatattccagaaataaattggattcttatggttctttgcgtcgctgtcactattgcatttcgtgatactactcttattggcaatgcctacggtattgcatgcatgactgttatgcttgttactacattcttgatggcattaatagtcatctttgtttggcaaaggaacataatattttccctagttttcctggttttctttggatccattgaagctgtatatctttcgtcatctctcatgaaggttcctcagggaggatgggtgcctcttgtgcttgcattcatattcatgtcagtcatgtacatctggcactatgggtcaaggaggaagtaccagtttgacctacagaacaaagtatcaatgagatccatcctatctctcggtccaagccttggcatagttcgggttcctggtgttggattgatttacacagagctggtcactggtgtaccctccatcttctcccattttgtcacgaatctccctgccttccatgaagttctagtctttctctgtgtgaagtcagtgccagtgccatatgtttcaccagatgagcgataccttgtgggtaggattggacctaaagaatatcggatgtaccgttgcattgttagatatggttacaaagatgtgcagagagatgatgacaattttgagaacatgttagttatgagcatcgcaaagtttattatgatggaagcagaagatgcttcttcagcaagttatgatatcgctaacgaaggaaggatggcggtcataacaaccactgatgcctctggcagcccattggccatgagggatttcgacggcctagctgactccatgtctacgaggagcagtaaatcagaaagccttcgaagtttgcaatcctcctacgagcaagaatccccgagtgtaaaccggcgccgccgtgtccgctttgaggtcccagaggaggatggcatgggtcagcaagtgaaagaagaactcacggcactagttgaagcgaaacatgctgggatcgcatacatcatgggggcattcttatatcaaagccaggaggaactcaaatttcctgaagaagtttgctattgatgttggttactctttcctccggaagaactgcagaggcccatcagtcacgctgcacattccacacattagtctgatagaagtcggcatgatctactatgtttagcttaaggcccattgccgaagctcacatgtggatacccggtcggggcaatgcttgtgctgtctgcggattgtggtgtggaaggagttcaggcttgttcgttctgggccaagtttcagcttgtagagaagaaggcagacttctttgttaatattatttttagcctaaataaaccagcacaatgttagacggcaatgatattcactaaactttctgtagaaaatcatctggcctgttcgacgattattgcaaaaaatatggacatcaatatttgctttgcttcatcgtatcatttccaaagcaacgagcaggctgtggacgaacgcagaaattctctgggcccttaagatcgagacaaataat

SEQ ID NO: 77783 - DNA, 2904 bp, Zea Mays
ccaccacacacagccccctgtgccctcctgccgtccgtgacgtgacgcagccgagccgcgcgcgcgctccgggccggacgcctccgctcgaatcgatggacgccgaggccggcgtcgccggcgccgaccagcttccgcggaggcagtactacctgaatctactgcttttagcttaccagagctttggtgttgtttacggggacctgagcacatcgcctctctacgtgtataaaagtacgttctctggaaagctcagacactaccaagacgaggagacagtgttcggcgtactttcgctcatcttttggaccttcactctgattcctttgcttaagtatgtcatcatcgtcttgagtgctgatgataacggcgaaggtggaccattcgctctctattcgctcctttgcaggcatgcaaaactcagcttgctgccaaatcaacaagcagctgatgaggagctatcttcatactatagaaatgggttcgcgcctcgcaatggatcttcaccttggtcaagaaggtttctggagaagcacaaaaaaatgaggactctgtttcttctcatagttctctgtggcgctagcatggtgattggtgatggtgtccttaccccagcaatctcagtactctcgtctatgtctggattacacgttcgagctactggtctacatcatagttctgtagttctcctttcatgcattgtgttggttggtctatttgcattgcaacaccgaggtactcagaaggttgcattcatgtttgcaccaattgtcatcatctggctgctttccattggaggaattggtttatacaacattcttcattggaacccaaatgtatatcaagctctctctccatattatatggttaagttctttagaaagacaggcagtgaggcaatgtttgctgaccttggtcactttacgagtgcatctgtcagggtggcttttattaccgtcatatacccatgccttatgctacaatatatgggtcatgctgcatttctgtcgaagaacacatttcacatgccgacaggtttttatgatactatcccagaaccagtgttttggcctgtctttgtggtggccacacttgctgctgttgttggtagccaagctgttatttcagcaacattctccattgtgaaacaatgccatgctttgggatgtttcccgcgagtgaaggttgtccacacatcgaggtggatctatgggcagatatatattccagaaataaattggattcttatggttctttgcgtcgctgtcactattgcatttcgtgatactactcttattggcaatgcctacggttcctcagggaggatgggtgcctcttgtgcttgcattcatattcatgtcagtcatgtacatctggcactatgggtcaaggaggaagtaccagtttgacctacagaacaaagtatcaatgagatccatcctatctctcggtccaagccttggcatagttcgggttcctggtgttggattgatttacacagagctggtcactggtgtaccctccatcttctcccattttgtcacgaatctccctgccttccatgaagttctagtctttctctgtgtgaagtcagtgccagtgccatatgtttcaccagatgagcgataccttgtgggtaggattggacctaaagaatatcggatgtaccgttgcattgttagatatggttacaaagatgtgcagagagatgatgacaattttgagaacatgttagttatgagcatcgcaaagtttattatgatggaagcagaagatgcttcttcagcaagttatgatatcgctaacgaaggaaggatggcggtcataacaaccactgatgcctctggcagcccattggccatgagggatttcgacggcctagctgactccatgtctacgaggagcagtaaatcagaaagccttcgaagtttgcaatcctcctacgagcaagaatccccgagtgtaaaccggcgccgccgtgtccgctttgaggtcccagaggaggatggcatgggtcagcaagtgaaagaagaactcacggcactagttgaagcgaaacatgctgggatcgcatacatcatgggggcattcttatatcaaagccaggaggaactcaaatttcctgaagaagtttgctattgatgttggttactctttcctccggaagaactgcagaggcccatcagtcacgctgcacattccacacattagtctgatagaagtcggcatgatctactatgtttagcttaaggcccattgccgaagctcacatgtggatacccggtcggggcaatgcttgtgctgtctgcggattgtggtgtggaaggagttcaggcttgttcgttctgggccaagtttcagcttgtagagaagaaggcagacttctttgttaatattatttttagcctaaataaaccagcacaatgttagacgctcgcacgcatgaattggggacgatgtggaggacaagcctacaagtaagggaggtgaaagagtggcgttgcagccttgcaggtcttctgcacctaccccatcctagcttgtgtctgctccaccgtcgtcttctaccgtggacacaaggtacgggagctgctgctcgacgagctgctcgtcgcggtacgcacggctatggccaccaaaatcggctcgtagtctttccatgagacaatgtacttgatagcggacgcacagtagcaccccatgtttacggtgagcgctggcggttcgctactttaccgagttctttagaggaccttgctttgctggagaccgaaaacaaggctgcacacgctaaatttagcatacatgagcatttacagtcctgtgttggggacagtcttaatttactccatccttcattgtaaacatgtgtacagttgaaatttgagaaggctttaacgggct

SEQ ID NO: 77784 - DNA, 2671 bp, Zea Mays
ccgcgcgcgcgctccgggccggacgcctccgctcgaatcgatggacgccgaggccggcgtcgccggcgccgaccagcttccgcggaggcagtactacctgaatctactgcttttagcttaccagagctttggtgttgtttacggggacctgagcacatcgcctctctacgtgtataaaagtacgttctctggaaagctcagacactaccaagacgaggagacagtgttcggcgtactttcgctcatcttttggaccttcactctgattcctttgcttaagtatgtcatcatcgtcttgagtgctgatgataacggcgaaggcatgcaaaactcagcttgctgccaaatcaacaagcagctgatgaggagctatcttcatactatagaaatgggttcgcgcctcgcaatggatcttcaccttggtcaagaaggtttctggagaagcacaaaaaaatgaggactctgtttcttctcatagttctctgtggcgctagcatggtgattggtgatggtgtccttaccccagcaatctcagtactctcgtctatgtctggattacacgttcgagctactggtctacatcatagttctgtagttctcctttcatgcattgtgttggttggtctatttgcattgcaacaccgaggtactcagaaggttgcattcatgtttgcaccaattgtcatcatctggctgctttccattggaggaattggtttatacaacattcttcattggaacccaaatgtatatcaagctctctctccatattatatggttaagttctttagaaagacaggcagtgaggcaatgtttgctgaccttggtcactttacgagtgcatctgtcagggtggcttttattaccgtcatatacccatgccttatgctacaatatatgggtcatgctgcatttctgtcgaagaacacatttcacatgccgacaggtttttatgatactatcccagaaccagtgttttggcctgtctttgtggtggccacacttgctgctgttgttggtagccaagctgttatttcagcaacattctccattgtgaaacaatgccatgctttgggatgtttcccgcgagtgaaggttgtccacacatcgaggtggatctatgggcagatatatattccagaaataaattggattcttatggttctttgcgtcgctgtcactattgcatttcgtgatactactcttattggcaatgcctacggtattgcatgcatgactgttatgcttgttactacattcttgatggcattaatagtcatctttgtttggcaaaggaacataatattttccctagttttcctggttttctttggatccattgaagctgtatatctttcgtcatctctcatgaaggttcctcagggaggatgggtgcctcttgtgcttgcattcatattcatgtcagtcatgtacatctggcactatgggtcaaggaggaagtaccagtttgacctacagaacaaagtatcaatgagatccatcctatctctcggtccaagccttggcatagttcgggttcctggtgttggattgatttacacagagctggtcactggtgtaccctccatcttctcccattttgtcacgaatctccctgccttccatgaagttctagtctttctctgtgtgaagtcagtgccagtgccatatgtttcaccagatgagcgataccttgtgggtaggattggacctaaagaatatcggatgtaccgttgcattgttagatatggttacaaagatgtgcagagagatgatgacaattttgagaacatgttagttatgagcatcgcaaagtttattatgatggaagcagaagatgcttcttcagcaagttatgatatcgctaacgaaggaaggatggcggtcataacaaccactgatgcctctggcagcccattggccatgagggatttcgacggcctagctgactccatgtctacgaggagcagtaaatcagaaagccttcgaagtttgcaatcctcctacgagcaagaatccccgagtgtaaaccggcgccgccgtgtccgctttgaggtcccagaggaggatggcatgggtcagcaagtgaaagaagaactcacggcactagttgaagcgaaacatgctgggatcgcatacatcatgggggcattcttatatcaaagccaggaggaactcaaatttcctgaagaagtttgctattgatgttggttactctttcctccggaagaactgcagaggcccatcagtcacgctgcacattccacacattagtctgatagaagtcggcatgatctactatgtttagcttaaggcccattgccgaagctcacatgtggatacccggtcggggcaatgcttgtgctgtctgcggattgtggtgtggaaggagttcaggcttgttcgttctgggccaagtttcagcttgtagagaagaaggcagacttctttgttaatattatttttagcctaaataaaccagcacaatgttagacggtgatgtttctcatttggcatatttgcatgcatgctctgtaattttttctgcgagctatgtgatggaaatatatgcatcatctttataaactggtcagggttctactccttccgtttcaaaataatagttgttttacctcttgatttttatgtctatattcaaacgaatgagaat

SEQ ID NO: 77785 - DNA, 2605 bp, Zea Mays
cgagccgcgcgcgcgctccgggccggacgcctccgctcgaatcgatggacgccgaggccggcgtcgccggcgccgaccagcttccgcggaggcagtactacctgaatctactgcttttagcttaccagagctttggtgttgtttacggggacctgagcacatcgcctctctacgtgtataaaagtacgttctctggaaagctcagacactaccaagacgaggagacagtgttcggcgtactttcgctcatcttttggaccttcactctgattcctttgcttaagtatgtcatcatcgtcttgagtgctgatgataacggcgaaggtggaccattcgctctctattcgctcctttgcaggcatgcaaaactcagcttgctgccaaatcaacaagcagctgatgaggagctatcttcatactatagaaatgggttcgcgcctcgcaatggatcttcaccttggtcaagaaggtttctggagaagcacaaaaaaatgaggactctgtttcttctcatagttctctgtggcgctagcatggtgattggtgatggtgtccttaccccagcaatctcagtactctcgtctatgtctggattacacgttcgagctactggtctacatcatagttctgtagttctcctttcatgcattgtgttggttggtctatttgcattgcaacaccgaggtactcagaaggttgcattcatgtttgcaccaattgtcatcatctggctgctttccattggaggaattggtttatacaacattcttcattggaacccaaatgtatatcaagctctctctccatattatatggttaagttctttagaaagacaggtaaagatggatggattgctttaggagggatccttctttctatgacaggcagtgaggcaatgtttgctgaccttggtcactttacgagtgcatctgtcagggtggcttttattaccgtcatatacccatgccttatgctacaatatatgggtcatgctgcatttctgtcgaagaacacatttcacatgccgacaggtttttatgatactatcccagaaccagtgttttggcctgtctttgtggtggccacacttgctgctgttgttggtagccaagctgttatttcagcaacattctccattgtgaaacaatgccatgctttgggatgtttcccgcgagtgaaggttgtccacacatcgaggtggatctatgggcagatatatattccagaaataaattggattcttatggttctttgcgtcgctgtcactattgcatttcgtgatactactcttattggcaatgcctacggttcctcagggaggatgggtgcctcttgtgcttgcattcatattcatgtcagtcatgtacatctggcactatgggtcaaggaggaagtaccagtttgacctacagaacaaagtatcaatgagatccatcctatctctcggtccaagccttggcatagttcgggttcctggtgttggattgatttacacagagctggtcactggtgtaccctccatcttctcccattttgtcacgaatctccctgccttccatgaagttctagtctttctctgtgtgaagtcagtgccagtgccatatgtttcaccagatgagcgataccttgtgggtaggattggacctaaagaatatcggatgtaccgttgcattgttagatatggttacaaagatgtgcagagagatgatgacaattttgagaacatgttagttatgagcatcgcaaagtttattatgatggaagcagaagatgcttcttcagcaagttatgatatcgctaacgaaggaaggatggcggtcataacaaccactgatgcctctggcagcccattggccatgagggatttcgacggcctagctgactccatgtctacgaggagcagtaaatcagaaagccttcgaagtttgcaatcctcctacgagcaagaatccccgagtgtaaaccggcgccgccgtgtccgctttgaggtcccagaggaggatggcatgggtcagcaagtgaaagaagaactcacggcactagttgaagcgaaacatgctgggatcgcatacatcatgggggcattcttatatcaaagccaggaggaactcaaatttcctgaagaagtttgctattgatgttggttactctttcctccggaagaactgcagaggcccatcagtcacgctgcacattccacacattagtctgatagaagtcggcatgatctactatgtttagcttaaggcccattgccgaagctcacatgtggatacccggtcggggcaatgcttgtgctgtctgcggattgtggtgtggaaggagttcaggcttgttcgttctgggccaagtttcagcttgtagagaagaaggcagacttctttgttaatattatttttagcctaaataaaccagcacaatgttagacggtgatgtttctcatttggcatatttgcatgcatgctctgtaattttttctgcgagctatgtgatggaaatatatgcatcatctttataaactggtcagggttctactccttccgtttcaaaataatagttgttttacctcttgatttttatgtctatattcaaacgaatgagaat

SEQ ID NO: 77786 - DNA, 2552 bp, Zea Mays
cagccgagccgcgcgcgcgctccgggccggacgcctccgctcgaatcgatggacgccgaggccggcgtcgccggcgccgaccagcttccgcggaggcagtactacctgaatctactgcttttagcttaccagagctttggtgttgtttacggggacctgagcacatcgcctctctacgtgtataaaagtacgttctctggaaagctcagacactaccaagacgaggagacagtgttcggcgtactttcgctcatcttttggaccttcactctgattcctttgcttaagtatgtcatcatcgtcttgagtgctgatgataacggcgaaggtggaccattcgctctctattcgctcctttgcaggcatgcaaaactcagcttgctgccaaatcaacaagcagctgatgaggagctatcttcatactatagaaatgggttcgcgcctcgcaatggatcttcaccttggtcaagaaggtttctggagaagcacaaaaaaatgaggactctgtttcttctcatagttctctgtggcgctagcatggtgattggtgatggtgtccttaccccagcaatctcagtactctcgtctatgtctggattacacgttcgagctactggtctacatcatagttctgtagttctcctttcatgcattgtgttggttggtctatttgcattgcaacaccgaggtactcagaaggttgcattcatgtttgcaccaattgtcatcatctggctgctttccattggaggaattggtttatacaacattcttcattggaacccaaatgtatatcaagctctctctccatattatatggttaagttctttagaaagacaggcagtgaggcaatgtttgctgaccttggtcactttacgagtgcatctgtcagggtggcttttattaccgtcatatacccatgccttatgctacaatatatgggtcatgctgcatttctgtcgaagaacacatttcacatgccgacaggtttttatgatactatcccagaaccagtgttttggcctgtctttgtggtggccacacttgctgctgttgttggtagccaagctgttatttcagcaacattctccattgtgaaacaatgccatgctttgggatgtttcccgcgagtgaaggttgtccacacatcgaggtggatctatgggcagatatatattccagaaataaattggattcttatggttctttgcgtcgctgtcactattgcatttcgtgatactactcttattggcaatgcctacgggaggatgggtgcctcttgtgcttgcattcatattcatgtcagtcatgtacatctggcactatgggtcaaggaggaagtaccagtttgacctacagaacaaagtatcaatgagatccatcctatctctcggtccaagccttggcatagttcgggttcctggtgttggattgatttacacagagctggtcactggtgtaccctccatcttctcccattttgtcacgaatctccctgccttccatgaagttctagtctttctctgtgtgaagtcagtgccagtgccatatgtttcaccagatgagcgataccttgtgggtaggattggacctaaagaatatcggatgtaccgttgcattgttagatatggttacaaagatgtgcagagagatgatgacaattttgagaacatgttagttatgagcatcgcaaagtttattatgatggaagcagaagatgcttcttcagcaagttatgatatcgctaacgaaggaaggatggcggtcataacaaccactgatgcctctggcagcccattggccatgagggatttcgacggcctagctgactccatgtctacgaggagcagtaaatcagaaagccttcgaagtttgcaatcctcctacgagcaagaatccccgagtgtaaaccggcgccgccgtgtccgctttgaggtcccagaggaggatggcatgggtcagcaagtgaaagaagaactcacggcactagttgaagcgaaacatgctgggatcgcatacatcatgggggcattcttatatcaaagccaggaggaactcaaatttcctgaagaagtttgctattgatgttggttactctttcctccggaagaactgcagaggcccatcagtcacgctgcacattccacacattagtctgatagaagtcggcatgatctactatgtttagcttaaggcccattgccgaagctcacatgtggatacccggtcggggcaatgcttgtgctgtctgcggattgtggtgtggaaggagttcaggcttgttcgttctgggccaagtttcagcttgtagagaagaaggcagacttctttgttaatattatttttagcctaaataaaccagcacaatgttagacggtgatgtttctcatttggcatatttgcatgcatgctctgtaattttttctgcgagctatgtgatggaaatatatgcatcatctttataaactggtcagggttctactccttccgtttcaaaataatagttgttttacctcttgatttttatgtctatattcaaacgaatgagaat

SEQ ID NO: 77787 - DNA, 2760 bp, Zea Mays
ccaccacacacagccccctgtgccctcctgccgtccgtgacgtgacgcagccgagccgcgcgcgcgctccgggccggacgcctccgctcgaatcgatggacgccgaggccggcgtcgccggcgccgaccagcttccgcggaggcagtactacctgaatctactgcttttagcttaccagagctttggtgttgtttacggggacctgagcacatcgcctctctacgtgtataaaagtacgttctctggaaagctcagacactaccaagacgaggagacagtgttcggcgtactttcgctcatcttttggaccttcactctgattcctttgcttaagtatgtcatcatcgtcttgagtgctgatgataacggcgaaggtggaccattcgctctctattcgctcctttgcaggcatgcaaaactcagcttgctgccaaatcaacaagcagctgatgaggagctatcttcatactatagaaatgggttcgcgcctcgcaatggatcttcaccttggtcaagaaggtttctggagaagcacaaaaaaatgaggactctgtttcttctcatagttctctgtggcgctagcatggtgattggtgatggtgtccttaccccagcaatctcagtactctcgtctatgtctggattacacgttcgagctactggtctacatcatagttctgtagttctcctttcatgcattgtgttggttggtctatttgcattgcaacaccgaggtactcagaaggttgcattcatgtttgcaccaattgtcatcatctggctgctttccattggaggaattggtttatacaacattcttcattggaacccaaatgtatatcaagctctctctccatattatatggttaagttctttagaaagacaggcagtgaggcaatgtttgctgaccttggtcactttacgagtgcatctgtcagggtggcttttattaccgtcatatacccatgccttatgctacaatatatgggtcatgctgcatttctgtcgaagaacacatttcacatgccgacaggtttttatgatactatcccagaaccagtgttttggcctgtctttgtggtggccacacttgctgctgttgttggtagccaagctgttatttcagcaacattctccattgtgaaacaatgccatgctttgggatgtttcccgcgagtgaaggttgtccacacatcgaggtggatctatgggcagatatatattccagaaataaattggattcttatggttctttgcgtcgctgtcactattgcatttcgtgatactactcttattggcaatgcctacggtattgcatgcatgactgttatgcttgttactacattcttgatggcattaatagtcatctttgtttggcaaaggaacataatattttccctagttttcctggttttctttggatccattgaagctgtatatctttcgtcatctctcatgaaggttcctcagggaggatgggtgcctcttgtgcttgcattcatattcatgtcagtcatgtacatctggcactatgggtcaaggaggaagtaccagtttgacctacagaacaaagtatcaatgagatccatcctatctctcggtccaagccttggcatagttcgggttcctggtgttggattgatttacacagagctggtcactggtgtaccctccatcttctcccattttgtcacgaatctccctgccttccatgaagttctagtctttctctgtgtgaagtcagtgccagtgccatatgtttcaccagatgagcgataccttgtgggtaggattggacctaaagaatatcggatgtaccgttgcattgttagatatggttacaaagatgtgcagagagatgatgacaattttgagaacatgttagttatgagcatcgcaaagtttattatgatggaagcagaagatgcttcttcagcaagttatgatatcgctaacgaaggaaggatggcggtcataacaaccactgatgcctctggcagcccattggccatgagggatttcgacggcctagctgactccatgtctacgaggagcagtaaatcagaaagccttcgaagtttgcaatcctcctacgagcaagaatccccgagtgtaaaccggcgccgccgtgtccgctttgaggtcccagaggaggatggcatgggtcagcaagtgaaagaagaactcacggcactagttgaagcgaaacatgctgggatcgcatacatcatgggggcattcttatatcaaagccaggaggaactcaaatttcctgaagaagtttgctattgatgttggttactctttcctccggaagaactgcagaggcccatcagtcacgctgcacattccacacattagtctgatagaagtcggcatgatctactatgtttagcttaaggcccattgccgaagctcacatgtggatacccggtcggggcaatgcttgtgctgtctgcggattgtggtgtggaaggagttcaggcttgttcgttctgggccaagtttcagcttgtagagaagaaggcagacttctttgttaatattatttttagcctaaataaaccagcacaatgttagacggtgatgtttctcatttggcatatttgcatgcatgctctgtaattttttctgcgagctatgtgatggaaatatatgcatcatctttataaactggtcagggttctactccttccgtttcaaaataatagttgttttacctcttgatttttatgtctatattcaaacgaatgagaat

SEQ ID NO: 77788 - DNA, 2693 bp, Zea Mays
cagatgttaaattctaatcatcttcgctatcgcgattttaatatcacatctgtttcgtttgtcgcgagtgcgatatcgtttttatttttatctatccgggctcttcctaaatttttgagatgctcggaacattgttgctccgaaaatcggtgcgttcggtgaatatttaaaatgcatcgctcgcgtgaatacgaattcggaagcccgacccattcggatgattttatcccgaacagatgaagaactcgacgactaagctgaacagatgaagaactcgacgactaagctttcagtgtaaaataatttaattccctttttgccatccgtgacatcgcgtctacggatttttaattaaattgttctcttatcgagtattaaatagcaaacggaatttgtctaaaatcaactgaatcaaatacagattgaaatatcgaagccgaaatccgtttaattcagtccatcgctttttgtctcgatctaaatcttcaaagtgaattaacagtacgaatttatccgagtttagagaattcgccaaatcaaatcatgtccaaatactgttatcgatctcatttgattcgactcattttatatcgctacaaatcgtgacccaaaacatcagtggttctctttatataaaaaaagaaagaaatatatggagattatatgggagaagaaagatttttttttctttctttggtgaacgtgcaactcatccaaggaaattttcacgtcatctttctagcttatcctctcctctctccaggaaataaaatctcgtacatgtgtggctggtgaacgtcagcttctggaaaaaaaatctccaccgctctatctcattttttccccagcgcttgtttccccagctcgactcgacggcctcgcgtccaaccgctcaaccatctgtatcttattttctacacgcgtgctcagctcctagcaaattctgggcgttcttctctctgtacgcggctgccagcacacaccgccgagtccgcgtggctgctcggccagtactgctcacgccagcacaacagtgatcagccaacacttatcctcaactccagctcgcccagcccctctctgtttgtggcgtgctccagtttcccatggcgtcggtcctcaacctctaggcaccagtcgcccctactccctgctcctgttcctcccatggtgtcccagtcgagtttgccctagccctctccctcttggttctctgctggtcacgctcctctccatgggcgcccaggtctcttccccgtggtggcagaccccatgcaaagctcgccccatgtccgaactttgaaggcagtcgtctctactcctctccccatggcgacttcgccttcactgcttctatttcttccccagcagcaccccttcttgtctctatgcgagcagcagcacgccggagcagtccaatgtccacgacgcacgccatgtgttcgacgggaggattgaccagagttcatcctcgttcttcatccgtgacaccgcaagtttttgcacgaccatgaggttatgttcttacttgggtgttttgtttctcggcgtagattaagtagaggctaaccatgtgtatgtttgtgtatgcttgtgaggagagaaacccctaggttccgacggtgaagaaccgaagcccgtgtgacgattagtaagtgttcggtagaaggaccgaacccaaaaccttcgttgtgttcgcggacgtcgcttcgagtttagtcatggtaagtcgatctgttgtatccgttaatcgaataaatggttgatttgtatggagtcaatatttgtgctaaatgaaatgtgcatagtgtcaagaaaacggttctccgttgtgacatgatttttagatttggattgcaaattatgtgaaatgaatggattcacgattttgaagtagtcgagtcatgcgttaaggtttagttcttatgtgcaaattatgcaatgtgtcatggtagaaatatatgcaaggtgtggttaagttaaataggaactaagctggaatttttgctgttttgggctgcaagtatagttttagttatgaagcaaatttagtgaagcaaatcatgttttctgtgaaagtgttatatataaagattgtagtaaacttctttatctagcttgtgttaaaatttcaagaccataggcccaataatctgaaagttatgcttctcctaagttcagtttcagaatctgtccagattctgtacagatttcgaaaatgaccttgtttgtccaagtaaaacttcgaatcagttcttataaattataaagaagttgtagtacttttcttaagctttccaacaagttttggatcaccctttttggtgatctataagttgagttacagttgtttgaattgtgatgataataccaaaattttagaggactttataagctttccaaaaagtcttagtttactttttttggatgaatattgtgtaagttatgaataaaacaactagctgctgttttgctgtccaaaatcagcaagcattaaagtggatttcttgaagttgctcttgtttggctaggtcatttttttacccttgattgatgacaacttgttgcatatgaagtgtttatcgaaatgccttgttatatttgattaattcatttccttcttattgtttgactaagtaaatttagttagttcttgattggtgaagtcttgtacttgctaaattcaagtgaac

SEQ ID NO: 77789 - DNA, 1446 bp, Zea Mays
tgggagaagaaagatttttttctttctttggtgaacgtgcaactcatccaaggaaattttcacgtcatctttctagcttatcctctcctctcttcaggaaataaaatctcgtacatgtgtggctggtgaacgtcagcttctggaaaaaaaatctccaccgctctatctcattttttccccagcgcttgtttccccagctcgactcgacggcctcgcgtccaaccgctcaaccatctgtatcttattttctacacgcgtgctcagctcctagcaaattctgggcgttcttctctctgtacgcggctgccagcacacaccgccgagtccgcgtggctgctcggccagtactgctcacgccagcacaacagtgatcagccaacacttatcctcaactccagctcgcccagcccctctctgtttgtggcgtgctccagtttcccatggcgtcggtcctcaacctctaggcaccagtcgcccctactccctgctcctgttcctcccatggtgtcccagtcaagtttgccctagccctctccctcttggttctttgctggtcacgctcctctccatgggcgcccaggtctcttccccgtggtggcagaccccatgcaaagctcgccccatgtccgaacttcgaaggcagtcgtctctactcctctccccatggcgacttcgccttcactgcttctatttcttccccagcagcaccccttcttgtctctatgcgagcagcagcacgccggagcagtccaatgtccacgacgcacgccatgtgttcgacgggaggattgaccagagttcatcctcgttcttcatccgtgacaccgcaagtttttgcacgaccatgaggttatgttcttacttgggtgttttgtttctcggcgtagattaagtagaggctaaccatgtgtatgtttgtgtatgcttgtgaggagagaaacccctaggtttcgacggtgaagaaccgaagcccgtgtgacgattagtaagtgttcggtagaaggaccgaacccaaaaccttcgttgtgttcgcggacgtcgcttcgagtttagtcatggtacgttaattgatcacgtgctatggaagacgagtggaattgatctccaagtgatgctgatggacgaagctaaagtggatgaatcaaacaagcaccaggatgagagatgctcaccaagtggtcatcatctaaccacactaacctagtgttatcccaggcaagccccggtgcatttgccaccctcttgttgttataaaacttttatcacttatatgttgcattaggtgataggagttgtgtgaataaacaattgatgcattaccattccttggaatttgattactattccttgattcctgtttataaaagagaactaaagatgcttagtcctgcttagataattaaaaagttgttctttttaataaagatgatgtgttacacggggata

SEQ ID NO: 77790 - DNA, 1533 bp, Zea Mays
tcggcccccgacccccgtccgcacgagaaaacaaatcgcctcttttccaggagccaaaccaccacaccttatatctgtcatactttctcgccccccgtgagccgtgaccccgtctcgcctcgccgccgccgccgccgccgatgggctccggggaggagccgtcgcagatgcggagggcgctggtggactctctcgcgggcgccatctccggcggcatctcccgcaccgtcacctcccccctcgacgtcatcaaaatccgcttccaggttcagttagaacccacaacctcgtggggtattcttcgaagggatgtgtatggaccttccaaatacactgggcttctgcaagcaaccaaagatattctcagagaggaaggtttaccgggattttggagaggaaatgtaccggctctgtttatgtatatgccatatacagctatacaattcactgttctacacaaactaaaaacatttgcttctggttcatctagaacagaggatcatttggatttgagcccttacttatcttatgtaagtggagctatagcagggtgcacagcaactatagggtcatatccatttgaccttctgaggactattcttgcatctcagggtgaaccaaaggtttaccccaatatgaggtctgcgtttattgatataattaaaactcgtggtgttcaagggctttattctggtctatctccaactcttgttgaaatcataccatatgccggtttgcagtttggttcatacgacactttcaaacgttcgatgatgacatggaacagatataaatattcacatcttagctttggaagcgaggatgattcagtatcaagtttccagctatttctttgtgggtttgcagctgggacattttcaaaggctgcatgccacccacttgatgttgtaaagaaaaggttccaggatagggtgcaaggctggagttgagtaagttcttgttggatcatggagctgtcaggataacatgacgaaaactttttgcacaccctggataatggaggggaatggagaccataaggtcactcgtgaagtgcatacaatccctagagatctgattgcatacatgtaaagccttacatagaaaatagctgttttatcgtttcttattcttttgcccaattgcctaatctggtggtcggggtattcgttggcgtctcaaacaaggctgagtaaaactaacatagtgatcgtaacacagcatacatgacggaagtcaaaagcagccggcagttttgttgggatcgtgttacgaatattttttttccggctgaattcatgttatatatctactactacagctagtacgagtaacaatgtatgccactcagatggcgtatgtttaatggcagtcataatttttccatcatttgttgccggacctggatggcagttagattgtatgctgtagtctttctgaaatgctgtgctagcaaaaacctagctgatagtttgctgaatctgggggacagcatgttcttatccagtaggtacttgagctatgggttatcac

SEQ ID NO: 77791 - DNA, 1724 bp, Zea Mays
tcggcccccgacccccgtccgcacgagaaaacaaatcgcctcttttccaggagccaaaccaccacaccttatatctgtcatactttctcgccccccgtgagccgtgaccccgtctcgcctcgccgccgccgccgccgccgatgggctccggggaggagccgtcgcagatgcggagggcgctggtggactctctcgcgggcgccatctccggcggcatctcccgcaccgtcacctcccccctcgacgtcatcaaaatccgcttccagttagaacccacaacctcgtggggtattcttcgaagggatgtgtatggaccttccaaatacactgggcttctgcaagcaaccaaagatattctcagagaggaaggtttaccgggattttggagaggaaatgtaccggctctgtttatgtatatgccatatacagctatacaattcactgttctacacaaactaaaaacatttgcttctggttcatctagaacagaggatcatttggatttgagcccttacttatcttatgtaagtggagctatagcagggtgcacagcaactatagggtcatatccatttgaccttctgaggactattcttgcatctcagggtgaaccaaaggtttaccccaatatgaggtctgcgtttattgatataattaaaactcgtggtgttcaagggctttattctggtctatctccaactcttgttgaaatcataccatatgccggtttgcagtttggttcatacgacactttcaaacgttcgatgatgacatggaacagatataaatattcacatcttagctttggaagcgaggatgattcagtatcaagtttccagctatttctttgtgggtttgcagctgggacattttcaaaggctgcatgccacccacttgatgttgtaaagaaaaggttccagattgaaggactaaaacgacatccaaggtatggtgctccaattgagagcagtacatacaagggcatgtaccatgccttaaaggagattgtcgtaaaggagggatttggaggcctttataagggccttttcccctctttagtgaaatcggcccctgctggtgcagtgacatttgtggtttatgaatacatctcagactggatagggtgcaaggctggagttgagtaagttcttgttggatcatggagctgtcaggataacatgacgaaaactttttgcacaccctggataatggaggggaatggagaccataaggtcactcgtgaagtgcatacaatccctagagatctgattgcatacatgtaaagccttacatagaaaatagctgttttatcgtttcttattcttttgcccaattgcctaatctggtggtcggggtattcgttggcgtctcaaacaaggctgagtaaaactaacatagtgatcgtaacacagcatacatgacggaagtcaaaagcagccggcagttttgttgggatcgtgttacgaatattttttttccggctgaattcatgttatatatctactactacagctagtacgagtaacaatgtatgccactcagatggcgtatgtttaatggcagtcataatttttccatcatttgttgccggacctggatggcagttagattgtatgctgtagtctttctgaaatgctgtgctagcaaaaacctagctgatagtttgctgaatctgggggacagcatgttcttatccagtaggtacttgagctatgggttatcac

SEQ ID NO: 77792 - DNA, 1370 bp, Zea Mays
tcggcccccgacccccgtccgcacgagaaaacaaatcgcctcttttccaggagccaaaccaccacaccttatatctgtcatactttctcgccccccgtgagccgtgaccccgtctcgcctcgccgccgccgccgccgccgatgggctccggggaggagccgtcgcagatgcggagggcgctggtggactctctcgcgggcgccatctccggcggcatctcccgcaccgtcacctcccccctcgacgtcatcaaaatccgcttccaggttcagttagaacccacaacctcgtggggtattcttcgaagggatgtgtatggaccttccaaatacactgggcttctgcaagcaaccaaagatattctcagagaggaaggtttaccgggattttggagaggaaatgtaccggctctgtttatgtatatgccatatacagctatacaattcactgttctacacaaactaaaaacatttgcttctggttcatctagaacagaggatcatttggatttgagcccttacttatcttatgtaagtggagctatagcagggtgcacagcaactatagggtcatatccatttgaccttctgaggactattcttgcatctcagggtgaaccaaaggtttaccccaatatgaggtctgcgtttattgatataattaaaactcgtggtgttcaagggctttattctggtctatctccaactcttgttgaaatcataccatatgccggtttgcagtttggttcatacgacactttcaaacgttcgatgatgacatggaacagatataaatattcacatcttagctttggaagcgaggatgattcagtatcaagtttccagctatttctttgtgggtttgcagctgggacattttcaaaggctgcatgccacccacttgatgttgtaaagaaaaggttccagattgaaggactaaaacgacatccaaggtatggtgctccaattgagagcagtacatacaagggcatgtaccatgccttaaaggagattgtcgtaaaggagggatttggaggcctttataagggccttttcccctctttagtgaaatcggcccctgctggtgcagtgacatttgtggtttatgaatacatctcagactggttagaatcgatactttatcccccttttttttcttgttaatgtatgttttctttccgcatgctgttgtacacttgtgtctggaagaggttgcagttccattggatcctgcagtccatacgaggtttgggaacctgctaaaatcaactggatgattcatgctcgtaagctcctctcatgggttttggcaaaccattagaggttacacaaattggcaatctgagttgatcgccgaagatttgcatttct

SEQ ID NO: 77793 - DNA, 1785 bp, Zea Mays
ctcaatctctacttttgttcaatatgctataatggtgaagctcctaagagaatggagaatgattgttctactggaggaccatctggagaaagcacttcatatcaatttaatgaaaataactggctttctagtgagcaaactgcaaataattatttctcaagaactttcagtagtggtgttgttcctactgagtggggaaggcccaatgcaccactttggggtggtagggttataggacggcggcaagttagatgcattagaggaagttcttgcctatctactgatgaatacaacacttttatgaatatatttgagaggggttctcttctctactgcaatatgtcctttgatgcgctgctaagtgtgcgaaagcaactcgaagaatttggattcccttgcaaagctgtcaatgatggtctatggctacagatgcttctgtgtcacagggtgcaagcgatagttgctgacacttgcaggaactgttgccttacgaataattcttgtgcttgcaagcaagcatatgtgagctcacatacacaccactacaggcaggaacatgaccggagcagtgtttccggcaccataggtaatgtctaccttgcggatgcccagggcgatgggaatggtgtacttgggcctgtccgtgttaacgtaagaggagcagttgatggccttgccggtattgggagagggaactcaaatgtgcctggtgcagcctgggctcctacacgttacgtcttctcacgtgtcccttacgggctcggttcaagaaatgcccagcaatttgccaatgatgaatcagaacctagaattgaccgcaatggagatatttcagcagatggtctgactgcattggttaaccttagccaagaaaacagtgctgcccatccacaggctgaaagtctatttgagacagggatgcagacaagatatcacagtgttgcatctgtttccactcccggtggttcttctgtccagatgcaggagtcaaaggagcatgactgggaaactgcagaggatgcaactatatcattagacatgaaaacacctcttagccattttcctcctttccgctttgggcttgctgatggtcatgtgaaacattcgactgaagtgttttatgcaggctctctatggaaggtgagtgtccaggcattcaatgatgaggatcctcatgggcgacgcactcttggactttttctccaccggcgcaaggctgagttgttagatcccttgaggaaggctcacttgtacgtcgacccccgggaaaaggtcactgcgcgctatcagctcatctgtccatcaaagagggaggtcatggtatttggatgcctgaagcaggctgggacgctgctgccgaaagccccaaagggctggggttggcgcactgctatactgtttgatgagcttgcagatcttctccagggtggtgccctgcgaattgctgcagtggtccagctcgtctaaacttgagttgtagaaaacaactgcttgcttgcaaggatggtgacaccacggcagtttgtgtagttggtacctgcaagaactcaatccgtcatgtattcgttctctgtaattgtgtattactgtatagtggttcgttgtttgatgctcactccgtcctaaaatatagttcttttcagcctattttttctgtctaagttcatttaaatgataataaatataaatatatatgcaaactatatttatgtattatttaatgaatgtgtaattagtctaaaaggaattatattttgtgacggaaagaatatatttatgtattat

SEQ ID NO: 77794 - DNA, 2551 bp, Zea Mays
cacacaaagcagatgaaggctacatgtttttttttaggaagaaagtccactttctttctttacttcaatttttgtccatcggctgtggagtgtggactagtgttgtgagtggaatatgctacatggtccttggagagaggcgggagcacccacagtggttttgcacatagatgatgccaatgttgattcagaagcaattgcaattgcgcttgcatatctttatgggcaagcccccaagcttaatgataacaatgcattccgggttcttgcagctgcatcatttctggatcttcaggacttgtgcacgatatgtacagattttattatttctgagctttggacatcgaactttttacaatatcagttgtttgctgagagtcaagattatggtagccatggagagcgtgtcaggaatgcttgctggggttatctttgtcaaagtgccacactggaattgcgagaggttctaccaaagctttcttcacagactttgcatgccctccttacatctgatgaattgtgggtacctaacgaggagaaaaggtttgaactagcattgtttactctacttgcaaaggttactacgtgtgagatacaagttagtgggaatgaaacaagcttaccaagtgctgatcgatccatgaggaaggggaaggctccaatgaacgaatctggggaggaactgttaatggactctaaactgcagaacttgaagttgcatgataactcggggaatgaaattccccataacattattgctatttcagatatgaatggtgaagctcctaagagaatggagaatgattgttctactggaggaccatctggagaaagcacttcatatcaatttaatgaaaataactggctttctagtgagcaaactgcaaataattatttctcaagaactttcagtagtggtgttgttcctactgagtggggaaggcccaatgcaccactttggggtggtagggttataggacggcggcaagttagatgcattagaggaagttcttgcctatctactgatgaatacaacacttttatgaatatatttgagaggggttctcttctctactgcaatatgtcctttgatgcgctgctaagtgtgcgaaagcaactcgaagaatttggattcccttgcaaagctgtcaatgatggtctatggctacagatgcttctgtgtcacagggtgcaagcgatagttgctgacacttgcaggaactgttgccttacgaataattcttgtgcttgcaagcaagcatatgtgagctcacatacacaccactacaggcaggaacatgaccggagcagtgtttccggcaccataggtaatgtctaccttgcggatgcccagggcgatgggaatggtgtacttgggcctgtccgtgttaacgtaagaggagcagttgatggccttgccggtattgggagagggaactcaaatgtgcctggtgcagcctgggctcctacacgttacgtcttctcacgtgtcccttacgggctcggttcaagaaatgcccagcaatttgccaatgatgaatcagaacctagaattgaccgcaatggagatatttcagcagatggtctgactgcattggttaaccttagccaagaaaacagtgctgcccatccacaggctgaaagtctatttgagacagggatgcagacaagatatcacagtgttgcatctgtttccactcccggtggttcttctgtccagatgcaggagtcaaaggagcatgactgggaaactgcagaggatgcaactatatcattagacatgaaaacacctcttagccattttcctcctttccgctttggggttgagttcgatgatgtgcacaggcttgctgatggtcatgtgaaacattcgactgaagtgttttatgcaggctctctatggaaggtgagtgtccaggcattcaatgatgaggatcctcatgggcgacgcactcttggactttttctccaccggcgcaaggctgagttgttagatcccttgaggaaggctcacttgtacgtcgacccccgggaaaaggtcactgcgcgctatcagctcatctgtccatcaaagagggaggtcatggtatttggatgcctgaagcaggctgggacgctgctgccgaaagccccaaagggctggggttggcgcactgctatactgtttgatgagcttgcagatcttctccagggtggtgccctgcgaattgctgcagtggtccagctcgtctaaacttgagttgtagaaaacaactgcttgcttgcaaggatggtgacaccacggcagtttgtgtagttggtacctgcaagaactcaatccgtcatgtattcgttctctgtaattgtgtattactgtatagtggttcgttgtttgatgctcactccgtcctaaaatatagttcttttcagcctattttttctgtctaagttcatttaaatgataataaatataaatatatatgcaaactatatttatgtattatttaatgaatgtgtaattagtctaaaaggaattatattttgtgacggaaagaatatatttatgtattat

SEQ ID NO: 77795 - DNA, 1557 bp, Zea Mays
caaggcacgttaagacaaggcgaagtgtatatatattccgcgactgcgactacaatgggcgacagatcgtgtgcaatcgagagcgagctacctccatggcggcggcggcgggcatccggagcagggaggaacggtggagcctcgccggtaagacggcgctcgtcaccggaggaagcaaggggatcgggcgcgcgatcgtggaggagctcgcggggttcggggtgcgcgtgcacacgtgcgcccgcaccgcggccgacctggacgagcgcctgcgcgcgtgggccgcggacgcccgcctgccgggccgcgtcacggcgtccgtgtgcgacgtgtcggcgcggggcgaccgggaggcgctggtggcggcggcgcgggcggagctggggcccaggctggacatcctcgtcaacaacgccgggcagagcacgttccgcgcggccacggagacggcggccggcgactacgcgcgcctcatggccaccaacctcgagtcctgcttccacctcgcgcagctggcgcacccgctgctcctcgccgcgggcgcgggcgcgggcgcgggcgccgcggtggtgaacgtgtcctccatcgcggggctcgtcgcgtacccggcgctggcggcgtactcggcgaccaagggcgggctgaaccagctcacgcgcagcctggccgccgagtgggccggcgacggcgtgcgcgtcaactgcgtcgcgccgggcggcgtccagacggacatgttcagcagcgtcgcgctggagatggacccggacccggagacgtcgctgaggatgatggaggcggagctggcgcgggtgccgttgcgccgattcggcgagaccgaggagatcgcgtccctcgtcgccttcctctgcatgcccgcctcgtcctacatcaccgggcaggtcatctgcgccgacggtggccgcaccattgctgcctaggccttcgcgctatgcatgctacactgagtacctgtactgaacgtttcaaaagacaaaagcatgctatgccaccgttcgctcgctagagcttccagtagaggcgagcgcggtggaggacgccggagacgagcgcccagaagaggatctgcgcgaagaggacgtagaggaggatgcccaccctggtggagtgccacaccttgacgaacacgtgcttcctcacccataccacccgttgaggaagccctcgaagacgccttccgcggccatcacgtacaccagcatcgcgttcatgccgacccaccgcagcggcgcgaaggcgtagcgcaggctcacgacgtcgacctgcgacacgcaagcaggcatgcacagacacagtcttgagccttgtccagacacacgtacgaaacgtgcggagtcgtggaggaggagacacggcatcgtctaccaagaagtagagcgctgagaagacgaccccagcggcgccggcagtgacgcagatgtagctgaacgtgtagagctgcttgttgagcgggatcgctgcgaggaaggagacgacgacgtgtaaatgtaaaccagcagcttgcttgtcaagcgaaatttcagacggaagatgataaac

SEQ ID NO: 77796 - DNA, 1964 bp, Zea Mays
tgcttgcttccattcccagccacccacttcccaccggctcaaacattcccacgtaacgtaatctctggccgcaataaataccttccccgtaattatctccgacgagggggcgccgagccgagctgagttgagcacgacgaaccccggacacccccctccccacgcccggccatggaggactggctcttctactccctcaccactctcctctgcctcctctgctcgctcattctgcgggcgcgcacaccaggcaagaaggcccggaatgccgactcctcctccccgctccctcccctgcccccgggcccgacgccgctgccggtgctgggcccgctgctcttcctcgcgcgccgcgacttcgacatcgagcccgtcctccgccgcatcgcgcgggaccacggcaaggtcttcacgttcgcgccgctggggcgggcgcgcccgggcatcttcgtggccgaccgcggcgcggcgcaccgcgcgctcgtgcagcgcggcgccgcgttcgcctcccgcccgccctccacggcctccagcgccgtgctcaccagcggcggccgcaacgtcagctcctccccctacggcgccacgtggcgggcgctgcgccggaacctcgcctccggggtgctcaacccggcgcggctccgggccttctcccccgcgcgccggtgggtgctcggcgtcctcgcccgccgcgtccgcgccgacggccgccacggggaggctcccgtcgccgtcatggagccgttccagtacgccatgttctgcctcctcgtccacatgtgcttcggtggcgaccgcctcggggacgacgcgcgcgtccgggacatcgaggccacgcagcgggagctcctcggcagcttcctcagcttccaggtcttctccttcctcccgtgggtgaccaagctcgtgttccgccgacgctgggagaagctcgtctcgctgcggcgtcggcaggaggagctcttcgtcccgctgatacaggccaggcgggaggccgctgacggacggcgagatcgtgagcctctgctccgagttcctcagcgccggcaccgacacgacggccaccgcgctgcagtggatcctggcgaacctggtgaagaacccggcgatgcaggacaggctccgggacgaggtgtccagcgccggcgccggcgccgacggcgaggtgctggaggaggagctgcaggcgatgccgtacctcaaggccgtggtgctggaggcgctccggcgccacccgccgggccactacgtgctcccgcacgccgtgcacgaggacacgacgctggacgggtaccgcgtgcccgccggcgcgcccgtcaacttcgcggtgggggacatcgggatggacgaggaggtgtggagggcccccgcggagttccggccggagcggttcctgcccggcggcgagggggacgacgtggacctcaccggcagcaaggagatcaagatgatgccgttcggcgccgggcgccgggtctgccccggcatggcgctggcgctgctgcacctcgagtacttcgtggccaacctcgtgagggagttcgactggcgccaggccgacggcgaggaggtggacctcaccgagaagctcgagttcaccgtcgtcatgaagcggccgctcagggccagggccgtgccgctgcggccgccgccgcccgccgtcgcagctgcttgatcgagcgaggcttgccttctgagtagtggcatcgtggctgcttctcgttgttctgttactatatttatataaccaaatattaggtataatgataggaaagtattcggactgtacattatgctgcgaccaataacaatgcatacgttgtgctctcgtacggtacaccccgcgatcccatcccaacaattgcgtgcatgcacaccatgcaagtgcaaaggaatcctttcatatccaaatccaaggcaccatgcatctgtgttgcacacttgcacttgtacgtacctctagg

SEQ ID NO: 77797 - DNA, 1430 bp, Zea Mays
aaaaaaggaggggctcgcacgagagacgtggtccacctgcccaccgggcgcctactgggggcggttgttgttggtatatttgcggtggccggggacgggtcagcaccgccttcttctcaccagcccctctcgcctcacgaaaaggcgcaggccaaggccaaggccaagccgccccctccctcctctcctctcctctcctctcctttcctctccactctctggcagccaaaggcgaggccgagatcctgcgcgcggaggatgccttccaggtccatgagccggctgtccgtcgagtccgcctcgggcagcggcggcggcggctgccgggaggccgagccggtgctctgcgcgcctcggccgcgcagggcccagcagcagctggtccacgtccacccccgcggcgccgacctcatcctcggcccgccgcccttccttctcaacgagcgaggagggtcggtgcagctgggcggcgttcggcggcgggtcgccgccggcgcgcgcgggcaacccgctggtgcacgaccccagcttcctgctgagccagcgccaccccgcggcggacccgccgctggagctcggcttcttcgaccacctgatccgcaccagcagctacgttcaccggccgacgccgacgacgtcgtataccagcaccagcagcagcggcagtagcagcaagagtagttttggcccgtcgtcgttcgcgcccgccgtgaggatccaggggttcgacgtcgccgcgtgccggagctcccacagcggcggcggcggcgcgggcggccgcgttctgtccgccgcccgcgcgtgagctagcggtcgagctccatggtgtggaggggcaggaaatcaaagagggaggaggaagaaccttgtgtacagattatctgtctgatgagtcgtgttcgtgtccgctgtactaattgtgaacaccaccacgtagcatagcatagcatatagcatagcatatcaaagacaactaggtcggtcggacggtcagcgctcgtgttcttgtagcagtcgagctagcgactaggctaccgcgcgccatgtaacgtacggtcctgcaaacaatactgcacgtataaagatggaaaccgtgtacatacctatacatgttcgtacgttcgatcgatccatcgatcgagacgctggatgctcggtggcaaggatagagtgatggcgcggttcgattctgggaagaagagaggaaggacatggtgcgtgccgtggtaggcggcgggcggagcaagcaaagtggtagttgggtctctccttcgtcgttggttccgcttccgtcctagactcttctgtctcctggccccagacgcggacttgccgggactgagagtgagatctcctcgttcctgaccgccgcgccacgaccaagtgtggaggagagacaaggagagacagagagagagagagagaagcgt

SEQ ID NO: 77798 - DNA, 2377 bp, Zea Mays
cactgtgcggatctgtaaccgtggtgcgtttccacttcctccccagctcatccgcgacagagcaattagtccattgcacacctccactcctcacccttcaatctttcgttcccaactgcgtttcctcctccgcgtcttcaaggaggggagacctgaaacgaatccagtccaggctggtggctgccggcgctggacctgaacgctggtgcatactgcgtaggcaagagcaggcaatggcggaggcgaatgcggggaaggagaagaaggaagtggtgcggctggagcgcgagtccgtgatccccatcatgaagcccaagctcaccatgaagctcgcctacctcatcgaacatcagtctgacagagaagaattcttgaagctctgcaggagggttgagtacaccataagggcttggtaccatctccagtttgatgatatgatggaactgttcgctctcttcgatcctgtgcatggtgctaaaaaactcgagcagcagaacttcctacctgaggaaatcgacacgcttgagcagaacttcctgtcctatttctttcgggtgatggaaaagagcaattttaacatagtaaatgacgatgaggttgaacttgctcattctggacaatatctgttgaatcttcccattaaagttgatgaatcaaagttagatgacaaacttctgtcgaagtattttaaggagcaccgtcatgaaaacctgcccgacttctcagacaagtatgttatatttcgtaggggcattggattggaccgcactagcaactttttcttcatggagaaagtggacatgatcatagctcgtgcatggcgaaggttccttgagaagacgagactgcaaaagctgttctcaagaaagaaaaatagtaagccaaagatagattccaagaagaatgatgatttagctagtgaaatagaagacaaggagctttatgttgaacgcatacgtcttgaaacaatggatttaagctttgggaatttatttggcaaggtcacaattcaagagcctacatttgaagaggtgattgtcttgtatagagtgcactgatttgtaatatattccttcaggagaaaaagtccaaagggccaggatgatagggcaattcatgtaaagcacttcaaaaatatcccaatggcagacatggagttggttctgcctgagaagaaaaacccgagcctcacacctatggactgggttcaatttattgtttctgttgtcattggacttgttacactcatcagttcactggaaatgcctaaagctgatttctgggttgtaattgcaatcctctctgcactggcaggatattgcgcgaagatctatttctcgtttcaacagaatatggcaacctaccaaaacttaatcactcaatcaatgtatgacaaacaactagatagtgggaaaggcacactcctccacctctgtgatgatgtgattcaacaggaggtcaaggaggtcataattgcctactacattttgatggagaatggaaaggctaccagtgatgtaaaatacatatattgttcttctgtcttgaaatctatatgggagaaatgttatgactaattattcatgtgttcccaccgtgctaggatcttgacttgcaatgcgaggagttaatccaggaagagtttggcttgcaatgcaattttgaggtgatggatgcagttcagaagctggagaggcttggtgtcattacaagagactctattggaaggatttgctgtgtccctctaaagcgtgccaatgagatcatcggcgcgaccacggaagaactggttatgaaagccaggcaaagctagcaatctattattttgaacaatgtagccgcattgtagattcttgcctgatggcgctgtaacgtttatggttactccagaaagtccaaacactgaactcttgcacaccaggagataagtacattctggtcatctccacagtagttctgggagagctacaagaaaatgtggttgtatttatttttttttatttttttggtggggggtactatggtttgtggaacgtcgtcgagggtgttgtaagcatgtagcattcttttgataacaagcgtggtaggaaggatgtttgaagaacacatacaagggctattatgttgctggattgatgctgtgaaccatgtattcttttcgtcagaacagtaaacttccgtaatgctgacggttcactgcggtgtgtacactgggccactggcattggcaacttgacccgtttctggcttctgctcgtgttcctggtctcttcggctcctcgagaagttaggatgctcagatgctgtgatgtaaatgagactctagagcaccattcccacgttccctctaaaactggagtctgaaatctgttctatc

SEQ ID NO: 77799 - DNA, 2376 bp, Zea Mays
aacactgtgcggatctgtaaccgtggaggggagacctgaaacgaatccagtccaggctggtggctgccggcgctggacctgaacgctggtgcatactgcgtaggcaagagcaggcaatggcggaggcgaatgcggggaaggagaagaaggaagtggtgcggctggagcgcgagtccgtgatccccatcatgaagcccaagctcaccatgaagctcgcctacctcatcgaacatcagtctgacagagaagaattcttgaagctctgcaggagggttgagtacaccataagggcttggtaccatctccagtttgatgatatgatggaactgttcgctctcttcgatcctgtgcatggtgctaaaaaactcgagcagcagaacttcctacctgaggaaatcgacacgcttgagcagaacttcctgtcctatttctttcgggtgatggaaaagagcaattttaacatagtaaatgacgatgaggttgaacttgctcattctggacaatatctgttgaatcttcccattaaagttgatgaatcaaagttagatgacaaacttctgtcgaagtattttaaggagcaccgtcatgaaaacctgcccgacttctcagacaagtatgttatatttcgtaggggcattggattggaccgcactagcaactttttcttcatggagaaagtggacatgatcatagctcgtgcatggcgaaggttccttgagaagacgagactgcaaaagctgttctcaagaaagaaaaatagtaagccaaagatagattccaagaagaatgatgatttagctagtgaaatagaagacaaggagctttatgttgaacgcatacgtcttgaaacaatggatttaagctttgggaatttatttggcaaggtcacaattcaagagcctacatttgaagagagtgcactgatttgtaatatattccttcaggagaaaaagtccaaagggccaggatgatagggcaattcatgtaaagcacttcaaaaatatcccaatggcagacatggagttggttctgcctgagaagaaaaacccgagcctcacacctatggactgggttcaatttattgtttctgttgtcattggacttgttacactcatcagttcactggaaatgcctaaagctgatttctgggttgtaattgcaatcctctctgcactggcaggatattgcgcgaagatctatttctcgtttcaacagaatatggcaacctaccaaaacttaatcactcaatcaatgtatgacaaacaactagatagtgggaaaggcacactcctccacctctgtgatgatgtgattcaacaggaggtcaaggaggtcataattgcctactacattttgatggagaatggaaaggctaccagtgatgatcttgacttgcaatgcgaggagttaatccaggaagagtttggcttgcaatgcaattttgaggtgatggatgcagttcagaagctggagaggcttggtgtcattacaagagtgagttctcacttgtttctttttcttctcatggtgccacctgatcagagcatagggacgttttcttacagatacagtgcacagaataacgatttttgcagacacgtttacagggccagaagtttttgcatctactgaccatcatgttgtcacgtattgttctctgcttctttttttctttttctttctgcccaatactgaaggccgttttgcatccaggactctattggaaggatttgctgtgtccctctaaagcgtgccaatgagatcatcggcgcgaccacggaagaactggttatgaaagccaggcaaagctagcaatctattattttgaacaatgtagccgcattgtagattcttgcctgatggcgctgtaacgtttatggttactccagaaagtccaaacactgaactcttgcacaccaggagataagtacattctggtcatctccacagtagttctgggagagctacaagaaaatgtggttgtatttatttttttttatttttttggtggggggtactatggtttgtggaacgtcgtcgagggtgttgtaagcatgtagcattcttttgataacaagcgtggtaggaaggatgtttgaagaacacatacaagggctattatgttgctggattgatgctgtgaaccatgtattcttttcgtcagaacagtaaacttccgtaatgctgacggttcactgcggtgtgtacactgggccactggcattggcaacttgacccgtttctggcttctgctcgtgttcctggtctcttcggctcctcgagaagttaggatgctcagatgctgtgatgtaaatgagactctagagcaccattcccacgttccctctaaaactggagtctgaaatctgttctatc

SEQ ID NO: 77800 - DNA, 2136 bp, Zea Mays
gaacggacgaacactgtgcggatctgtaaccgtggaggggagacctgaaacgaatccagtccaggctggtggctgccggcgctggacctgaacgctggtgcatactgcgtaggcaagagcaggcaatggcggaggcgaatgcggggaaggagaagaaggaagtggtgcggctggagcgcgagtccgtgatccccatcatgaagcccaagctcaccatgaagctcgcctacctcatcgaacatcagtctgacagagaagaattcttgaagctctgcaggagggttgagtacaccataagggcttggtaccatctccagtttgatgatatgatggaactgttcgctctcttcgatcctgtgcatggtgctaaaaaactcgagcagcagaacttcctacctgaggaaatcgacacgcttgagcagaacttcctgtcctatttctttcgggtgatggaaaagagcaattttaacatagtaaatgacgatgaggttgaacttgctcattctggacaatatctgttgaatcttcccattaaagttgatgaatcaaagttagatgacaaacttctgtcgaagtattttaaggagcaccgtcatgaaaacctgcccgacttctcagacaagtatgttatatttcgtaggggcattggattggaccgcactagcaactttttcttcatggagaaagtggacatgatcatagctcgtgcatggcgaaggttccttgagaagacgagactgcaaaagctgttctcaagaaagaaaaatagtaagccaaagatagattccaagaagaatgatgatttagctagtgaaatagaagacaaggagctttatgttgaacgcatacgtcttgaaacaatggatttaagctttgggaatttatttggcaaggtcacaattcaagagcctacatttgaagaggagaaaaagtccaaagggccaggatgatagggcaattcatgtaaagcacttcaaaaatatcccaatggcagacatggagttggttctgcctgagaagaaaaacccgagcctcacacctatggactgggttcaatttattgtttctgttgtcattggacttgttacactcatcagttcactggaaatgcctaaagctgatttctgggttgtaattgcaatcctctctgcactggcaggatattgcgcgaagatctatttctcgtttcaacagaatatggcaacctaccaaaacttaatcactcaatcaatgtatgacaaacaactagatagtgggaaaggcacactcctccacctctgtgatgatgtgattcaacaggaggtcaaggaggtcataattgcctactacattttgatggagaatggaaaggctaccagtgatgatcttgacttgcaatgcgaggagttaatccaggaagagtttggcttgcaatgcaattttgaggtgatggatgcagttcagaagctggagaggcttggtgtcattacaagagactctattggaaggatttgctgtgtccctctaaagcgtgccaatgagatcatcggcgcgaccacggaagaactggttatgaaagccaggcaaagctagcaatctattattttgaacaatgtagccgcattgtagattcttgcctgatggcgctgtaacgtttatggttactccagaaagtccaaacactgaactcttgcacaccaggagataagtacattctggtcatctccacagtagttctgggagagctacaagaaaatgtggttgtatttatttttttttatttttttggtggggggtactatggtttgtggaacgtcgtcgagggtgttgtaagcatgtagcattcttttgataacaagcgtggtaggaaggatgtttgaagaacacatacaagggctattatgttgctggattgatgctgtgaaccatgtattcttttcgtcagaacagtaaacttccgtaatgctgacggttcactgcggtgtgtacactgggccactggcattggcaacttgacccgtttctggcttctgctcgtgttcctggtctcttcggctcctcgagaagttaggatgctcagatgctgtgatgtaaatgagactctagagcaccattcccacgttccctctaaaactggagtctgaaatctgttctatc

SEQ ID NO: 77801 - DNA, 1115 bp, Zea Mays
gcacacagcagtacagcacacgccgatggccccgcggagcatggcgtcgctaacggactgtccagctgctcttcctggaaactatctctgttccgttttccttcagacttctttctttcttactttctttctagaattagggcctgccttctggcggtgactcggtgttgcctcgtcgaaatgaagcacagataattgacaaatttagggggtgtttggtttgaggaatcactccatccaaaatgtggtggtgcatcatggggtcatttctcaaatttggtgggatgaccccattactcatattagtactaactaaataactataaggaatgaagtgatgatggatcaactcaatctattccacaaaccaaacaaaaaagtgaggagtgagaatatgatgaactagctcattcctcaaaccaaacagcttattagtgttgtgacggtcatggcaaagtggcaacctcaaggaaactacctagatgattattgttcttttttttttcctctggttttggttgaaacctgagggcgtgtttggttagtcgtgcatgtcagacgccgcctggtactggcagccatcgcttgggacgtctgtactcatggctcaatgccacggtgtagcatgcagggtgttcgacgtaatgtccgagctggacatgtatagtattcttcttgctggtgcaatgacatatcccgtctttttagagctagttttgaaacttaaatccccttcataatttccggagattgagtaggaaattagctcaatggcatatttgctcacaacaatgactacaacgccttcttcattcttgaagcagcgaaaatgcgctctctgggaaatatgacatgatcattgcatcttgtatcatgctgatttggctatatagggaaagaggcattgctctgaaagatggcgccctgcttgcaaatatccaaggaggagctgctatggcaaagtctcccttattgtgccttcacatgggcgtttgacagtgaaaaccgaaatccatgaagttcaagaaagaacgagttcaccggtctccaggctccattgtctcagtcagattttgactagaagctcaattccttgaagctatcccaaagtgaag

SEQ ID NO: 77802 - DNA, 2033 bp, Zea Mays
gtgtggaccttccagcggcaaatatagacaggactcctgcactgcaccatgcgtccagccatcgacacattattgggccgcagaatttcgttttattgggctgggccgctggtgcataccttaccggggttgtctggtgtcggacaggggttcccttcgtccagacggagctcccagtccgcaaccgccgcctcccgtttattctctctcaagcttctctccccgctaccgctccgagtcccaagtcccacccggccagcctccatcgctagtaccactcctagtcccaagtcccagccttccatcgacggcgagggagggagaggcgacctccatccgggctggttccctttggtggcgccgcctttttcccagggcgtttaatacacacaaatgaactcttggtgcttctgggtgaggggtactatgcagagaggtcggctaagcagacgactaatatattgcacaggagggggcaggaattggaagctcaagtcgaagcaatgaaggcaactatcgctgaccttgaagctgaggccaaattctttgaattcacggccaccgaggcttcagagggtcttgttgaaatcagggaagagtatgatgaggacttagagacgaattcatcaagatcagaggcttcagttgctactgtggttatgtccgataaagacagggaacatgctcgaatcatggcaaggttagatgaacttgaaagggaagaaaaggatgctggaagtgcctgtgaagatgataatgatggcgacgatgatgatggagatgctggaacaagtgatgatggcgaggaaaataaggaatctggaaatgctttaagtgatgtcaatgaagactacagttctggttttggcgcttcattttctggaagtggcggcaatgataggagtcatgggaatattaagaagcctggaggagatgaaatgctgataggcatttctcataagccatcatcccatacatctcatctagcatttcctggccaaacctctgcaacaaattctgatgtccgagttcacactaaagctgttacttttgaagacgacaaatatgtagttagttcgtcaaagtctcctcccttgctactggattctatacagtctgatcctgtgctcaagaattcttcagaccccgctctatctcgtgacagaaagataatatcaagtggacgaaaggcctttacaggatctatcattgagcacgacgacaatgtttccaccattgaaccttctgtggctagttcgttggcaaaacctggtacttgtgcttcttcaaggcccgtgtcaaggttcaagatgcagaaaggagggcggtgagtctggacactcgggtggacctttggtgtctgatagattgcatcttgaacacgttcaaattgtctgtgctgtctgaactcctggacgctagacatgttgtggatcctggacgctagacatgttgtggatcctggacgctagacatgttctggagtgattgtcttctgccgactgtagagtgaaaccgggacgtccaagcgaagaagggaattaaaaacgaggttttttttggtcggttaattattagtatcacaggacgtccaagcatcgcattagttagccactgcacacagagcctgtcggccaataaggtcagttaattacagatttagtggtgctagcttgctgttcctacttgtgctgtagcagagtgtcatgacatggtcagtagcagccgatgagcgccgcgaagtcagcagggcggctgctggtggtgtctcttctcgttccctgggcggcgccgtggagcaccagattgtctctctcacgtatttcagcggcagcaagggacgaagaacctgccctctgcatgtcagctccacctgccattatatgtgtatattatttcattcattaattcagtgggtaatcgtcacaaacagctatataagatccagtaaaatgttgaataatctgatacacacgcacacacacgagtataaaacacaagtatttgtaagtaacctacaatggtcgctcaat

SEQ ID NO: 77803 - DNA, 2045 bp, Zea Mays
gtgtggaccttccagcggcaaatatagacaggactcctgcactgcaccatgcgtccagccatcgacacattattgggccgcagaatttcgttttattgggctgggccgctggtgcataccttaccggggttgtctggtgtcggacaggggttcccttcgtccagacggagctcccagtccgcaaccgccgcctcccgtttattctctctcaagcttctctccccgctaccgctccgagtcccaagtcccacccggccagcctccatcgctagtaccactcctagtcccaagtcccagccttccatcgacggcgagggagggagaggcgacctccatccgggctggttccctttggtggcgccgcctttttcccagggcgtttaatacacacaaatgaactcttggtgcttctgggtgaggggtactatgcagagaggtcggctaagcagacgactaatatattgcacaggagggggcaggaattggaagctcaagtcgaagcaatgaaggcaactatcgctgaccttgaagctgaggccaaattctttgaattcacggccaccgaggcttcagagggtcttgttgaaatcagggaagagtatgatgaggacttagagacgaattcatcaagatcagaggcttcagttgctactgtggttatgtccgataaagacagggaacatgctcgaatcatggcaaggttagatgaacttgaaagggaagaaaaggatgctggaagtgcctgtgaagatgataatgatggcgacgatgatgatggagatgctggaacaagtgatgatggcgaggaaaataaggaatctggaaatgctttaagtgatgtcaatgaagactacagttctggttttggcgcttcattttctggaagtggcggcaatgataggagtcatgggaatattaagagtgcactgaagaagcctggaggagatgaaatgctgataggcatttctcataagccatcatcccatacatctcatctagcatttcctggccaaacctctgcaacaaattctgatgtccgagttcacactaaagctgttacttttgaagacgacaaatatgtagttagttcgtcaaagtctcctcccttgctactggattctatacagtctgatcctgtgctcaagaattcttcagaccccgctctatctcgtgacagaaagataatatcaagtggacgaaaggcctttacaggatctatcattgagcacgacgacaatgtttccaccattgaaccttctgtggctagttcgttggcaaaacctggtacttgtgcttcttcaaggcccgtgtcaaggttcaagatgcagaaaggagggcggtgagtctggacactcgggtggacctttggtgtctgatagattgcatcttgaacacgttcaaattgtctgtgctgtctgaactcctggacgctagacatgttgtggatcctggacgctagacatgttgtggatcctggacgctagacatgttctggagtgattgtcttctgccgactgtagagtgaaaccgggacgtccaagcgaagaagggaattaaaaacgaggttttttttggtcggttaattattagtatcacaggacgtccaagcatcgcattagttagccactgcacacagagcctgtcggccaataaggtcagttaattacagatttagtggtgctagcttgctgttcctacttgtgctgtagcagagtgtcatgacatggtcagtagcagccgatgagcgccgcgaagtcagcagggcggctgctggtggtgtctcttctcgttccctgggcggcgccgtggagcaccagattgtctctctcacgtatttcagcggcagcaagggacgaagaacctgccctctgcatgtcagctccacctgccattatatgtgtatattatttcattcattaattcagtgggtaatcgtcacaaacagctatataagatccagtaaaatgttgaataatctgatacacacgcacacacacgagtataaaacacaagtatttgtaagtaacctacaatggtcgctcaat

SEQ ID NO: 77804 - DNA, 1968 bp, Zea Mays
gtgtggaccttccagcggcaaatatagacaggactcctgcactgcaccatgcgtccagccatcgacacattattgggccgcagaatttcgttttattgggctgggccgctggtgcataccttaccggggttgtctggtgtcggacaggggttcccttcgtccagacggagctcccagtccgcaaccgccgcctcccgtttattctctctcaagcttctctccccgctaccgctccgagtcccaagtcccacccggccagcctccatcgctagtaccactcctagtcccaagtcccagccttccatcgacggcgagggagggagaggcgacctccatccgggctggttccctttggtggcgccgcctttttcccagggcgtttaatacacacaaatgaactcttggagggggcaggaattggaagctcaagtcgaagcaatgaaggcaactatcgctgaccttgaagctgaggccaaattctttgaattcacggccaccgaggcttcagagggtcttgttgaaatcagggaagagtatgatgaggacttagagacgaattcatcaagatcagaggcttcagttgctactgtggttatgtccgataaagacagggaacatgctcgaatcatggcaaggttagatgaacttgaaagggaagaaaaggatgctggaagtgcctgtgaagatgataatgatggcgacgatgatgatggagatgctggaacaagtgatgatggcgaggaaaataaggaatctggaaatgctttaagtgatgtcaatgaagactacagttctggttttggcgcttcattttctggaagtggcggcaatgataggagtcatgggaatattaagaagcctggaggagatgaaatgctgataggcatttctcataagccatcatcccatacatctcatctagcatttcctggccaaacctctgcaacaaattctgatgtccgagttcacactaaagctgttacttttgaagacgacaaatatgtagttagttcgtcaaagtctcctcccttgctactggattctatacagtctgatcctgtgctcaagaattcttcagaccccgctctatctcgtgacagaaagataatatcaagtggacgaaaggcctttacaggatctatcattgagcacgacgacaatgtttccaccattgaaccttctgtggctagttcgttggcaaaacctggtacttgtgcttcttcaaggcccgtgtcaaggttcaagatgcagaaaggagggcggtgagtctggacactcgggtggacctttggtgtctgatagattgcatcttgaacacgttcaaattgtctgtgctgtctgaactcctggacgctagacatgttgtggatcctggacgctagacatgttgtggatcctggacgctagacatgttctggagtgattgtcttctgccgactgtagagtgaaaccgggacgtccaagcgaagaagggaattaaaaacgaggttttttttggtcggttaattattagtatcacaggacgtccaagcatcgcattagttagccactgcacacagagcctgtcggccaataaggtcagttaattacagatttagtggtgctagcttgctgttcctacttgtgctgtagcagagtgtcatgacatggtcagtagcagccgatgagcgccgcgaagtcagcagggcggctgctggtggtgtctcttctcgttccctgggcggcgccgtggagcaccagattgtctctctcacgtatttcagcggcagcaagggacgaagaacctgccctctgcatgtcagctccacctgccattatatgtgtatattatttcattcattaattcagtgggtaatcgtcacaaacagctatataagatccagtaaaatgttgaataatctgatacacacgcacacacacgagtataaaacacaagtatttgtaagtaacctacaatggtcgctcaat

SEQ ID NO: 77805 - DNA, 2030 bp, Zea Mays
gtgtggaccttccagcggcaaatatagacaggactcctgcactgcaccatgcgtccagccatcgacacattattgggccgcagaatttcgttttattgggctgggccgctggtgcataccttaccggggttgtctggtgtcggacaggggttcccttcgtccagacggagctcccagtccgcaaccgccgcctcccgtttattctctctcaagcttctctccccgctaccgctccgagtcccaagtcccacccggccagcctccatcgctagtaccactcctagtcccaagtcccagccttccatcgacggcgagggagggagaggcgacctccatccgggctggttccctttggtggcgccgcctttttcccagggcgtttaatacacacaaatgaactcttggtgcttctgggtgaggggtactatgcagagaggtcggctaagcagacgactaatatattgcacaggagggggcaggaattggaagctcaagtcgaagcaatgaaggcaactatcgctgaccttgaagctgaggccaaattctttgaattcacggccaccgaggcttcagagggtcttgttgaaatcagggaagagtatgatgaggacttagagacgaattcatcaagatcagaggcttcagttgctactgtggttatgtccgataaagacagggaacatgctcgaatcatggcaaggttagatgaacttgaaagggaagaaaaggatgctggaagtgcctgtgaagatgataatgatggcgacgatgatgatggagatgctggaacaagtgatgatggcgaggaaaataaggaatctggaaatgctttaagtgatgtcaatgaagactacagttctggttttggcgcttcattttctggaagtggcggcaatgataggagtcatgggaatattaagagtgcactgaagaagcctggaggagatgaaatgctgataggcatttctcataagccatcatcccatacatctcatctagcatttcctggccaaacctctgcaacaaattctgatgtccgagttcacactaaagacgacaaatatgtagttagttcgtcaaagtctcctcccttgctactggattctatacagtctgatcctgtgctcaagaattcttcagaccccgctctatctcgtgacagaaagataatatcaagtggacgaaaggcctttacaggatctatcattgagcacgacgacaatgtttccaccattgaaccttctgtggctagttcgttggcaaaacctggtacttgtgcttcttcaaggcccgtgtcaaggttcaagatgcagaaaggagggcggtgagtctggacactcgggtggacctttggtgtctgatagattgcatcttgaacacgttcaaattgtctgtgctgtctgaactcctggacgctagacatgttgtggatcctggacgctagacatgttgtggatcctggacgctagacatgttctggagtgattgtcttctgccgactgtagagtgaaaccgggacgtccaagcgaagaagggaattaaaaacgaggttttttttggtcggttaattattagtatcacaggacgtccaagcatcgcattagttagccactgcacacagagcctgtcggccaataaggtcagttaattacagatttagtggtgctagcttgctgttcctacttgtgctgtagcagagtgtcatgacatggtcagtagcagccgatgagcgccgcgaagtcagcagggcggctgctggtggtgtctcttctcgttccctgggcggcgccgtggagcaccagattgtctctctcacgtatttcagcggcagcaagggacgaagaacctgccctctgcatgtcagctccacctgccattatatgtgtatattatttcattcattaattcagtgggtaatcgtcacaaacagctatataagatccagtaaaatgttgaataatctgatacacacgcacacacacgagtataaaacacaagtatttgtaagtaacctacaatggtcgctcaat

SEQ ID NO: 77806 - DNA, 1980 bp, Zea Mays
gtgtggaccttccagcggcaaatatagacaggactcctgcactgcaccatgcgtccagccatcgacacattattgggccgcagaatttcgttttattgggctgggccgctggtgcataccttaccggggttgtctggtgtcggacaggggttcccttcgtccagacggagctcccagtccgcaaccgccgcctcccgtttattctctctcaagcttctctccccgctaccgctccgagtcccaagtcccacccggccagcctccatcgctagtaccactcctagtcccaagtcccagccttccatcgacggcgagggagggagaggcgacctccatccgggctggttccctttggtggcgccgcctttttcccagggcgtttaatacacacaaatgaactcttggagggggcaggaattggaagctcaagtcgaagcaatgaaggcaactatcgctgaccttgaagctgaggccaaattctttgaattcacggccaccgaggcttcagagggtcttgttgaaatcagggaagagtatgatgaggacttagagacgaattcatcaagatcagaggcttcagttgctactgtggttatgtccgataaagacagggaacatgctcgaatcatggcaaggttagatgaacttgaaagggaagaaaaggatgctggaagtgcctgtgaagatgataatgatggcgacgatgatgatggagatgctggaacaagtgatgatggcgaggaaaataaggaatctggaaatgctttaagtgatgtcaatgaagactacagttctggttttggcgcttcattttctggaagtggcggcaatgataggagtcatgggaatattaagagtgcactgaagaagcctggaggagatgaaatgctgataggcatttctcataagccatcatcccatacatctcatctagcatttcctggccaaacctctgcaacaaattctgatgtccgagttcacactaaagctgttacttttgaagacgacaaatatgtagttagttcgtcaaagtctcctcccttgctactggattctatacagtctgatcctgtgctcaagaattcttcagaccccgctctatctcgtgacagaaagataatatcaagtggacgaaaggcctttacaggatctatcattgagcacgacgacaatgtttccaccattgaaccttctgtggctagttcgttggcaaaacctggtacttgtgcttcttcaaggcccgtgtcaaggttcaagatgcagaaaggagggcggtgagtctggacactcgggtggacctttggtgtctgatagattgcatcttgaacacgttcaaattgtctgtgctgtctgaactcctggacgctagacatgttgtggatcctggacgctagacatgttgtggatcctggacgctagacatgttctggagtgattgtcttctgccgactgtagagtgaaaccgggacgtccaagcgaagaagggaattaaaaacgaggttttttttggtcggttaattattagtatcacaggacgtccaagcatcgcattagttagccactgcacacagagcctgtcggccaataaggtcagttaattacagatttagtggtgctagcttgctgttcctacttgtgctgtagcagagtgtcatgacatggtcagtagcagccgatgagcgccgcgaagtcagcagggcggctgctggtggtgtctcttctcgttccctgggcggcgccgtggagcaccagattgtctctctcacgtatttcagcggcagcaagggacgaagaacctgccctctgcatgtcagctccacctgccattatatgtgtatattatttcattcattaattcagtgggtaatcgtcacaaacagctatataagatccagtaaaatgttgaataatctgatacacacgcacacacacgagtataaaacacaagtatttgtaagtaacctacaatggtcgctcaat

SEQ ID NO: 77807 - DNA, 618 bp, Zea Mays
atctcgctccggcgggcacgagcaccaccgaacagataactcacgtcgacggacagacgcatgaagtccaaagtccaagtgcatgctagagttccgcatggaagactcccgtccgccaacgtccacgatagttcttcatttccctttctcgcttgtttcttcaacctttcaacatcgacttctctctgttctctcacgagcagtgctgataacgtattgtaactcagtggcaaacaagtgaacagaggaacagtgcaaatgacagttgtatatctttattgcagagattctggtttatatacatgtggatacagtgtctcccaaagggtgtgtcccttgggagaaaactgtcaggggagagggttgatcacatgacaatattttctaacacggatatggcgtggactcgctcagcagcgacgtggtactggaatccgtgcaagcatggatgcatggatttggatggattcatggatggatggatggatggcaaggtcacagccgggaaaagctgctccgatcgcatcttttttcagggagaaactgggaacggccgctgctgctttcgtacaagactttcagatctcgatttcgaattttcttttgtcactaatgtag

SEQ ID NO: 77808 - DNA, 337 bp, Zea Mays
cacaaataagtctgtatttttcataataaaaacagataagtatgtacaattacaaatatcatcagcagtctaaatattcaaatttagacaataaatactgattgaaactatgatctaaacaatcatagagtcttgtacttaattttacagaaattcaatgaaaaactagtcagcttaggctagcagtcgaaacaggcccaggcggctgccagaggcggtccattttggcctggtcgctcaacatgggggcaaaaaaaagggaggggcacatgggccttgaaggcggcctcataaggagcggcagttagggttatgaagtcctaaccggccactacca

SEQ ID NO: 77809 - DNA, 296 bp, Zea Mays
gcctgttatggcattgtactttggtccatttcggacctttctctctttcaatataatgatgcgcagttctcctgcgtgttcaagaaaaaaaatgttggtttgtattgtataaaaaaaccttatgtcatatataaaaaccatagcgatgcacgagccattgttttcaggccgggcgaccaactggtcgttccagaggaccgactaggtgtctaatcgcgattagggcgacgattaggacacctaatcggtcctcttggacctctggtcgtcccctaatcgtcctatatattttggac

SEQ ID NO: 77810 - DNA, 2911 bp, Zea Mays
ctcctttctcccgtccccgcacaaaaacatttgccccccacccggccacccctcccgagtcccgactgctactgccgctgcctcctctccctttccgcctgccttcgctctcctcgtcgtctcctccgtctagggttctccaccccacccgccccgccgccgcccgatccgaggcagatgccgcccgcagccatggcgctgccgtcccaggccccgtctaactcaggggatccgctgtacccggagctctggcgcgcctgcgccggcccgctcgtcaccgtcccccgcgtcggcgacctcgtcttctacttcccccagggacacatcgagcaggtggaggcgtccatgaaccaggttgccgggaacccgatgcgtctctacgatctgccttccaagctgctctgccgcgtgctcaacgtcgagctgaagggcaacccaggaggcatctccttcagagtggttggagtgtttttgtcagttccaaaaggcttgttgctggagacgccttcattttcctcagaggagaaaacggtgaacttcgagttggtgttaggcgcgctatgaggcagttgtctaatgtaccttcttcggttatatctagccaaagcatgcatctcggggttcttgcgactgcatggcacgctattaacacaaagtccatgttcactgtctactacaaacctaggacgagcccttcagagttcatcattccatatgatcaatatatggagtcagtaaaaaacaattattctattgggatgagattcaggatgaggtttgaaggggaagaggcccccgagcagaggtttactggtacaatagttggctgtgaaaatcttgacccactatggcctgattccagttggagatacttgaaggtgcgctgggatgagccttctactatcccgcggccagataaggtctctccctggaagatagagcctgcttcatcacctcctgttaatcctctccctctttctagaggaaaaagacctagacaaaatgcacctccaccttcccctgaatcatctgttctcacaaaagaaggtgcaaccaagattgatactgattctgctcaaacaccacatcaaaattcggtcttgcaaagtcaagagcagatgagctttaggaacaacctgactgaaagcaccgactctgattccactgttcagaagcagatgatgtggtccccatcacccaatgggaaagttcacactaattttcagccgagacctgctatggataactggatgccattgggaaggcgtgaaactgacttcaaggacacccgttctgccttcaaggatgcccgcaccgcttctcaatcgtttggagatacacaggggttctttatgcaagcttatgatgacagtcgtcaccgtctttctttcaacaatcagtttcaagatcagggttcagctcatcgctttgcagatccatacttctatatgcctcaacaaccttctctgacggttgaatcaggcacaaggacgcaaacagcgaacaatgacttgcgtttttggagtgagcggaattcgatgtatggtaatccaagtgaccaacagcagggtttcagctttgggcaaaacacatcaagttggttgaaccagccacttccccaggttgaacagtcacgagtggtcaggccgcatgcaacggttgctccatttgatttagagaagactagagaaggcagtgggttcaaaatatttggtttccaagttgatacaaccaatccatcacctgtccaattgagctctccattgtctgctatccgagagcatgtggtacaaactcgaccatcggcaccagtgaatgaattgcaacctgtgcaaattgagtgcttgcctgaggtgtccgtaagcacagctggaactgcagctgagaacattcagcaagtccagcaaagttcgaaagatattcaaagcaagtcccagggcgcttcaacaaggagctgtacaaaggttcataagcaaggagttgcgcttggccggtccgtggacctctctaaattcaccgactacggtgagctcaaagcggaactagacaagatgtttgagttcgagggcgaattggtatctgctaaccggaactggcagatcgtttataccgacaacgagggtgatatgatgcttgtcggagatgacccgtgggatccattgcttacgagcagggagttctgcaacatagtgcgcaagatctacatctacacgaaggaggaggtccagaagatgaactcgaaatcatccgtgccgaggaaggaggaacccccagcagcaggcgaaggctgcgccgccgccgccgcaaacgagtaggatgtctgcctgcactgcagcaagcagttttagatgactaggtcgtgtggaggaagccgacgatgatgcatgcgtgatgaacccgttccttgtgcaggaggtggtgccagcccgggtcccagggaagtaaaaactcctgagatcttttgcttgtccgttgcagccccatcccccgtccgtttgggttttagttgggaacgtagaaactactgtctccgcctgcttctccgaagctcgctgttggtagcaagttttattgctagtattattgttattgctgatttgctcccctctgcctttgcgatgtaaatatttgtgtacccagccccagccccagccccagccccagcttgtagtgagcagtaacaagcagtagcggtaccttcggtattaaccggcagctagctatttcgcggcattttaatccctgtaagcgtagctctgtggcgtgagatagatgacaaacactgggtatatgtatgtctgatctttctcactgaatgtaccataagagagtttgtagagtacctgacctgtgaccaaccccgttcctgtcagctctctggtctcagcaacacgctgtgtgatgccgcata

SEQ ID NO: 77811 - DNA, 2592 bp, Zea Mays
ctgctctcctttctcccgtccccgcacaaaaacatttgccccccacccggccacccctcccgagtcccgactgctactgccgctgcctcctctccctttccgcctgccttcgctctcctcgtcgtctcctccgtctagggttctccaccccacccgccccgccgccgcccgatccgaggcagatgccgcccgcagccatggcgctgccgtcccaggccccgtctaactcaggggatccgctgtacccggagctctggcgcgcctgcgccggcccgctcgtcaccgtcccccgcgtcggcgacctcgtcttctacttcccccagggacacatcgagcaggtggaggcgtccatgaaccaggttgccgggaacccgatgcgtctctacgatctgccttccaagctgctctgccgcgtgctcaacgtcgagctgaaggcggagaccgacaccgacgaggtgtacgcgcagatcatgctcatgccggagcccgagcaaaacgatgtggctgccgagaagacgagctctgggtctgctgcgccaccgaggccagcggtcaggtcattctgcaagacgctcaccgcctccgacaccagcacacacggcggcttctctgtcctgcgccgccacgctgacgagtgcctccctgccctgtcgcctcccactcaggagctggtggcgaaggatctgcatggcatggagtggcgattccgccacatcttccgcgggcaacccaggaggcatctccttcagagtggttggagtgtttttgtcagttccaaaaggcttgttgctggagacgccttcattttcctcagaggagaaaacggtgaacttcgagttggtgttaggcgcgctatgaggcagttgtctaatgtaccttcttcggttatatctagccaaagcatgcatctcggggttcttgcgactgcatggcacgctattaacacaaagtccatgttcactgtctactacaaacctaggacgagcccttcagagttcatcattccatatgatcaatatatggagtcagtaaaaaacaattattctattgggatgagattcaggatgaggtttgaaggggaagaggcccccgagcagaggtttactggtacaatagttggctgtgaaaatcttgacccactatggcctgattccagttggagatacttgaaggtgcgctgggatgagccttctactatcccgcggccagataaggtctctccctggaagatagagcctgcttcatcacctcctgttaatcctctccctctttctagaggaaaaagacctagacaaaatgcacctccaccttcccctgaatcatctgttctcacaaaagaaggtgcaaccaagattgatactgattctgctcaaacaccacatcaaaattcggtcttgcaaagtcaagagcagatgagctttaggaacaacctgactgaaagcaccgactctgattccactgttcagaagcagatgatgtggtccccatcacccaatgggaaagttcacactaattttcagccgagacctgctatggataactggatgccattgggaaggcgtgaaactgacttcaaggacacccgttctgccttcaaggatgcccgcaccgcttctcaatcgtttggagatacacaggggttctttatgcaagcttatgatgacagtcgtcaccgtctttctttcaacaatcagtttcaagatcagggttcagctcatcgctttgcagatccatacttctatatgcctcaacaaccttctctgacggttgaatcaggcacaaggacgcaaacagcgaacaatgacttgcgtttttggagtgagcggaattcgatgtatggtaatccaagtgaccaacagcagggtttcagctttgggcaaaacacatcaagttggttgaaccagccacttccccaggttgaacagtcacgagtggtcaggccgcatgcaacggttgctccatttgatttagagaagactagagaaggcagtgggttcaaaatatttggtttccaagttgatacaaccaatccatcacctgtccaattgagctctccattgtctgctatccgagagcatgtggtacaaactcgaccatcggcaccagtgaatgaattgcaacctgtgcaaattgagtgcttgcctgaggtgtccgtaagcacagctggaactgcagctgagaacattcagcaagtccagcaaagttcgaaagatattcaaagcaagtcccagggcgcttcaacaaggagctgtacaaaggtattgtttttttccgtttttatgaccatgcacttgtctatattcaatgtgcatgtgattgggaatatattatcagctattggctcattcggttattgaaacaaaatgacctcttcagatattgctgtgtggttccgaaatcctggtggtttggttcctaattgtctgaatgcagactggtcgttgagttcatgactcaaatctgtggttttcaccgacactgatcgaatctgccaataatcgtttgatgtgttctctatgttgcctaaaatcgcatctccatttggcagaattcaaaaaagaagaagaaaagaaacagaaacaaaacaataaa

SEQ ID NO: 77812 - DNA, 245 bp, Zea Mays
cggaagtccttggccgcctgggtataaaaccgtgtgctgggctcctgtcttccacccagctgcaacttgaacaaccggcgtcaatcatcgtcgattgcttctacaccacggtggtctggtgggtcgctgcgtgggcttgccagtagtccgacgcccactcatgcgggattgggagctttcgtcaagtacctccggaagccatcagcctgaccgccgtgaggacacatgtcatttgaagatcatcc

SEQ ID NO: 77813 - DNA, 1948 bp, Zea Mays
gatccgtccctgcttggggccctgagcaggaatagtataagccctcagccccctcacggctgggcaccagacggtacaagccttcagcgcacctcgctaggcgagtcgcctccggggtgcctggacgactaggcgatagttacgcgaccaactggttcacaacattgcgcaaaacaaagcagagcatagcatcacagttcacagcagcgcgcggaggcaaggcgcacaacagcgtgcggtggcgcggcgtgcagagcagccgcgcgagcgaagctagtagcgccgcacggaatcgcagagaaggaagtggggagggttaccggcgtcgacgagcgagcaggctctagactggtttgtgacgatatctctggagggcaagaaaacattccgattcctgccactaacttggttgatgatccacctgttcctccatctggtttcacatacttgaagtctctaaaaattccaaaggacatcaagatcccatctagtattattggctgtgattgtgaaggagattgtgctagcaacaaaaattgttcatgtgctcagcgcaatggttctgatctgccttatgtatcatataagaacattggcaggttggtggagcccaaagcagttgtatttgaatgcggggctaactgcagctgcaaccatgattgtgtaaacagaacatctcaacagggtttgcagtatcacttagaggtatttaagacagcttcaaaaggttggggagtcaggacttgggacactatcctccctggggctcccatctgtgagtacacgggggtgttgaggaggactgaagatctggatggttcacagaacaactattgttttgacattgattgtcttcaaaccatgaaaggtttggatggaagggagaaaagagctggatctgaaatgcacctgcctaatctttatccagagaatgactcagatgcaccacctgcacctgagtactgcatagacggcagttccattggcaattttgcaagatttataaatcatagttgccaacctaaccttttcgtccagtgcgtcatgagctcacacaacgatgttaaactagcaaaagtgatgctttttgctgctgacacaatacttcctcttcaggagctatcctatgactacggttatcgcttggacagtgttgttgggcctgatggtaaaattgtgaagctgccatgccactgtggtgctccagattgccggaagcgcctctactagacctgcagtgtgtttccattttgattttgcaggaaacaacctatattgtaggaaagcattcatgttatttatgtagttggcatgctctgatatatagcgaaagaggagcaacttaatctccttttagagcattcttattttgtgataattggaggacatgctggtcatggtagcatattttgcaggaaatcaattaactgatatgtctgggcatggatctatgttttttctattatgtgctgtcgtgtttttttaatcaatggatactacattactgttatggccactgaattgatacaatgttatcgatttatatagcattttctcctgttaaaataggtactgccgactcatgaatctaactgaaataatgtgatctctacccacctgccctgtctcctgcgatctgtgaagaatctgtctactactctgaaacatcgatgaacatgccgaaatgttgtcgttgtgccgtgagccgtggtgtggcgatggctggatcactctcgcttttgctagtgcgtgcgctgagcttttctatctttctgaaagggcacctcgccgtcgccgcagcgatcggctcctggcccctctccctctcgccgctatgattagcgatcggttattggtccttgcttttaccgacaatctgaatctacccctgctctgttcatctggactgtatcctgtgggatcatgctagtgctactgattagtattg

SEQ ID NO: 77814 - DNA, 2805 bp, Zea Mays
atgcgcggcgcgtaccctgtcctgcctactttgctctgctctcgacgctttgctctcctcccttccccacccgcccacccggacttggttcttccgccattcccgttatcgcggagcgcaggtgctcctcgtcttctgcggcggcatcgagaggctggtggatggcgaatatggattcggttgttgtgatggaggtggcgccggtgccgatcccgacgttcatggacgccactcccctgaaccccccactgccgcttgtggtggaggagctcgtgctgcgccgcagtgctcgttacctcaacaggccaacccggcctaactacgcggaccaggagcctccaaaaaaccccggcggccggggccggggcaagcgaaagagggatgaggagaagccggagctggcggcgcagcagggtaccaagaccccaggcaggaatgactccaatgttgaggcgggtgagaggaagccgatgcccgtgactgcggcggtgccggcctgttgcgctggcgttgctgcggaagacgatgcgacgccgactgggaagagcgccaagctgagggtgaaggagacactgagggcgttcaacagccactacctccactttgtccaggaggagcagaaaagagctcaggctgcgatacaggagattgaggctaagggtggcctcaaacgtcagaccaaggggggtaaaaagaagagcagtaagcaagaggctgaagctgaggagaaagagaaacgcccatcaaagcgacctgacctgaaggcaatcaccaagaaggagtatgccaacttaactttcccattggccacatgtattgtaatgtcggggatatatgaagatgatctagacaaggctgatgaaattatttatactggtcaaggaggaaatgatttacttggtaaccaccgccaaattggctctcaacagttgaaacgtgggaatttagcattgaagaatagcaggaagaatggtaatcctgtccgagttattcgaggtcatttatcaaagaatagctatactggaaaggtctacacctacgatgggctttacaaggttgtagatgactgggtgcagaacggtgtgcaaggccatgttgttttcaaatttaagttgaagcggcttgagggtcagccatcattgacaacttctgaggtgcgatttactcgtgcagaagctccgacaactatttctgaattacctggactggtttgtgacgatatctctggagggcaagaaaacattccgattcctgccactaacttggttgatgatccacctgttcctccatctggtttcacatacttgaagtctctaaaaattccaaaggacatcaagatcccatctagtattattggctgtgattgtgaaggagattgtgctagcaacaaaaattgttcatgtgctcagcgcaatggttctgatctgccttatgtatcatataagaacattggcaggttggtggagcccaaagcagttgtatttgaatgcggggctaactgcagctgcaaccatgattgtgtaaacagaacatctcaacagggtttgcagtatcacttagaggtatttaagacagcttcaaaaggttggggagtcaggacttgggacactatcctccctggggctcccatctgtgagtacacgggggtgttgaggaggactgaagatctggatggttcacagaacaactattgttttgacattgattgtcttcaaaccatgaaaggtttggatggaagggagaaaagagctggatctgaaatgcacctgcctaatctttatccagagaatgactcagatgcaccacctgcacctgagtactgcatagacggcagttccattggcaattttgcaagatttataaatcatagttgccaacctaaccttttcgtccagtgcgtcatgagctcacacaacgatgttaaactagcaaaagtgatgctttttgctgctgacacaatacttcctcttcaggagctatcctatgactacggttatcgcttggacagtgttgttgggcctgatggtaaaattgtgaagctgccatgccactgtggtgctccagattgccggaagcgcctctactagacctgcagtgtgtttccattttgattttgcaggaaacaacctatattgtaggaaagcattcatgttatttatgtagttggcatgctctgatatatagcgaaagaggagcaacttaatctccttttagagcattcttattttgtgataattggaggacatgctggtcatggtagcatattttgcaggaaatcaattaactgatatgtctgggcatggatctatgttttttctattatgtgctgtcgtgtttttttaatcaatggatactacattactgttatggccactgaattgatacaatgttatcgatttatatagcattttctcctgttaaaataggtactgccgactcatgaatctaactgaaataatgtgatctctacccacctgccctgtctcctgcgatctgtgaagaatctgtctactactctgaaacatcgatgaacatgccgaaatgttgtcgttgtgccgtgagccgtggtgtggcgatggctggatcactctcgcttttgctagtgcgtgcgctgagcttttctatctttctgaaagggcacctcgccgtcgccgcagcgatcggctcctggcccctctccctctcgccgctatgattagcgatcggttattggtccttgcttttaccgacaatctgaatctacccctgctctgttcatctggactgtatcctgtgggatcatgctagtgctactgattagtattg

SEQ ID NO: 77815 - DNA, 3108 bp, Zea Mays
ctcgcctaaaattcaaacacgcccgggcaaacacgcccagcccagcacgccgtgtcgccgtggcagactggcagtgcacatacgccccaacacccaggggcagtatcgtcatcttgctacagctagatagggccgaggatgcgcggcgcgtaccctgtcctgcctactttgctctgctctcgacgctttgctctcctcccttccccacccgcccacccggacttggttcttccgccattcccgttatcgcggagcgcaggtgctcctcgtcttctgcggcggcatcgagaggctggtggatggcgaatatggattcggttgttgtgatggaggtggcgccggtgccgatcccgacgttcatggacgccactcccctgaaccccccactgccgcttgtggtggaggagctcgtgctgcgccgcagtgctcgttacctcaacaggccaacccggcctaactacgcggaccaggagcctccaaaaaaccccggcggccggggccggggcaagcgaaagagggatgaggagaagccggagctggcggcgcagcagggtaccaagaccccaggcaggaatgactccaatgttgaggcgggtgagaggaagccgatgcccgtgactgcggcggtgccggcctgttgcgctggcgttgctgcggaagacgatgcgacgccgactgggaagagcgccaagctgagggtgaaggagacactgagggcgttcaacagccactacctccactttgtccaggaggagcagaaaagagctcaggctgcgatacaggagattgaggctaagggtggcctcaaacgtcagaccaaggggggtaaaaagaagagcagtaagcaagaggctgaagctgaggagaaagagaaacgcccatcaaagcgacctgacctgaaggcaatcaccaagatgcaagaaatgaatgccgtgctttatcaggagaagacgattgggcatctaccagggctcgatgtcggagatcagttttattctcgcgctgaaatggtagtgttgggcatccacagccattggctcaatggcattgactatatggggatgaaataccaaggaaagaaggagtatgccaacttaactttcccattggccacatgtattgtaatgtcggggatatatgaagatgatctagacaaggctgatgaaattatttatactggtcaaggaggaaatgatttacttggtaaccaccgccaaattggctctcaacagttgaaacgtgggaatttagcattgaagaatagcaggaagaatggtaatcctgtccgagttattcgaggtcatttatcaaagaatagctatactggaaaggtctacacctacgatgggctttacaaggttgtagatgactgggtgcagaacggtgtgcaaggccatgttgttttcaaatttaagttgaagcggcttgagggtcagccatcattgacaacttctgaggtgcgatttactcgtgcagaagctccgacaactatttctgaattacctggactggtttgtgacgatatctctggagggcaagaaaacattccgattcctgccactaacttggttgatgatccacctgttcctccatctggtttcacatacttgaagtctctaaaaattccaaaggacatcaagatcccatctagtattattggctgtgattgtgaaggagattgtgctagcaacaaaaattgttcatgtgctcagcgcaatggttctgatctgccttatgtatcatataagaacattggcaggttggtggagcccaaagcagttgtatttgaatgcggggctaactgcagctgcaaccatgattgtgtaaacagaacatctcaacagggtttgcagtatcacttagaggtatttaagacagcttcaaaaggttggggagtcaggacttgggacactatcctccctggggctcccatctgtgagtacacgggggtgttgaggaggactgaagatctggatggttcacagaacaactattgttttgacattgattgtcttcaaaccatgaaaggtttggatggaagggagaaaagagctggatctgaaatgcacctgcctaatctttatccagagaatgactcagatgcaccacctgcacctgagtactgcatagacggcagttccattggcaattttgcaagatttataaatcatagttgccaacctaaccttttcgtccagtgcgtcatgagctcacacaacgatgttaaactagcaaaagtgatgctttttgctgctgacacaatacttcctcttcaggagctatcctatgactacggttatcgcttggacagtgttgttgggcctgatggtaaaattgtgaagctgccatgccactgtggtgctccagattgccggaagcgcctctactagacctgcagtgtgtttccattttgattttgcaggaaacaacctatattgtaggaaagcattcatgttatttatgtagttggcatgctctgatatatagcgaaagaggagcaacttaatctccttttagagcattcttattttgtgataattggaggacatgctggtcatggtagcatattttgcaggaaatcaattaactgatatgtctgggcatggatctatgttttttctattatgtgctgtcgtgtttttttaatcaatggatactacattactgttatggccactgaattgatacaatgttatcgatttatatagcattttctcctgttaaaataggtactgccgactcatgaatctaactgaaataatgtgatctctacccacctgccctgtctcctgcgatctgtgaagaatctgtctactactctgaaacatcgatgaacatgccgaaatgttgtcgttgtgccgtgagccgtggtgtggcgatggctggatcactctcgcttttgctagtgcgtgcgctgagcttttctatctttctgaaagggcacctcgccgtcgccgcagcgatcggctcctggcccctctccctctcgccgctatgattagcgatcggttattggtccttgcttttaccgacaatctgaatctacccctgctctgttcatctggactgtatcctgtgggatcatgctagtgctactgattagtattg

SEQ ID NO: 77816 - DNA, 1088 bp, Zea Mays
ttaacatatcctcgcggctccccgatcgccgccaccgctttaccccactctgctgctgttgttatgataacaactcgcacccccactctcagcaccgcagcctcactcctgctcacccaccggcaccgcatcctcgccgcccggaccctctctgtctctgtctccgccgcggcgggctcctcctccatccccgtcaaggtgctgtgggacaagcagctgaagacggtggtgaacaacgagagctccgagatcatccggatgctcaacgccgagttcaacggcatcgccaggaaccccgggctggacctctacccggcccacctccgggcctccatcgacgaggccaacgagctggtctacgacgccatcaacaacggcgtctacaagtgcggcttcgccaagaagcaggggccgtacgacgaggccgtgacgagattgtacgaggctctggacagatgcgaggagattcttggcaagcggcgctatatttgtggcgaccagctgactgaggcggacattcgcctgttcgtgactctcattcggttcgatgaggtctacgccgttcacttcaagtgcaacaagaagctgctgagggagtacccaaacctgttcaactacaccaaggacatataccagatccccggcatcagcagcaccgtcaacatggaacacatcaggaagcactactacggaagccatccgtccataaacccatacgggattatccccgctggacccaacatcgactacaatgccccacatgacagggagaggttcagcgcctgactgcgcgtgggaccttgttgcttcctttctctctctctctctctctctcttttctgcaggagccgtgtgcagtgttgttgtgcttcatgagggtcttgtgcttggccgtgtcagaggctgcaagaatccctactgtactttttttcttcttctgagcagttgaagatggaagacaaggttttatttcgcacagataaataaaaggtacaaagggtcgtcgattttatacgaaggcctcgtttggcacagtagcaccgaacgtggtgttttctttctttccttccttatgacatcccttcaaa

SEQ ID NO: 77817 - DNA, 1529 bp, Zea Mays
ttcactgtcactccgccgggcgctggccgatcagggtcaccttctccaaagaatacacatggaagaatgatcgatttaaccgccgctgttactgatccgtccaggagcgatataagtcagaagatgattatccctatccgcctccgcttaccttagatgtctccgagatccaaaaacaagaacaagagcgagcagagcgtggcgacaaatcacccgctgccttttatcccgcaaccagcagcagcgaaggccgcgagaggcaggtagtagccgcacgccacatcaacccaccacggatggccggcggcggcgaccgtgacgcatccgacgcggagctccgcgcggggttcgagaccctggccgtgacgcggccggacccttccgcgggggtctacgaggtccgcctcaaccgcccggcgcagcgcaacgcgctgagcccggccgcgttcgcggagatcccgcgcgccatgtctctgctggaccgcgccccctcggcgcgcgccgtggtgctgtccgccgcgggcccgcacttctgcgcgggcatcgagctcgggggccccggggacccgctgtccgccgcctccgccgatcccgtggccgccgcggaggggctccgccgcgcggtcctcgacatgcaggcggcgctcacggccatcgagcggtgccggaagcccgtcgtcgcggcggtgcacggcgcctgcgtcggcggcggcgtcgacctcgtggccgcctgcgacatcaggtgctgctccagggacgcctccttcgtgctcaaggaggtggacatggccatcgtcgccgacctcggcgcgctgcagcgcctcccgcggatcgtcggctacggcaacgctgctgacctcgcgctcaccggacgcaagatcaacgccatggaggccaaggacatggggttggttaccagggtctttgattccaagcaagacttggatgcgggcgtcgcaaagatcgccaaagaaatagctgacaagtcggcatgggcggtgattggaaccaaggccgttctgctgagaagcagggatgcgaccatagaacaaggcctggagcatgtagccacatggaacgcgggtatgatgaggtcgaacgatctgaaggaggccatcagagccttcctggagaagcggaagcctgtgttctccaagctgtaatgatcagataccatcataccatacctctgtgttacttaacaagtggtgctacgtatctggaaatgcaaaggaataaagtgtgctaggagtagacaattgtcagggaaaaagaaaaaaaaaatgcctgttctcgatggagctgtgaaggcatttttccatgtcagttgagcttaccaaagttgttttggtcggtatggtggaacaggtaacaaaaccgtacaaactggaataggtactcaaaacagtactctctgtcctgaattagattcatatatatatgaataatttatctagaaacaaatctatctctatcaattttacaaggttaaatggtccaccaaacaatttatttttctcaaattctcc

SEQ ID NO: 77818 - DNA, 560 bp, Zea Mays
cattcctgcaaagcagccatgatgtcctccacgtcgacttttagcggcaagggaagcacagcacatgacccgggaagcccctccccagcgtctccaaaaggggtctgtgtcccttcctcgcgttctaggattgggtctctctctcattttcctgtggttctgtgttcagggatatctcaagtggattatttgaattcaattcttcgggagctacatctcagcatggcttgcatcagtttttattgtgattcccatgattgggagttggttggttaaaaattcgggacaagcaatttgccgaataaccattgctgcttctcctcaagctgaaatttgtttacaaattttatttggtgttccttggttgtttggtgggaaaaggaaccagagtcgagtctgaagttgtttaggttattagcgcttccatggcgactttttccctctcaacccctgctttttccagaagaaatcaggcctaccttctttttccactgcctcattcaattaatgttttttttgcgctacagactatagccatgtacatgaaacgaaaatcgtgc

SEQ ID NO: 77819 - DNA, 1946 bp, Zea Mays
cacgccaccgccttccgcttccccctcgcggtttgcggtcgccgatggcgtcccctgccctgagccttccataggttagctccgcaatgggccatcgtgatgttcaagaaagctcccggctctaaaacctcacatctttctacccccatcctcttgccccaatctaagaagcaaaaatcctgaggggaaaatctggtccgaaaattccatggattcgagcgatggggtgggcgacatggttcctagcgacgatgtgcttctttgctgcgggcatcctattcgtcccttatgctctcgattcccccctccggcataggctctgtcacctccgccaagctggctcatgtcctttcctttgccaccttctagaacaccgccctctggcccaccttcattagcgccatcataatgttcaggaacctatcgaggcacatgttcggcaacttgcagagcaactgttcctagcctacttcacgcttgcaggagatttggcaaaacattatggatatgagtgctaaccttggcaaatttgcagcatctttgaagaaaaagatggttgggttatgaatatagtcccttttacagaataaggaagctaaaaattatatatgatcgtggtttaatggggactgtccatgattgatgttgggcatataaatgtgaagaacaacaaatttttggacgcctcctcgcacttggcgggctaaatcgtgaaagagctaaatcgtgattttagtgtgaaaaagaacaaatggttagctctttacactaaaatcgtgatttacacctaaatcacgaagcgcacttggtgggacgtgaacaacaaatggttctcttgaaagagctaaatcgtgattttagtgtgaagcctcttgtcttgcatgtgctagccaatgtgttacaatggttgatggtgtgaaccatgatccatcagaatgttctatggattcaccttgctggcgagggacagcttctcgcctttctccatatttgatggtcttccaacatttgttgcacaaatagtgaaaccgaaattagatgcttttgatgcaagaaaggaacaaagctccagcactgattatggcgctacaactaaacttcaaaatttggtctgctgaaagagtacacaaaaccattcccaatcccatgttaaatagggtctatccaaagaacctgaagatattggtgaaaatatcacacaatattcctatgaaaaaagcaggttgtagaacatggtgaagtgaattccaatgcagacaaacactgtttagaagtgatagatgatcgcacaaagcgatctggcctaaaatctgatgttcctgatttttttccttagctgttatgaaatcaaataccagtgatggatcgtgttcttcatctggaccgaacatatcaagaattctgaaggcggtcggaggtactatgtaataattattctgatgaaattgagctagaggagcatgactacaacctcctccaatcagtaattgagaatcttcagacttggattcaagcaaggttctcctagctcatatctgcaacacgaaatggttgtatggcaaaactctagaatgtagaaaacattgtaaattacagctatcttgttccttccctgtccagtgagaaatgcagcttctgccagtgctgctacgagtgttcctttgcctaaatagtaaggtcatcgctagatcatgatgcttcattctaagaggtgctcgcgagcacctaggcttctccgcttctgatcatggttgtggaccttcctgtatgtcaatatccattggtcgttcccacaggcagtagtcgtcgagcccactggcgtgtatatagagatcatctgctgctaagaccttctggtcgtgaactgtgttgtttaattacttatgtaaccggcatattttgataaacatgacatataatatatttcgcaaggtgtccggttcctc

SEQ ID NO: 77820 - DNA, 1648 bp, Zea Mays
cacgccaccgccttccgcttccccctcgcggtttgcggtcgccgatggcgtcccctgccctgagccttccataggttagctccgcaatgggccatcgtgatgttcaagaaagctcccggctctaaaacctcacatctttctacccccatcctcttgccccaatctaagaagcaaaaatcctgaggggaaaatctggtccgaaaattccatggattcgagcgatggggtgggcgacatggttcctagcgacgatgtgcttctttgctgcgggcatcctattcgtcccttatgctctcgattcccccctccggcataggctctgtcacctccgccaagctggctcatgtcctttcctttgccaccttctagaacaccgccctctggcccaccttcattagcgccatcataatgttcaggaacctatcgaggcacatgttcggcaacttgcagagcaactgttcctagcctacttcacgcttgcaggagatttggcaaaacattatggatatgagtgctaaccttggcaaatttgcagcatctttgaagaaaaagatggttgggttatgaatatagtcccttttacagaataaggaagctaaaaattatatatgatcgtggtttaatggggactgtccatgattgatgttgggcatataaatgtgaagaacaacaaatttttggacgcctcctcgcacttggcgggctaaatcgtgaaagagctaaatcgtgattttagtgtgaaaaagaacaaatgttaaaggatcgtgttcttcatctggaccgaacatatcaagaattctgaaggcggtcggaggtactatgtaataattattctgatgaaattgagctagaggagcatgactacaacctcctccaatcagtaattgagaatcttcagacttggattcaagcaaggaaaatgggcccaccgaaacctgtcggggccgggcatcacccaatgggatgccacataaactgtcacagggaggtgggcacgaggcattcagttaggtcgcgttgtggactaattggtagtttgaaacagaggagattgccctttaatgtagtgatctgttatggatttatggagtttattaggctacttgccctttaatggacatatggtcaacctatattttatcttcatgctgcttgcattgttattgttgctcccttccattactttgtgactaacttcatttggtattcaaatcttataggttctcctagctcatatctgcaacacgaaatggttgtatggcaaaactctagaatgtagaaaacattgtaaattacagctatcttgttccttccctgtccagtgagaaatgcagcttctgccagtgctgctacgagtgttcctttgcctaaatagtaaggtcatcgctagatcatgatgcttcattctaagaggtgctcgcgagcacctaggcttctccgcttctgatcatggttgtggaccttcctgtatgtcaatatccattggtcgttcccacaggcagtagtcgtcgagcccactggcgtgtatatagagatcatctgctgctaagaccttctggtcgtgaactgtgttgtttaattacttatgtaaccggcatattttgataaacatgacatataatatatttcgcaaggtgtccggttcctc

SEQ ID NO: 77821 - DNA, 2131 bp, Zea Mays
cacgccaccgccttccgcttccccctcgcggtttgcggtcgccgatggcgtcccctgccctgagccttccataggttagctccgcaatgggccatcgtgatgttcaagaaagctcccggctctaaaacctcacatctttctacccccatcctcttgccccaatctaagaagcaaaaatcctgaggggaaaatctggtccgaaaattccatggattcgagcgatggggtgggcgacatggttcctagcgacgatgtgcttctttgctgcgggcatcctattcgtcccttatgctctcgattcccccctccggcataggctctgtcacctccgccaagctggctcatgtcctttcctttgccaccttctagaacaccgccctctggcccaccttcattagcgccatcataatgttcaggaacctatcgaggcacatgttcggcaacttgcagagcaactgttcctagcctacttcacgcttgcaggagatttggcaaaacattatggatatgagtgctaaccttggcaaatttgcagcatctttgaagaaaaagatggttgggttatgaatatagtcccttttacagaataaggaagctaaaaattatatatgatcgtggtttaatggggactgtccatgattgatgttgggcatataaatgtgaagaacaacaaatttttggacgcctcctcgcacttggcgggctaaatcgtgaaagagctaaatcgtgattttagtgtgaaaaagaacaaatggttagctctttacactaaaatcgtgatttacacctaaatcacgaagcgcacttggtgggacgtgaacaacaaatggttctcttgaaagagctaaatcgtgattttagtgtgaagcctcttgtcttgcatgtgctagccaatgtgttacaatggttgatggtgtgaaccatgatccatcagaatgttctatggattcaccttgctggcgagggacagcttctcgcctttctccatatttgatggtcttccaacatttgttgcacaaatagtgaaaccgaaattagatgcttttgatgcaagaaaggaacaaagctccagcactgattatggcgctacaactaaacttcaaaatttggtctgctgaaagagtacacaaaaccattcccaatcccatgttaaatagggtctatccaaagaacctgaagatattggtgaaaatatcacacaatattcctatgaaaaaagcaggttgtagaacatggtgaagtgaattccaatgcagacaaacactgtttagaagtgatagatgatcgcacaaagcgatctggcctaaaatctgatgttcctgatttttttccttagctgttatgaaatcaaataccagtgatggtgggtctagcactcaactcaaatcaaaatattctatatgattttacctggtgcacccttgtctcacattttttcattctttggcttatgcatgtaattggccaagttaaaggatcgtgttcttcatctggaccgaacatatcaagaattctgaaggcggtcggaggtactatgtaataattattctgatgaaattgagctagaggagcatgactacaacctcctccaatcagtaattgagaatcttcagacttggattcaagcaaggaaaatgggcccaccgaaacctgtcggggccgggcatcacccaatgggatgccacataaactgtcacagggaggttctcctagctcatatctgcaacacgaaatggttgtatggcaaaactctagaatgtagaaaacattgtaaattacagctatcttgttccttccctgtccagtgagaaatgcagcttctgccagtgctgctacgagtgttcctttgcctaaatagtaaggtcatcgctagatcatgatgcttcattctaagaggtgctcgcgagcacctaggcttctccgcttctgatcatggttgtggaccttcctgtatgtcaatatccattggtcgttcccacaggcagtagtcgtcgagcccactggcgtgtatatagagatcatctgctgctaagaccttctggtcgtgaactgtgttgtttaattacttatgtaaccggcatattttgataaacatgacatataatatatttcgcaaggtgtccggttcctc

SEQ ID NO: 77822 - DNA, 1343 bp, Zea Mays
cacgccaccgccttccgcttccccctcgcggtttgcggtcgccgatggcgtcccctgccctgagccttccataggttagctccgcaatgggccatcgtgatgttcaagaaagctcccggctctaaaacctcacatctttctacccccatcctcttgccccaatctaagaagcaaaaatcctgaggggaaaatctggtccgaaaattccatggattcgagcgatggggtgggcgacatggttcctagcgacgatgtgcttctttgctgcgggcatcctattcgtcccttatgctctcgattcccccctccggcataggctctgtcacctccgccaagctggctcatgtcctttcctttgccaccttctagaacaccgccctctggcccaccttcattagcgccatcataatgttcaggaacctatcgaggcacatgttcggcaacttgcagagcaactgttcctagcctacttcacgcttgcaggagatttggcaaaacattatggatatgagtgctaaccttggcaaatttgcagcatctttgaagaaaaagatggttgggttatgaatatagtcccttttacagaataaggaagctaaaaattatatatgatcgtggtttaatggggactgtccatgattgatgttgggcatataaatgtgaagaacaacaaatttttggacgcctcctcgcacttggcgggctaaatcgtgaaagagctaaatcgtgattttagtgtgaaaaagaacaaatgttaaaggatcgtgttcttcatctggaccgaacatatcaagaattctgaaggcggtcggaggtactatgtaataattattctgatgaaattgagctagaggagcatgactacaacctcctccaatcagtaattgagaatcttcagacttggattcaagcaaggttctcctagctcatatctgcaacacgaaatggttgtatggcaaaactctagaatgtagaaaacattgtaaattacagctatcttgttccttccctgtccagtgagaaatgcagcttctgccagtgctgctacgagtgttcctttgcctaaatagtaaggtcatcgctagatcatgatgcttcattctaagaggtgctcgcgagcacctaggcttctccgcttctgatcatggttgtggaccttcctgtatgtcaatatccattggtcgttcccacaggcagtagtcgtcgagcccactggcgtgtatatagagatcatctgctgctaagaccttctggtcgtgaactgtgttgtttaattacttatgtaaccggcatattttgataaacatgacatataatatatttcgcaaggtgtccggttcctc

SEQ ID NO: 77823 - DNA, 1899 bp, Zea Mays
cacgccaccgccttccgcttccccctcgcggtttgcggtcgccgatggcgtcccctgccctgagccttccataggttagctccgcaatgggccatcgtgatgttcaagaaagctcccggctctaaaacctcacatctttctacccccatcctcttgccccaatctaagaagcaaaaatcctgaggggaaaatctggtccgaaaattccatggattcgagcgatggggtgggcgacatggttcctagcgacgatgtgcttctttgctgcgggcatcctattcgtcccttatgctctcgattcccccctccggcataggctctgtcacctccgccaagctggctcatgtcctttcctttgccaccttctagaacaccgccctctggcccaccttcattagcgccatcataatgttcaggaacctatcgaggcacatgttcggcaacttgcagagcaactgttcctagcctacttcacgcttgcaggagatttggcaaaacattatggatatgagtgctaaccttggcaaatttgcagcatctttgaagaaaaagatggttgggttatgaatatagtcccttttacagaataaggaagctaaaaattatatatgatcgtggtttaatggggactgtccatgattgatgttgggcatataaatgtgaagaacaacaaatttttggacgcctcctcgcacttggcgggctaaatcgtgaaagagctaaatcgtgattttagtgtgaaaaagaacaaatggttagctctttacactaaaatcgtgatttacacctaaatcacgaagcgcacttggtgggacgtgaacaacaaatggttctcttgaaagagctaaatcgtgattttagtgtgaagcctcttgtcttgcatgtgctagccaatgtgttacaatggttgatggtgtgaaccatgatccatcagaatgttctatggattcaccttgctggcgagggacagcttctcgcctttctccatatttgatggtcttccaacatttgttgcacaaatagtgaaaccgaaattagatgcttttgatgcaagaaaggaacaaagctccagcactgattatggcgctacaactaaacttcaaaatttggtctgctgaaagagtacacaaaaccattcccaatcccatgttaaatagggtctatccaaagaacctgaagatattggtgaaaatatcacacaatattcctatgaaaaaagcaggttgtagaacatggtgaagtgaattccaatgcagacaaacactgtttagaagtgatagatgatcgcacaaagcgatctggcctaaaatctgatgttcctgatttttttccttagctgttatgaaatcaaataccagtgatggtgggtctagcactcaactcaaatcaaaatattctatatgattttacctggtgcacccttgtctcacattttttcattctttggcttatgcatgtaattggccaagttaaaggatcgtgttcttcatctggaccgaacatatcaagaattctgaaggcggtcggaggtactatgtaataattattctgatgaaattgagctagaggagcatgactacaacctcctccaatcagtaattgagaatcttcagacttggattcaagcaaggtcatcgctagatcatgatgcttcattctaagaggtgctcgcgagcacctaggcttctccgcttctgatcatggttgtggaccttcctgtatgtcaatatccattggtcgttcccacaggcagtagtcgtcgagcccactggcgtgtatatagagatcatctgctgctaagaccttctggtcgtgaactgtgttgtttaattacttatgtaaccggcatattttgataaacatgacatataatatatttcgcaaggtgtccggttcctc

SEQ ID NO: 77824 - DNA, 1184 bp, Zea Mays
cacgccaccgccttccgcttccccctcgcggtttgcggtcgccgatggcgtcccctgccctgagccttccataggttagctccgcaatgggccatcgtgatgttcaagaaagctcccggctctaaaacctcacatctttctacccccatcctcttgccccaatctaagaagcaaaaatcctgaggggaaaatctggtccgaaaattccatggattcgagcgatggggtgggcgacatggttcctagcgacgatgtgcttctttgctgcgggcatcctattcgtcccttatgctctcgattcccccctccggcataggctctgtcacctccgccaagctggctcatgtcctttcctttgccaccttctagaacaccgccctctggcccaccttcattagcgccatcataatgttcaggaacctatcgaggcacatgttcggcaacttgcagagcaactgttcctagcctacttcacgcttgcaggagatttggcaaaacattatggatatgagtgctaaccttggcaaatttgcagcatctttgaagaaaaagatggttgggttatgaatatagtcccttttacagaataaggaagctaaaaattatatatgatcgtggtttaatggggactgtccatgattgatgttgggcatataaatgtgaagaacaacaaatttttggacgcctcctcgcacttggcgggctaaatcgtgaaagagctaaatcgtgattttagtgtgaaaaagaacaaatgttaaaggatcgtgttcttcatctggaccgaacatatcaagaattctgaaggcggtcggaggtactatgtaataattattctgatgaaattgagctagaggagcatgactacaacctcctccaatcagtaattgagaatcttcagacttggattcaagcaaggtcatcgctagatcatgatgcttcattctaagaggtgctcgcgagcacctaggcttctccgcttctgatcatggttgtggaccttcctgtatgtcaatatccattggtcgttcccacaggcagtagtcgtcgagcccactggcgtgtatatagagatcatctgctgctaagaccttctggtcgtgaactgtgttgtttaattacttatgtaaccggcatattttgataaacatgacatataatatatttcgcaaggtgtccggttcctc

SEQ ID NO: 77825 - DNA, 2350 bp, Zea Mays
gctaccaagcgccatacaccgaccgccgcgctccagtttagtgcgtcgcaagccttagccggccggatcgggatcccctgcagtactgcatgggctactgccgcgtgggctccgcgtgcgacagggcccacgcgcagtgacccaactgcacggtgcagtacgtcagaggatccgtgtcccggccggccgggacggcgtgcgcaatgcgcgcggcagctactagtaaatactctccctgcgccgcttttcgctgctgcagtgctggcgactggcgtgctgcgtgcctgcggggatactccgtctcctccacctccagtcctcctccacgatcccgcctcccccacctctcgccggccgacgacgacgacgatccgccggcagcagcccgcgcgccgcagatctcccgttcggttccttggagccgacaagacgagggcagcatgaagcccacggccggcgccagcggcaagggcggcgccgtgtatccttctctgccgcggctcaagtgccaggagtgccgccgtgccctcgtcgtcgtcggggtcgagtcctacgccgacaggctacccgcacacgccgcgcccggtaatcatgcatcttctgttcaggacagtgttatgggtgcaagcaagatggacaattcttatgttgtgctatcgaggcagaacaaagttcagggtcctagaattcccccacgcccaggaagtgcggtggcggcacatactgatcccaaccaatcaacaagagcgatagaggggtcatatatagtgctaccacctccttccgcttccatatacaagaaatctgcctctgaaggaggtggtgcgcagctcacaccaccaggtggaaactccagtagtcccttgtcgggaaacaattctgggtttcactctagtgtaactgtgctgaaaagggcttttgaggttgctagctcacaaactcagcaggaaccctacaacatcctcagtgaaacagattttcaaaaggagaaacaaaagattgaggaagaggaaaagaaacttaaatgtgctattgaagaagctgaaaagcaatattctgaagttagttctgagatgaaagatcttgaaataaagtctaaacaatttgaggaattggaagagcggtactggcatgaattcaacagttttcagtttcagttgacatctcatcaggaagaaagagacgcagtttttgccaagataggagtttctcaggttcatttggaaatgttgaagcatactaatgttctcaatgatgcattctatatttcatgtgatgaagtaattgcaagaataaataactttcgcctcggacgccttcctaatgtagaggttgagtgggatgagataaatgttgcgtggggtcaggctgcacttctgttgcataccatggcccattatttcactccaaaattccgataccggatcaagattcaccctatgggaagctatccaagagtcacagacatccacaatcatacatatgaactgtttggtcccgtgaatttgttctggagcacccgatttgacaaagccatgacatggtttctgacttgcctgcaagagttcgctgagtttgccataagtctggataaggagaacaatgttccacctgaaaaaacactgaagcttccccacaagatcgatggtgacaaagtagggaaccacacgatcgtcctaagtttcaatcaggatgaaacctggaccaaggcgctcaagtacatgctgtacgatctgaagtttgttctctcctggtttattggcaatacaagttttgcgccaccttcgagatcactgcacacccaatttctgaagaacaagagttgatgttgttctctctctctctctctctctctctctctctctctctctctctctctctctctctctctctctctctctctctaagggcatgtttgggagcaagaaggggattttagccccttctccaatcctttggcttagtaaccaggttcccggatcgatgggatcgaggaacgggaacgtggtacgcggtacgctacaaaaagtaggatttaacactaccggaacgagattgttcccacgttcccggaacgaggaacgtggccaagttcccagttcccggttgttcccggaacgaggaacgtggccaagttcccagttcccggttactaagtcctttggtcccaaacatgtcgtgactgtacatagtttatatacttgaccctagctagccgttggatgtaaccgtagtgacaatgacgacatgtttgatgtacatatgtttactgtactatctaaagctcagcgactccattttcgctgcgctctttaaaaacctctgctgcgctcttattcttggcagccac

SEQ ID NO: 77826 - DNA, 2617 bp, Zea Mays
gctaccaagcgccatacaccgaccgccgcgctccagtttagtgcgtcgcaagccttagccggccggatcgggatcccctgcagtactgcatgggctactgccgcgtgggctccgcgtgcgacagggcccacgcgcagtgacccaactgcacggtgcagtacgtcagaggatccgtgtcccggccggccgggacggcgtgcgcaatgcgcgcggcagctactagtaaatactctccctgcgccgcttttcgctgctgcagtgctggcgactggcgtgctgcgtgcctgcggggatactccgtctcctccacctccagtcctcctccacgatcccgcctcccccacctctcgccggccgacgacgacgacgatccgccggcagcagcccgcgcgccgcagatctcccgttcggttccttggagccgacaagacgagggcagcatgaagcccacggccggcgccagcggcaagggcggcgccgtgtatccttctctgccgcggctcaagtgccaggagtgccgccgtgccctcgtcgtcgtcggggtcgagtcctacgccgacaggctacccgcacacgccgcgcccggtaatcatgcatcttctgttcaggacagtgttatgggtgcaagcaagatggacaattcttatgttgtgctatcgaggcagaacaaagttcagggtcctagaattcccccacgcccaggaagtgcggtggcggcacatactgatcccaaccaatcaacaagagcgatagaggggtcatatatagtgctaccacctccttccgcttccatatacaagaaatctgcctctgaaggaggtggtgcgcagctcacaccaccaggtggaaactccagtagtcccttgtcgggaaacaattctgggtttcactctagtgtaactgtgctgaaaagggcttttgaggttgctagctcacaaactcaggttgaacaaccactttgtctggaatgtatgagggttctttctgataagatggacaaggagattgaagattgtaatgctgatattaaatcttatgaggcttgtcttcaacgtttgcagcaggaaccctacaacatcctcagtgaaacagattttcaaaaggagaaacaaaagattgaggaagaggaaaagaaacttaaatgtgctattgaagaagctgaaaagcaatattctgaagttagttctgagatgaaagatcttgaaataaagtctaaacaatttgaggaattggaagagcggtactggcatgaattcaacagttttcagtttcagttgacatctcatcaggaagaaagagacgcagtttttgccaagataggagtttctcaggttcatttggaaatgttgaagcatactaatgttctcaatgatgcattctatatttcatgtgatgaagtaattgcaagaataaataactttcgcctcggacgccttcctaatgtagaggttgagtgggatgagataaatgttgcgtggggtcaggctgcacttctgttgcataccatggcccattatttcactccaaaattccggtatccttttgttttctcgcagcagctatagtgctcattctaagtgcatggtgttacttacaattctaactctattgaagtgcataaactgtgataattttaatagtaagcacaaaagaatttttttcttagaagaaatgttgcaatgcatttcttgaacattttcctagataccggatcaagattcaccctatgggaagctatccaagagtcacagacatccacaatcatacatatgaactgtttggtcccgtgaatttgttctggagcacccgatttgacaaagccatgacatggtttctgacttgcctgcaagagttcgctgagtttgccataagtctggataaggagaacaatgttccacctgaaaaaacactgaagcttccccacaaggaaccacacgatcgtcctaagtttcaatcaggatgaaacctggaccaaggcgctcaagtacatgctgtacgatctgaagtttgttctctcctggtttattggcaatacaagttttgcgccaccttcgagatcactgcacacccaatttctgaagaacaagagttgatgttgttctctctctctctctctctctctctctctctctctctctctctctctctctctctctctctctctctctctctaagggcatgtttgggagcaagaaggggattttagccccttctccaatcctttggcttagtaaccaggttcccggatcgatgggatcgaggaacgggaacgtggtacgcggtacgctacaaaaagtaggatttaacactaccggaacgagattgttcccacgttcccggaacgaggaacgtggccaagttcccagttcccggttgttcccggaacgaggaacgtggccaagttcccagttcccggttactaagtcctttggtcccaaacatgtcgtgactgtacatagtttatatacttgaccctagctagccgttggatgtaaccgtagtgacaatgacgacatgtttgatgtacatatgtttactgtactatctaaagctcagcgactccattttcgctgcgctctttaaaaacctctgctgcgctcttattcttggcagccac

SEQ ID NO: 77827 - DNA, 1819 bp, Zea Mays
gctaccaagcgccatacaccgaccgccgcgctccagtttagtgcgtcgcaagccttagccggccggatcgggatcccctgcagtactgcatgggctactgccgcgtgggctccgcgtgcgacagggcccacgcgcagtgacccaactgcacggtgcagtacgtcagaggatccgtgtcccggccggccgggacggcgtgcgcaatgcgcgcggcagctactagtaaatactctccctgcgccgcttttcgctgctgcagtgctggcgactggcgtgctgcgtgcctgcggggatactccgtctcctccacctccagtcctcctccacgatcccgcctcccccacctctcgccggccgacgacgacgacgatccgccggcagcagcccgcgcgccgcagatctcccgttcggttccttggagccgacaagacgagggcagcatgaagcccacggccggcgccagcggcaagggcggcgccgtgtatccttctctgccgcggctcaagtgccaggagtgccgccgtgccctcgtcgtcgtcggggtcgagtcctacgccgacaggctacccgcacacgccgcgcccggtaatcatgcatcttctgttcaggacagtgttatgggtgcaagcaagatggacaattcttatgttgtgctatcgaggcagaacaaagttcagggtcctagaattcccccacgcccaggaagtgcggtggcggcacatactgatcccaaccaatcaacaagagcgatagaggggtcatatatagtgctaccacctccttccgcttccatatacaagaaatctgcctctgaaggaggtggtgcgcagctcacaccaccaggtggaaactccagtagtcccttgtcgggaaacaattctgggtttcactctagtgtaactgtgctgaaaagggcttttgaggttgctagctcacaaactcaggttgaacaaccactttgtctggaatgtatgagggttctttctgataagatggacaaggagattgaagattgtaatgctgatattaaatcttatgaggcttgtcttcaacgtttgcagcaggaaccctacaacatcctcagtgaaacagattttcaaaaggagaaacaaaagattgaggaagaggaaaagaaacttaaatgtgctattgaagaagctgaaaagcaatattctgaagttagttctgagatgaaagatcttgaaataaagtctaaacaatttgaggaattggaagagcggtactggcatgaattcaacagttttcagtttcagttgacatctcatcaggaagaaagagacgcagtttttgccaagataggagtttctcaggttcatttggaaatgttgaagcatactaatgttctcaatgatgcattctatatttcatgtgatgaagtaattgcaagaataaataactttcgcctcggacgccttcctaatgtagaggttgagtgggatgagataaatgttgcgtggggtcaggctgcacttctgttgcataccatggcccattatttcactccaaaattccgataccggatcaagattcaccctatgggaagctatccaagagtcacagacatccacaatcatacatatgaactgtttggtcccgtgaatttgttctggagcacccgatttgacaaagccatgacatggtttctgacttgcctgcaagagttcgctgagtttgccataagtctggataaggagaacaatgttccacctgaaaaaacactgaagcttccccacaaccatacagttcggctgttttggagcgtatgctgtggttccttaagcgaagaaggcgagaccct

SEQ ID NO: 77828 - DNA, 1760 bp, Zea Mays
tagattttcttattcgccccttctctctccttctattttcagagagtcccctcgcctctgcctgcctgtcccatccccagtccaccaagcagcgcccgtcaccatctctccccatcccctttgccaccctcggtcttctccctcctcagggcaggcaggggaagcagaagaaggaagcgagagcacggagcctgatttggtttgctttttgttgcccagactcggagggagttggtgcctctgtgtctctgtgtgtgtggagatggaccccaagttccccccacccccaccgctaaacaaaacggagcccaccaccgcgacgaccaccaccacctcgaccgcgcagcagcagcagcagcagctggatcctaaggactaccagcagcagcagcagcagccggcgcagcacctgcaaatccaaatccaccagtcgcagcaggacggaggcggcggagggaaggagcagcagcagctgcaggtggtggcgcagcccggggagaggaggcagcaggcgctcgcgcccaagcggagctccaacaaggaccgacacaccaaggtcgacggcaggggccggcggatccggatgcccgcgctctgcgccgcgcggatcttccagctcacgcgggaactcggccacaagtccgacggcgagaccgtccagtggctgctgcagcaggccgagccggccatcgtcgccgccaccggcacgggcaccataccggcgtccgcgctcgcctccgtcgcgccctcgctcccgtcgcccacctccgggctcgccaggccgcaccaccacatgtgggcgccgtccgccggcttctcctcgccctccttcctgaactctgccgccgcgggcacgggcgatgccgccggtatcatgcagcggatggggatccccgcgggcttcgagctgccgggagcctccgccgccggagccaccctcggcgccggcggccacatcggctttgcgcccatgttcgctggacacgccgccgccatgccggggctcgagctcgggctatcgcaggacggccacatcggcgtgctcgccgcgcagtcgatcagccagttctaccaccaggtgggtgctgccgccggcggcggcggccagatgcatcacgcgcacgggcaccatcatcaccatcaccagcagcaggaggacggggaggacgaccgcgaggacggcgagtccgatgacgagtctgggcagtagtagtgtaaccgttcaaccttttgcgttgctgaatcttccctcaagttggaaggagagaaaagtgtatgcgtgcagccacgggatgcttctgctactcttggactgttgttggtcgagttctgatggatttttgtgttcatttttttctcgtgtggtatccaaactcaacggaggcctctcttgctgtgaggacttgcggattcgagatcatcctcagttcttcctacaatctcatggagtggatgatcgccacagccttctctccgacttccaggtgtatactagctgagaaaatgatggattggatcgatcacccttgagtgagtgccttatttgttattgcagtgtgtagatattcaggctgtctatgcaatgcaagtatagtacaattctagttcatgaccacgcataccacttttctccttctctgatatgtctgtgatctgtttctgacaaggtatctttttcttttgtgtgatgaaacatgcatatcctagttgtttgcttgaatcatcagttattgtttcagtatatttgtacctaggagaat

SEQ ID NO: 77829 - DNA, 1941 bp, Zea Mays
cgcgtcgcagaccaaggccgaccgggccaagctcgacgtacgagtgcatcctctgcgcctgctgctccacctcctgcccgtcctactggtggaacccggaggagtacctcggcctggccgcgctgctccacgccaacagctacccaggaaaggaaaagattagaatcgcaaggccagattctcagggtgatatgcacttccatgggcacccgacgacattaaattcacaagaataagaaaccccctccaccttaagggttcaagtaggagccaacgaagaagcaagccccatcgtcatcatggaaggaggaggccatcccacccacgctgacgaggagccaccgaaggagaaggccccaccacccaaggagaaagccgcccaaggaaaccttttcatttcaggttgtttagatctactagagcttaatttagtcagactagagacagttcgccatatgttgatgatcaccgtgacactgtcgaagaagcctctggatacatcatctccaggctttcctgcttatccctactactctataagcacgcttaggggccctgatgctcggggaatcaaggaaatatggcacaactattgtccctggtctgtatgcaccagttcatctacatttctttgttgctcgtatggacatggctgttgattgcaaattgaatgaggttcataaccaggtgggggttgccatctatttgcaccttttttaattgatcagattgcccactaaaatttgtttgcaatctaaatgggaccacaacgaaacgaattctaactgggtttattaggtggttcgagtagcactcaagttttgagtttgattgcctataggagcgaatttcaggttgatccctttcttataccccattgtgtgggagcttccagcaaagggtatgatctttacatcaaatcaaataaaataaatcaaaatgatgttatacctgctaatgttacataaactacttagatgaaatctacttcaggctaccaaaaaagtgtttattcaaccatgcaattttaatagaagtataaacttctgaggccttaagtctgtaaaagtaaaatcattgtgcctttatccagtggactatctctgtaaatccattatattaaagtcactatgattgattgtttgatcatttctcgtgcaggtggttgaggttaatgttaaggtggaaagtgcaggcacacataacatgcacaataatgatttctatgctaaagagaagttgctcaaatcaatgcgtgattgtgatccttcgtctttgcgccattggattgtaagagttgttttcttgttttatattttttttgttattcctaccattgaattgggcattcaatacctgttcattatctttatgcttatgcaatccaataatgatggaaaataactgacttggctgctctcttgagttgtggcaacggaagttccaggccccattgcagcactacactgcgctaatggaccttcaggactattctgagaatggaactgtaaccgtggtatatcgagtgatacttaaaggaactgatggagaggcatatagagatgccacgggcacaacacagttccatgaggggcgcagggaagatgctgttgcagccgcagaggaagctgcattcagcaaagcttgcgcatggttcggttttggcctgtatctgtaccaccaggatgaatctcattacgacgaccacttccattgaggctcaatctgcaaaagagttgatcataagttgtaacatgcgttggatatgcccctagaaaacttcgtatctagaatcaatttttggtctttgcgtagtatcatactcataacacaaagaagtgaacctatgtagatgctatttgaaacctttttattaatattataattcttattaatattattgtataattactttttgagtggagagaaggaaggcctttt

SEQ ID NO: 77830 - DNA, 1974 bp, Zea Mays
cgcgtcgcagaccaaggccgaccgggccaagctcgacgtacgagtgcatcctctgcgcctgctgctccacctcctgcccgtcctactggtggaacccggaggagtacctcggcctggccgcgctgctccacgccaacagctacccaggaaaggaaaagattagaatcgcaaggccagattctcagggtgatatgcacttccatgggcacccgacgacattaaattcacaagaataagaaaccccctccaccttaagggttcaagtaggagccaacgaagaagcaagccccatcgtcatcatggaaggaggaggccatcccacccacgctgacgaggagccaccgaaggagaaggccccaccacccaaggagaaagccgcccaaggaaaccttttcatttcagatctactagagcttaatttagtcagactagagacagttcgccatatgttgatgatcaccgtgacactgtcgaagaagcctctggatacatcatctccagggtaagtcaaaaacctatcctatcgctacaaacacagaagaatttcagagttgatcacctttcttttcctaattcgtaaattgttgttcattgttttcagctttcctgcttatccctactactctataagcacggtgtgtaggcgtccacaccgtgcaccatgttcttagttttggtagaattctttgtcttaaagctgactggaaatctcagcttaggggccctgatgctcggggaatcaaggaaatatggcacaactattgtccctggtctgtatgcaccagttcatctacatttctttgttgctcgtatggacatggctgttgattgcaaattgaatgaggttcataaccaggtgggggttgccatctatttgcaccttttttaattgatcagattgcccactaaaatttgtttgcaatctaaatgggaccacaacgaaacgaattctaactgggtttattaggtggttcgagtagcactcaagttttgagtttgattgcctataggagcgaatttcaggttgatccctttcttataccccattgtgtgggagcttccagcaaagggtatgatctttacatcaaatcaaataaaataaatcaaaatgatgttatacctgctaatgttacataaactacttagatgaaatctacttcaggctaccaaaaaagtgtttattcaaccatgcaattttaatagaagtataaacttctgaggccttaagtctgtaaaagtaaaatcattgtgcctttatccagtggactatctctgtaaatccattatattaaagtcactatgattgattgtttgatcatttctcgtgcaggtggttgaggttaatgttaaggtggaaagtgcaggcacacataacatgcacaataatgatttctatgctaaagagaagttgctcaaatcaatgcgtgattgtgatccttcgtctttgcgccattggattttgtggcaacggaagttccaggccccattgcagcactacactgcgctaatggaccttcaggactattctgagaatggaactgtaaccgtggtatatcgagtgatacttaaaggaactgatggagaggcatatagagatgccacgggcacaacacagttccatgaggggcgcagggaagatgctgttgcagccgcagaggaagctgcattcagcaaagcttgcgcatggttcggttttggcctgtatctgtaccaccaggatgaatctcattacgacgaccacttccattgaggctcaatctgcaaaagagttgatcataagttgtaacatgcgttggatatgcccctagaaaacttcgtatctagaatcaatttttggtctttgcgtagtatcatactcataacacaaagaagtgaacctatgtagatgctatttgaaacctttttattaatattataattcttattaatattattgtataattactttttgagtggagagaaggaaggcctttt

SEQ ID NO: 77831 - DNA, 1031 bp, Zea Mays
cgcgtcgcagaccaaggccgaccgggccaagctcgacgtacgagtgcatcctctgcgcctgctgctccacctcctgcccgtcctactggtggaacccggaggagtacctcggcctggccgcgctgctccacgccaacagctacccaggaaaggaaaagattagaatcgcaaggccagattctcagggtgatatgcacttccatgggcacccgacgacattaaattcacaagaataagaaaccccctccaccttaagggttcaagtaggagccaacgaagaagcaagccccatcgtcatcatggaaggaggaggccatcccacccacgctgacgaggagccaccgaaggagaaggccccaccacccaaggagaaagccgcccaaggaaaccttttcatttcaggtggttgaggttaatgttaaggtggaaagtgcaggcacacataacatgcacaataatgatttctatgctaaagagaagttgctcaaatcaatgcgtgattgtgatccttcgtctttgcgccattggattttccaggccccattgcagcactacactgcgctaatggaccttcaggactattctgagaatggaactgtaaccgtggtatatcgagtgatacttaaaggaactgatggagaggcatatagagatgccacgggcacaacacagttccatgaggggcgcagggaagatgctgttgcagccgcagaggaagctgcattcagcaaagcttgcgcatggttcggttttggcctgtatctgtaccaccaggatgaatctcattacgacgaccacttccattgaggctcaatctgcaaaagagttgatcataagttgtaacatgcgttggatatgcccctagaaaacttcgtatctagaatcaatttttggtctttgcgtagtatcatactcataacacaaagaagtgaacctatgtagatgctatttgaaacctttttattaatattataattcttattaatattattgtataattactttttgagtggagagaaggaaggcctttt

SEQ ID NO: 77832 - DNA, 1331 bp, Zea Mays
cgcgtcgcagaccaaggccgaccgggccaagctcgacgtacgagtgcatcctctgcgcctgctgctccacctcctgcccgtcctactggtggaacccggaggagtacctcggcctggccgcgctgctccacgccaacagctacccaggaaaggaaaagattagaatcgcaaggccagattctcagggtgatatgcacttccatgggcacccgacgacattaaattcacaagaataagaaaccccctccaccttaagggttcaagtaggagccaacgaagaagcaagccccatcgtcatcatggaaggaggaggccatcccacccacgctgacgaggagccaccgaaggagaaggccccaccacccaaggagaaagccgcccaaggaaaccttttcatttcaggttgtttagatctactagagcttaatttagtcagactagagacagttcgccatatgttgatgatcaccgtgacactgtcgaagaagcctctggatacatcatctccaggctttcctgcttatccctactactctataagcacgcttaggggccctgatgctcggggaatcaaggaaatatggcacaactattgtccctggtctgtatgcaccagttcatctacatttctttgttgctcgtatggacatggctgttgattgcaaattgaatgaggttcataaccaggtggttgaggttaatgttaaggtggaaagtgcaggcacacataacatgcacaataatgatttctatgctaaagagaagttgctcaaatcaatgcgtgattgtgatccttcgtctttgcgccattggattttgtggcaacggaagttccaggccccattgcagcactacactgcgctaatggaccttcaggactattctgagaatggaactgtaaccgtggtatatcgagtgatacttaaaggaactgatggagaggcatatagagatgccacgggcacaacacagttccatgaggggcgcagggaagatgctgttgcagccgcagaggaagctgcattcagcaaagcttgcgcatggttcggttttggcctgtatctgtaccaccaggatgaatctcattacgacgaccacttccattgaggctcaatctgcaaaagagttgatcataagttgtaacatgcgttggatatgcccctagaaaacttcgtatctagaatcaatttttggtctttgcgtagtatcatactcataacacaaagaagtgaacctatgtagatgctatttgaaacctttttattaatattataattcttattaatattattgtataattactttttgagtggagagaaggaaggcctttt

SEQ ID NO: 77833 - DNA, 1046 bp, Zea Mays
cgcgtcgcagaccaaggccgaccgggccaagctcgacgtacgagtgcatcctctgcgcctgctgctccacctcctgcccgtcctactggtggaacccggaggagtacctcggcctggccgcgctgctccacgccaacagctacccaggaaaggaaaagattagaatcgcaaggccagattctcagggtgatatgcacttccatgggcacccgacgacattaaattcacaagaataagaaaccccctccaccttaagggttcaagtaggagccaacgaagaagcaagccccatcgtcatcatggaaggaggaggccatcccacccacgctgacgaggagccaccgaaggagaaggccccaccacccaaggagaaagccgcccaaggaaaccttttcatttcaggtggttgaggttaatgttaaggtggaaagtgcaggcacacataacatgcacaataatgatttctatgctaaagagaagttgctcaaatcaatgcgtgattgtgatccttcgtctttgcgccattggattttgtggcaacggaagttccaggccccattgcagcactacactgcgctaatggaccttcaggactattctgagaatggaactgtaaccgtggtatatcgagtgatacttaaaggaactgatggagaggcatatagagatgccacgggcacaacacagttccatgaggggcgcagggaagatgctgttgcagccgcagaggaagctgcattcagcaaagcttgcgcatggttcggttttggcctgtatctgtaccaccaggatgaatctcattacgacgaccacttccattgaggctcaatctgcaaaagagttgatcataagttgtaacatgcgttggatatgcccctagaaaacttcgtatctagaatcaatttttggtctttgcgtagtatcatactcataacacaaagaagtgaacctatgtagatgctatttgaaacctttttattaatattataattcttattaatattattgtataattactttttgagtggagagaaggaaggcctttt

SEQ ID NO: 77834 - DNA, 1797 bp, Zea Mays
cgcgtcgcagaccaaggccgaccgggccaagctcgacgtacgagtgcatcctctgcgcctgctgctccacctcctgcccgtcctactggtggaacccggaggagtacctcggcctggccgcgctgctccacgccaacagctacccaggaaaggaaaagattagaatcgcaaggccagattctcagggtgatatgcacttccatgggcacccgacgacattaaattcacaagaataagaaaccccctccaccttaagggttcaagtaggagccaacgaagaagcaagccccatcgtcatcatggaaggaggaggccatcccacccacgctgacgaggagccaccgaaggagaaggccccaccacccaaggagaaagccgcccaaggaaaccttttcatttcaggttgtttagatctactagagcttaatttagtcagactagagacagttcgccatatgttgatgatcaccgtgacactgtcgaagaagcctctggatacatcatctccaggctttcctgcttatccctactactctataagcacgcttaggggccctgatgctcggggaatcaaggaaatatggcacaactattgtccctggtctgtatgcaccagttcatctacatttctttgttgctcgtatggacatggctgttgattgcaaattgaatgaggttcataaccaggtgggggttgccatctatttgcaccttttttaattgatcagattgcccactaaaatttgtttgcaatctaaatgggaccacaacgaaacgaattctaactgggtttattaggtggttcgagtagcactcaagttttgagtttgattgcctataggagcgaatttcaggttgatccctttcttataccccattgtgtgggagcttccagcaaagggtatgatctttacatcaaatcaaataaaataaatcaaaatgatgttatacctgctaatgttacataaactacttagatgaaatctacttcaggctaccaaaaaagtgtttattcaaccatgcaattttaatagaagtataaacttctgaggccttaagtctgtaaaagtaaaatcattgtgcctttatccagtggactatctctgtaaatccattatattaaagtcactatgattgattgtttgatcatttctcgtgcaggtggttgaggttaatgttaaggtggaaagtgcaggcacacataacatgcacaataatgatttctatgctaaagagaagttgctcaaatcaatgcgtgattgtgatccttcgtctttgcgccattggattttgtggcaacggaagttccaggccccattgcagcactacactgcgctaatggaccttcaggactattctgagaatggaactgtaaccgtggtatatcgagtgatacttaaaggaactgatggagagagatgccacgggcacaacacagttccatgaggggcgcagggaagatgctgttgcagccgcagaggaagctgcattcagcaaagcttgcgcatggttcggttttggcctgtatctgtaccaccaggatgaatctcattacgacgaccacttccattgaggctcaatctgcaaaagagttgatcataagttgtaacatgcgttggatatgcccctagaaaacttcgtatctagaatcaatttttggtctttgcgtagtatcatactcataacacaaagaagtgaacctatgtagatgctatttgaaacctttttattaatattataattcttattaatattattgtataattactttttgagtggagagaaggaaggcctttt

SEQ ID NO: 77835 - DNA, 1785 bp, Zea Mays
ctcggatccacgtccaccgcgtcgcagaccaaggccgaccgggccaagctcgacgtacgagtgcatcctctgcgcctgctgctccacctcctgcccgtcctactggtggaacccggaggagtacctcggcctggccgcgctgctccacgccaacaggtgaacagggcttcagcagggacgctggtttagcaatggaggcgatccattccttatctgcttcaaaatcaagttatccaatggttgatctcacccaactcttcatgacagctacccaggaaaggaaaagattagaatcgcaaggccagattctcagggtgatatgcacttccatgggcacccgacgacattaaattcacaagaataagaaaccccctccaccttaagggttcaagtaggagccaacgaagaagcaagccccatcgtcatcatggaaggaggaggccatcccacccacgctgacgaggagccaccgaaggagaaggccccaccacccaaggagaaagccgcccaaggaaaccttttcatttcaggggccctgatgctcggggaatcaaggaaatatggcacaactattgtccctggtctgtatgcaccagttcatctacatttctttgttgctcgtatggacatggctgttgattgcaaattgaatgaggttcataaccaggtgggggttgccatctatttgcaccttttttaattgatcagattgcccactaaaatttgtttgcaatctaaatgggaccacaacgaaacgaattctaactgggtttattaggtggttcgagtagcactcaagttttgagtttgattgcctataggagcgaatttcaggttgatccctttcttataccccattgtgtgggagcttccagcaaagggtatgatctttacatcaaatcaaataaaataaatcaaaatgatgttatacctgctaatgttacataaactacttagatgaaatctacttcaggctaccaaaaaagtgtttattcaaccatgcaattttaatagaagtataaacttctgaggccttaagtctgtaaaagtaaaatcattgtgcctttatccagtggactatctctgtaaatccattatattaaagtcactatgattgattgtttgatcatttctcgtgcaggtggttgaggttaatgttaaggtggaaagtgcaggcacacataacatgcacaataatgatttctatgctaaagagaagttgctcaaatcaatgcgtgattgtgatccttcgtctttgcgccattggattttgtggcaacggaagttccaggccccattgcagcactacactgcgctaatggaccttcaggactattctgagaatggaactgtaaccgtggtatatcgagtgatacttaaaggaactgatggagaggcatatagagatgccacgggcacaacacagttccatgaggggcgcagggaagatgctgttgcagccgcagaggaagctgcattcagcaaagcttgcgcatggttcggttttggcctgtatctgtaccaccaggatgaatctcattacgacgaccacttccattgaggctcaatctgcaaaagagttgatcataagttgtaacatgcgttggatatgcccctagaaaacttcgtatctagaatcaatttttggtctttgcgtagtatcatactcataacacaaagaagtgaacctatgtagatgctatttgaaacctttttattaatattataattcttattaatattattgtataattactttttgagtggagagaaggaaggcctttt

SEQ ID NO: 77836 - DNA, 1459 bp, Zea Mays
ctcggatccacgtccaccgcgtcgcagaccaaggccgaccgggccaagctcgacgtacgagtgcatcctctgcgcctgctgctccacctcctgcccgtcctactggtggaacccggaggagtacctcggcctggccgcgctgctccacgccaacaggtgaacagggcttcagcagggacgctggtttagcaatggaggcgatccattccttatctgcttcaaaatcaagttatccaatggttgatctcacccaactcttcatgacagctacccaggaaaggaaaagattagaatcgcaaggccagattctcagggtgatatgcacttccatgggcacccgacgacattaaattcacaagaataagaaaccccctccaccttaagggttcaagtaggagccaacgaagaagcaagccccatcgtcatcatggaaggaggaggccatcccacccacgctgacgaggagccaccgaaggagaaggccccaccacccaaggagaaagccgcccaaggaaaccttttcatttcaggttgtttagatctactagagcttaatttagtcagactagagacagttcgccatatgttgatgatcaccgtgacactgtcgaagaagcctctggatacatcatctccaggctttcctgcttatccctactactctataagcacgcttaggggccctgatgctcggggaatcaaggaaatatggcacaactattgtccctggtctgtatgcaccagttcatctacatttctttgttgctcgtatggacatggctgttgattgcaaattgaatgaggttcataaccaggtggttgaggttaatgttaaggtggaaagtgcaggcacacataacatgcacaataatgatttctatgctaaagagaagttgctcaaatcaatgcgtgattgtgatccttcgtctttgcgccattggattttgtggcaacggaagttccaggccccattgcagcactacactgcgctaatggaccttcaggactattctgagaatggaactgtaaccgtggtatatcgagtgatacttaaaggaactgatggagaggcatatagagatgccacgggcacaacacagttccatgaggggcgcagggaagatgctgttgcagccgcagaggaagctgcattcagcaaagcttgcgcatggttcggttttggcctgtatctgtaccaccaggatgaatctcattacgacgaccacttccattgaggctcaatctgcaaaagagttgatcataagttgtaacatgcgttggatatgcccctagaaaacttcgtatctagaatcaatttttggtctttgcgtagtatcatactcataacacaaagaagtgaacctatgtagatgctatttgaaacctttttattaatattataattcttattaatattattgtataattactttttgagtggagagaaggaaggcctttt

SEQ ID NO: 77837 - DNA, 1994 bp, Zea Mays
tagcgtcctcggatccacgtccaccgcgtcgcagaccaaggccgaccgggccaagctcgacgtacgagtgcatcctctgcgcctgctgctccacctcctgcccgtcctactggtggaacccggaggagtacctcggcctggccgcgctgctccacgccaacaggtgaacagggcttcagcagggacgctggtttagcaatggaggcgatccattccttatctgcttcaaaatcaagttatccaatggttgatctcacccaactcttcatgacagctacccaggaaaggaaaagattagaatcgcaaggccagattctcagggtgatatgcacttccatgggcacccgacgacattaaattcacaagaataagaaaccccctccaccttaagggttcaagtaggagccaacgaagaagcaagccccatcgtcatcatggaaggaggaggccatcccacccacgctgacgaggagccaccgaaggagaaggccccaccacccaaggagaaagccgcccaaggaaaccttttcatttcagttcgccatatgttgatgatcaccgtgacactgtcgaagaagcctctggatacatcatctccagggtaagtcaaaaacctatcctatcgctacaaacacagaagaatttcagagttgatcacctttcttttcctaattcgtaaattgttgttcattgttttcagctttcctgcttatccctactactctataagcacgcttaggggccctgatgctcggggaatcaaggaaatatggcacaactattgtccctggtctgtatgcaccagttcatctacatttctttgttgctcgtatggacatggctgttgattgcaaattgaatgaggttcataaccaggtgggggttgccatctatttgcaccttttttaattgatcagattgcccactaaaatttgtttgcaatctaaatgggaccacaacgaaacgaattctaactgggtttattaggtggttcgagtagcactcaagttttgagtttgattgcctataggagcgaatttcaggttgatccctttcttataccccattgtgtgggagcttccagcaaagggtatgatctttacatcaaatcaaataaaataaatcaaaatgatgttatacctgctaatgttacataaactacttagatgaaatctacttcaggctaccaaaaaagtgtttattcaaccatgcaattttaatagaagtataaacttctgaggccttaagtctgtaaaagtaaaatcattgtgcctttatccagtggactatctctgtaaatccattatattaaagtcactatgattgattgtttgatcatttctcgtgcaggtggttgaggttaatgttaaggtggaaagtgcaggcacacataacatgcacaataatgatttctatgctaaagagaagttgctcaaatcaatgcgtgattgtgatccttcgtctttgcgccattggattttgtggcaacggaagttccaggccccattgcagcactacactgcgctaatggaccttcaggactattctgagaatggaactgtaaccgtggtatatcgagtgatacttaaaggaactgatggagaggcatatagagatgccacgggcacaacacagttccatgaggggcgcagggaagatgctgttgcagccgcagaggaagctgcattcagcaaagcttgcgcatggttcggttttggcctgtatctgtaccaccaggatgaatctcattacgacgaccacttccattgaggctcaatctgcaaaagagttgatcataagttgtaacatgcgttggatatgcccctagaaaacttcgtatctagaatcaatttttggtctttgcgtagtatcatactcataacacaaagaagtgaacctatgtagatgctatttgaaacctttttattaatattataattcttattaatattattgtataattactttttgagtggagagaaggaaggcctttt

SEQ ID NO: 77838 - DNA, 1387 bp, Zea Mays
tagcgtcctcggatccacgtccaccgcgtcgcagaccaaggccgaccgggccaagctcgacgtacgagtgcatcctctgcgcctgctgctccacctcctgcccgtcctactggtggaacccggaggagtacctcggcctggccgcgctgctccacgccaacaggtgaacagggcttcagcagggacgctggtttagcaatggaggcgatccattccttatctgcttcaaaatcaagttatccaatggttgatctcacccaactcttcatgacagctacccaggaaaggaaaagattagaatcgcaaggccagattctcagggtgatatgcacttccatgggcacccgacgacattaaattcacaagaataagaaaccccctccaccttaagggttcaagtaggagccaacgaagaagcaagccccatcgtcatcatggaaggaggaggccatcccacccacgctgacgaggagccaccgaaggagaaggccccaccacccaaggagaaagccgcccaaggaaaccttttcatttcagttcgccatatgttgatgatcaccgtgacactgtcgaagaagcctctggatacatcatctccaggcttaggggccctgatgctcggggaatcaaggaaatatggcacaactattgtccctggtctgtatgcaccagttcatctacatttctttgttgctcgtatggacatggctgttgattgcaaattgaatgaggttcataaccaggtggttgaggttaatgttaaggtggaaagtgcaggcacacataacatgcacaataatgatttctatgctaaagagaagttgctcaaatcaatgcgtgattgtgatccttcgtctttgcgccattggattttgtggcaacggaagttccaggccccattgcagcactacactgcgctaatggaccttcaggactattctgagaatggaactgtaaccgtggtatatcgagtgatacttaaaggaactgatggagaggcatatagagatgccacgggcacaacacagttccatgaggggcgcagggaagatgctgttgcagccgcagaggaagctgcattcagcaaagcttgcgcatggttcggttttggcctgtatctgtaccaccaggatgaatctcattacgacgaccacttccattgaggctcaatctgcaaaagagttgatcataagttgtaacatgcgttggatatgcccctagaaaacttcgtatctagaatcaatttttggtctttgcgtagtatcatactcataacacaaagaagtgaacctatgtagatgctatttgaaacctttttattaatattataattcttattaatattattgtataattactttttgagtggagagaaggaaggcctttt

SEQ ID NO: 77839 - DNA, 1173 bp, Zea Mays
gttgtcgtagcgtcctcggatccacgtccaccgcgtcgcagaccaaggccgaccgggccaagctcgacgtacgagtgcatcctctgcgcctgctgctccacctcctgcccgtcctactggtggaacccggaggagtacctcggcctggccgcgctgctccacgccaacaggtgaacagggcttcagcagggacgctggtttagcaatggaggcgatccattccttatctgcttcaaaatcaagttatccaatggttgatctcacccaactcttcatgacagctacccaggaaaggaaaagattagaatcgcaaggccagattctcagggtgatatgcacttccatgggcacccgacgacattaaattcacaagaataagaaaccccctccaccttaagggttcaagtaggagccaacgaagaagcaagccccatcgtcatcatggaaggaggaggccatcccacccacgctgacgaggagccaccgaaggagaaggccccaccacccaaggagaaagccgcccaaggaaaccttttcatttcaggtggttgaggttaatgttaaggtggaaagtgcaggcacacataacatgcacaataatgatttctatgctaaagagaagttgctcaaatcaatgcgtgattgtgatccttcgtctttgcgccattggattttccaggccccattgcagcactacactgcgctaatggaccttcaggactattctgagaatggaactgtaaccgtggtatatcgagtgatacttaaaggaactgatggagaggcatatagagatgccacgggcacaacacagttccatgaggggcgcagggaagatgctgttgcagccgcagaggaagctgcattcagcaaagcttgcgcatggttcggttttggcctgtatctgtaccaccaggatgaatctcattacgacgaccacttccattgaggctcaatctgcaaaagagttgatcataagttgtaacatgcgttggatatgcccctagaaaacttcgtatctagaatcaatttttggtctttgcgtagtatcatactcataacacaaagaagtgaacctatgtagatgctatttgaaacctttttattaatattataattcttattaatattattgtataattactttttgagtggagagaaggaaggcctttt

SEQ ID NO: 77840 - DNA, 1258 bp, Zea Mays
aagtccgttgtcgtagcgtcctcggatccacgtccaccgcgtcgcagaccaaggccgaccgggccaagctcgacgtacgagtgcatcctctgcgcctgctgctccacctcctgcccgtcctactggtggaacccggaggagtacctcggcctggccgcgctgctccacgccaacaggtgaacagggcttcagcagggacgctggtttagcaatggaggcgatccattccttatctgcttcaaaatcaagttatccaatggttgatctcacccaactcttcatgacagctacccaggaaaggaaaagattagaatcgcaaggccagattctcagggtgatatgcacttccatgggcacccgacgacattaaattcacaagaataagaaaccccctccaccttaagggttcaagtaggagccaacgaagaagcaagccccatcgtcatcatggaaggaggaggccatcccacccacgctgacgaggagccaccgaaggagaaggccccaccacccaaggagaaagccgcccaaggaaaccttttcatttcagttcgccatatgttgatgatcaccgtgacactgtcgaagaagcctctggatacatcatctccagggtggttgaggttaatgttaaggtggaaagtgcaggcacacataacatgcacaataatgatttctatgctaaagagaagttgctcaaatcaatgcgtgattgtgatccttcgtctttgcgccattggattttgtggcaacggaagttccaggccccattgcagcactacactgcgctaatggaccttcaggactattctgagaatggaactgtaaccgtggtatatcgagtgatacttaaaggaactgatggagaggcatatagagatgccacgggcacaacacagttccatgaggggcgcagggaagatgctgttgcagccgcagaggaagctgcattcagcaaagcttgcgcatggttcggttttggcctgtatctgtaccaccaggatgaatctcattacgacgaccacttccattgaggctcaatctgcaaaagagttgatcataagttgtaacatgcgttggatatgcccctagaaaacttcgtatctagaatcaatttttggtctttgcgtagtatcatactcataacacaaagaagtgaacctatgtagatgctatttgaaacctttttattaatattataattcttattaatattattgtataattactttttgagtggagagaaggaaggcctttt

SEQ ID NO: 77841 - DNA, 1195 bp, Zea Mays
gaagtccgttgtcgtagcgtcctcggatccacgtccaccgcgtcgcagaccaaggccgaccgggccaagctcgacgtacgagtgcatcctctgcgcctgctgctccacctcctgcccgtcctactggtggaacccggaggagtacctcggcctggccgcgctgctccacgccaacaggtgaacagggcttcagcagggacgctggtttagcaatggaggcgatccattccttatctgcttcaaaatcaagttatccaatggttgatctcacccaactcttcatgacagctacccaggaaaggaaaagattagaatcgcaaggccagattctcagggtgatatgcacttccatgggcacccgacgacattaaattcacaagaataagaaaccccctccaccttaagggttcaagtaggagccaacgaagaagcaagccccatcgtcatcatggaaggaggaggccatcccacccacgctgacgaggagccaccgaaggagaaggccccaccacccaaggagaaagccgcccaaggaaaccttttcatttcaggtggttgaggttaatgttaaggtggaaagtgcaggcacacataacatgcacaataatgatttctatgctaaagagaagttgctcaaatcaatgcgtgattgtgatccttcgtctttgcgccattggattttgtggcaacggaagttccaggccccattgcagcactacactgcgctaatggaccttcaggactattctgagaatggaactgtaaccgtggtatatcgagtgatacttaaaggaactgatggagaggcatatagagatgccacgggcacaacacagttccatgaggggcgcagggaagatgctgttgcagccgcagaggaagctgcattcagcaaagcttgcgcatggttcggttttggcctgtatctgtaccaccaggatgaatctcattacgacgaccacttccattgaggctcaatctgcaaaagagttgatcataagttgtaacatgcgttggatatgcccctagaaaacttcgtatctagaatcaatttttggtctttgcgtagtatcatactcataacacaaagaagtgaacctatgtagatgctatttgaaacctttttattaatattataattcttattaatattattgtataattactttttgagtggagagaaggaaggcctttt

SEQ ID NO: 77842 - DNA, 1419 bp, Zea Mays
ctgcaccgaccggagccgccgcagacccacctcgccatggcggcggcggtcgcggcgcctcccatccccgcccctaaccacactccccttccatcctcgctcacttccagccgcccccattcccagttgaaggagctgtccaggaaccgggaaccccatcaccggatcaggagcagccgtgtcgcggggatggtcgttgctgagctcacgatgaccgcccgatggtgtcggaccccgcaccgccgtcggcaccgcgctaatgatggtgaacagggcttcagcagggacgctggtttagcaatggaggcgatccattccttatctgcttcaaaatcaagttatccaatggttgatctcacccaactcttcatgacagctacccaggaaaggaaaagattagaatcgcaaggccagattctcagggtgatatgcacttccatgggcacccgacgacattaaattcacaagaataagaaaccccctccaccttaagggttcaagtaggagccaacgaagaagcaagccccatcgtcatcatggaaggaggaggccatcccacccacgctgacgaggagccaccgaaggagaaggccccaccacccaaggagaaagccgcccaaggaaaccttttcatttcaggtggttgaggttaatgttaaggtggaaagtgcaggcacacataacatgcacaataatgatttctatgctaaagagaagttgctcaaatcaatgcgtgattgtgatccttcgtctttgcgccattggattgtaagagttgttttcttgttttatattttttttgttattcctaccattgaattgggcattcaatacctgttcattatctttatgcttatgcaatccaataatgatggaaaataactgacttggctgctctcttgagttgtggcaacggaagttccaggccccattgcagcactacactgcgctaatggaccttcaggactattctgagaatggaactgtaaccgtggtatatcgagtgatacttaaaggaactgatggagaggcatatagagatgccacgggcacaacacagttccatgaggggcgcagggaagatgctgttgcagccgcagaggaagctgcattcagcaaagcttgcgcatggttcggttttggcctgtatctgtaccaccaggatgaatctcattacgacgaccacttccattgaggctcaatctgcaaaagagttgatcataagttgtaacatgcgttggatatgcccctagaaaacttcgtatctagaatcaatttttggtctttgcgtagtatcatactcataacacaaagaagtgaacctatgtagatgctatttgaaacctttttattaatattataattcttattaatattattgtataattactttttgagtggagagaaggaaggcctttt

SEQ ID NO: 77843 - DNA, 1347 bp, Zea Mays
ctgcaccgaccggagccgccgcagacccacctcgccatggcggcggcggtcgcggcgcctcccatccccgcccctaaccacactccccttccatcctcgctcacttccagccgcccccattcccagttgaaggagctgtccaggaaccgggaaccccatcaccggatcaggagcagccgtgtcgcggggatggtcgttgctgagctcacgatgaccgcccgatggtgtcggaccccgcaccgccgtcggcaccgcgctaatgatggtgaacagggcttcagcagggacgctggtttagcaatggaggcgatccattccttatctgcttcaaaatcaagttatccaatggttgatctcacccaactcttcatgacagctacccaggaaaggaaaagattagaatcgcaaggccagattctcagggtgatatgcacttccatgggcacccgacgacattaaattcacaagaataagaaaccccctccaccttaagggttcaagtaggagccaacgaagaagcaagccccatcgtcatcatggaaggaggaggccatcccacccacgctgacgaggagccaccgaaggagaaggccccaccacccaaggagaaagccgcccaaggaaaccttttcatttcagttcgccatatgttgatgatcaccgtgacactgtcgaagaagcctctggatacatcatctccagggtggttgaggttaatgttaaggtggaaagtgcaggcacacataacatgcacaataatgatttctatgctaaagagaagttgctcaaatcaatgcgtgattgtgatccttcgtctttgcgccattggattttgtggcaacggaagttccaggccccattgcagcactacactgcgctaatggaccttcaggactattctgagaatggaactgtaaccgtggtatatcgagtgatacttaaaggaactgatggagaggcatatagagatgccacgggcacaacacagttccatgaggggcgcagggaagatgctgttgcagccgcagaggaagctgcattcagcaaagcttgcgcatggttcggttttggcctgtatctgtaccaccaggatgaatctcattacgacgaccacttccattgaggctcaatctgcaaaagagttgatcataagttgtaacatgcgttggatatgcccctagaaaacttcgtatctagaatcaatttttggtctttgcgtagtatcatactcataacacaaagaagtgaacctatgtagatgctatttgaaacctttttattaatattataattcttattaatattattgtataattactttttgagtggagagaaggaaggcctttt

SEQ ID NO: 77844 - DNA, 703 bp, Zea Mays
ctccgttatcaccagcgcccacacctctgtacctcaccgcctcatctgctctcttcccccgtcttcttcccaagctgccacgttgcctccctccgctccagcggcccatggcctccatggcgttcgccctggcgggggccttcaagggcctctccctggcgcccaccaccaccacctcctccttcccgcgctgcgaccgcgcctcgctctccgtcggcggcgcagcgggcgtgccggtgccggtgccggcgcggcggctcaccatccagatggcgcacaagaagggggccgggagcaccaagaacggccgcgactccaagggccagcgcctcggggtcaagatatacggcgaccagctcgccaagcccggggccatcatcatccgccagcgcggcaccagggtctatcctggaaataacgttggaatgggcaaggatcacacactcttttctttgatagatggactcgtcaagtttgagaagtatgggccggacaagaaaaaggttagtgtttacccatatgagaaggagcctgaaaacccaaacagttacagagcaaggaagagagagtacttccgcatgcggcgtgaacggaagaaggcgagagcggagggcgccgctgagcctcagttggtactagctgctgttgatgaaaactctgagatgagtggcaaacaaatgtaggtcgctgccttcaggtgcac

SEQ ID NO: 77845 - DNA, 1077 bp, Zea Mays
ctccgttatcaccagcgcccacacctctgtacctcaccgcctcatctgctctcttcccccgtcttcttcccaagctgccacgttgcctccctccgctccagcggcccatggcctccatggcgttcgccctggcgggggccttcaagggcctctccctggcgcccaccaccaccacctcctccttcccgcgctgcgaccgcgcctcgctctccgtcggcggcgcagcgggcgtgccggtgccggtgccggcgcggcggctcaccatccagatggcgcacaagaagggggccgggagcaccaagaacggccgcgactccaagggccagcgcctcggggtcaagatatacggcgaccagctcgccaagcccggggccatcatcatccgccagcgcggcaccagggtctatcctggaaataacgttggaatgggcaaggatcacacactcttttctttgatagatggactcgtcaagtttgagaagtatgggccggacaagaaaaagtgtttacccatatgagaaggagcctgaaaacccaaacagttacagagcaaggaagagagagtacttccgcatgcggcgtgaacggaagaaggcgagagcggagggcgccgctgagcctcagttggtactagctgctgttgatgaaaactctgaggtcagcgcggactgctgataagtttcctgtgtggtgtttctctttttcacagcccttgttacactttttcttccttaattgtaagaccacatgatctataaaggtcatatttacatgtgttgtttagataaatggatatgttctacttgtactttttgtggggtagttgtgctttagagtcacagtgggggtctattccaacttcctagaccactccacgtagggcgtgtttggttcggcttttttctgaatagcttttctgaaaagctggtggttagaatttaggtgtttggttcgccagctgtgcggaaaagctgttcgttagaatctaggtgtttggatacacagattctcagattgcagattctgtttgaagaaactatacacattaacaccgaaccaacaaaaggtcattacata

SEQ ID NO: 77846 - DNA, 2797 bp, Zea Mays
ggcggtcctcgctagtgcctcctctcggctcgtcgccgacgaggggtgaggacctccccgtcggatgctaggagtcctccgcacagcagattcgtctccttcccgattcgatatggagtgcaacagagatgacgcggtgcgatcaaaggatattgctgaaacaaagttcagggagaatgacattacgggtgcgaagaagtttgccctcaaagcaaaggctctttttgagacgcttgagggcattgatcagatgattgtagccttagatgtccacgtaagggcacagacaaagattgcaggggaaaatgactggtatgggatcttagaggtgccacccatggctgatgaggaggcaatcaagaagaaatacaagaagttggccttccaaactcatcctgacaaaaatagctctgtttgtgctaaagccgcttttaatctcatctcggatgcttggaatgtgttgtccaatactgccaagaggacggtgtatgaccacaggaggcgtgtgcatgccctaggagtgcatcagaataacttcaaagcaactgcccgtaagaattccaactcctctatgtcaagtgtggatagattctgtgccagacgtagggaagtggcgccccacctcgcccatgaaggaatagaaacattctggacactctgctggtcatgtcttatgaacttccagtactccagggaatacttcaaccaccatctgaagtgtcataattgtcatgcagtgtttgttgctgctgaagttcgaccaccaagtgttcagatttacccgactgagccgatgcctatgtctactaataataacattggtggcaatacagttcctggcatggtggctccaggagtacaggcaggagtgtcacagggcaatcaaaattgtgatccaacagtgttcaaatctgcaacatgtgcaaaaagtactaaacatacggtccaacagacacatgatagtattagaaaagatgatgcagctggagctagtatacccgctaatgaagaagcaaattgcacaaaagttctgcagcatgctgcaaggaaacatgcacatgcagtctcttctgccagacgagcaaatgcagcaacaagggagcatgaagctgcaaagagaaaacacgccaatgctggcaagcaaggaacctggcagtcagcagcctcctaccctgatggtgatggatgcaaaccggtgttcccagtaaaaagaaagcctcgctcaacctctgaaacatcaggtgccaagaaacacaaggtgtcttctggtgattttaattgtgaatcttctagtgatgttggaaggaccagctttggcagagtgctcatgaagttagatgtccgtagcatcctaattgaaaaggggaaacttcaagctcagaaattgcaggagctcagtagcaagaaagccaatgtgaaaaagaaacaaaagatgcagaatggtaagaaaagcagcagaaaaggtgtttgcaacatagaaaatgaggtcaataaaattgagatgaagcaaagcagcagttcagttgatccaaaaaaagatgtcttggagttggttagcagaagggttgattctgaagaaaaggagaggcagaagagcagtaaacaggttgggttgaaagaaaagctgaagtcatggcctgtacctgaagtgcgcatagtatacacgaggagaaaccgcaagcaacacaagaaggaactgggagatgaagtaactggtgctactccgggaacagagcaccatatgcctgccagatatggctgtttgaaccaagtatgtcctgatgcaggctctgacaaaattcctgttcctgatgcagatttctacagtgttcctgatgcagatttttccagttttggtgatcattctgaaagttcatttcaaaatgatcaagtctgggccatgtatgatgaagaagatggtatgcctcgctattatgctttgatcagaaaagtcatttccactcgcccttttaaagttagactggtccacctcaaagcaaacgactctaatgagttcggagcctccagttggctctcgtgtggatactccaagacctgtggtgagttcaagtttgatgtgtccaaacatactgaccaagtgaatatcttctcacataaggtcaagtatgacaaaggtccaggaggcattatcagaatttttcctaagaaaggtgatatctgggctctgtaccagaattggtcccctgactgggatcaattcacagctgatgatatgatttacaagtatgaactggtcgagattcttgacagctacagtccttccagaggcatttctgtgatgcctattgtgaaggttcctgggtttgtgtcagtgtttaagcctgttcacaacgcaacgagaagctggaggataccaagggaagagatgatgtgtttttcacaccaagtgccattccatgtccttactggagaagaagctcataatgctcccaaggggtgctatgaattggatccaggctcaactccacaggagcttcttcatgtagttccaccatctggcgatgctaaataagtttgcacttgaagctggagcttgctctgtacttaaatttttgtgtttgaaactttttaatcctttgacctagcagcagttggcgtaagatgtttccttttgaagtgtaaattatataccttgttttgtgctgatgtagcagcttactgtcaggattatgcagacttatattgtcatgttcaatgtgctcagttctcgttctcgatgcaagcattgagagctgtagaaatcacaattgcaactcagtatgcgattttttccacc

SEQ ID NO: 77847 - DNA, 2877 bp, Zea Mays
cccatatcctaccccacaacccgtcaggagctggggggaaatcgatctcccctcgaagctctcgcggcgccccgcgacgcgggcggtcctcgctagtgcctcctctcggctcgtcgccgacgagggtgaggacctccccgtcggatgctaggagtcctccgcacagcagattcgtctccttcccgattcgatatggagtgcaacagagatgacgcggtgcgatcaaaggatattgctgaaacaaagttcagggagaatgacattacgggtgcgaagaagtttgccctcaaagcaaaggctctttttgagacgcttgagggcattgatcagatgattgtagccttagatgtccacgtaagggcacagacaaagattgcaggggaaaatgactggtatgggatcttagaggtgccacccatggctgatgaggaggcaatcaagaagaaatacaagaagttggccttccaaactcatcctgacaaaaatagctctgtttgtgctaaagccgcttttaatctcatctcggatgcttggaatgtgttgtccaatactgccaagaggacggtgtatgaccacaggaggcgtgtgcatgccctaggagtgcatcagaataacttcaaagcaactgcccgtaagaattccaactcctctatgtcaagtgtggatagattctgtgccagacgtagggaagtggcgccccacctcgcccatgaaggaatagaaacattctggacactctgctggtcatgtcttatgaacttccagtactccagggaatacttcaaccaccatctgaagtgtcataattgtcatgcagtgtttgttgctgctgaagttcgaccaccaagtgttcagatttacccgactgagccgatgcctatgtctactaataataacattggtggcaatacagttcctggcatggtggctccaggagtacaggcaggagtgtcacagggcaatcaaaattgtgatccaacagtgttcaaatctgcaacatgtgcaaaaagtactaaacatacggtccaacagacacatgatagtattagaaaagatgatgcagctggagctagtatacccgctaatgaagaagcaaattgcacaaaagttctgcagcatgctgcaaggaaacatgcacatgcagtctcttctgccagacgagcaaatgcagcaacaagggagcatgaagctgcaaagagaaaacacgccaatgctggcaagcaaggaacctggcagtcagcagcctcctaccctgatggtgatggatgcaaaccggtgttcccagtaaaaagaaagcctcgctcaacctctgaaacatcaggtgccaagaaacacaaggtgtcttctggtgattttaattgtgaatcttctagtgatgttggaaggaccagctttggcagagtgctcatgaagttagatgtccgtagcatcctaattgaaaaggggaaacttcaagctcagaaattgcaggagctcagtagcaagaaagccaatgtgaaaaagaaacaaaagatgcagaatggtaagaaaagcagcagaaaaggtgtttgcaacatagaaaatgaggtcaataaaattgagatgaagcaaagcagcagttcagttgatccaaaaaaagatgtcttggagttggttagcagaagggttgattctgaagaaaaggagaggcagaagagcagtaaacaggttgggttgaaagaaaagctgaagtcatggcctgtacctgaagtgcgcatagtatacacgaggagaaaccgcaagcaacacaagaaggaactgggagatgaagtaactggtgctactccgggaacagagcaccatatgcctgccagatatggctgtttgaaccaagtatgtcctgatgcaggctctgacaaaattcctgttcctgatgcagatttctacagtgttcctgatgcagatttttccagttttggtgatcattctgaaagttcatttcaaaatgatcaagtctgggccatgtatgatgaagaagatggtatgcctcgctattatgctttgatcagaaaagtcatttccactcgcccttttaaagttagactggtccacctcaaagcaaacgactctaatgagttcggagcctccagttggctctcgtgtggatactccaagacctgtggtgagttcaagtttgatgtgtccaaacatactgaccaagtgaatatcttctcacataaggtcaagtatgacaaaggtccaggaggcattatcagaatttttcctaagaaaggtgatatctgggctctgtaccagaattggtcccctgactgggatcaattcacagctgatgatatgatttacaagtatgaactggtcgagattcttgacagctacagtccttccagaggcatttctgtgatgcctattgtgaaggttcctgggtttgtgtcagtgtttaagcctgttcacaacgcaacgagaagctggaggataccaagggaagagatgatgtgtttttcacaccaagtgccattccatgtccttactggagaagaagctcataatgctcccaaggggtgctatgaattggatccaggctcaactccacaggagcttcttcatgtagttccaccatctggcgatgctaaataagtttgcacttgaagctggagcttgctctgtacttaaatttttgtgtttgaaactttttaatcctttgacctagcagcagttggcgtaagatgtttccttttgaagtgtaaattatataccttgttttgtgctgatgtagcagcttactgtcaggattatgcagacttatattgtcatgttcaatgtgctcagttctcgttctcgatgcaagcattgagagctgtagaaatcacaattgcaactcagtatgcgattttttccacc

SEQ ID NO: 77848 - DNA, 1123 bp, Zea Mays
ccgtttgtcgcctccgacaaccctgtgctttgcgccggcccggagaaggtcatgacaatgcccaggaagcaaacacagcgtgatctccggagaatggagaaagctgaaagggctgctcaactagaaaggaatattgaaaatgaattgaaggaacgcctgaacaaaggtgtttatgctgacatctataatgttcccttcaaagcgtttgatgaggttcttgatatggaaagagatgaagtggttcttgaagaagaggaggaagaagaaggtgaggtatatgttgaaggcgatgacatggaagagatggatgacatggaagactttgaaggcctcagtgatggaggcacagatgaagatgatgttttggatgatcccgtatcaaagaaacccaagggatcctcttcttattcgaagcaaaatgtcgggaaaaggtctaggaaggttatgactgaggtggaagaagacgaggagataaatacgaggcaaaggcaaagggcgtgagtgcgaaatgtgcaactgcaacgacggttatatgatgttagatgccggcaggcgccacttctgctgtatgttggatcattttatacttgccttcgtactgtaacgcggagtgctgagacgtcaattaattttggccgtggtttacatggcctaatatgttatgagcaagaaaaagaaacgggtgataactcagttgaggatgtgggagaccatctagttttcgaggtgaatttaggtatctatttttgtaagttacagattggtttagctttgttctttgttacgaggaaaaccagagtcatgcgtttactaacacattctgagttgtcattgaggatttgggatatcctaagatcctaggtgagtagcctaaaccgcatctttcgttgactgtatcaaggaggcaacagtagctacaaaatcacatcccggtttcgtttctaatgtcgagcactttctcatatctttaatactcctagttaatatggaggtatgctacattatagcctattgcactcatgggtgccaaatgttcgtgttggttgggatttctgcccgtgtgtcttggcgctactgtctggttgtgtttctgtgtgtctccctttttccttttcaaattgaa

SEQ ID NO: 77849 - DNA, 1423 bp, Zea Mays
gccttctttttcccgatcacaacggggatcttctgtcgcaacccctacaacgcgacgggcatctgcaaccggagctcctgcccgcttgccaacagccgctatgccaccatccgggatcatgaaggtattttctatctgtatatgaaaaccgccgaaagagctcatctgccaaacaaattatgggagagagtcaaactgccgaagaattatgagaaagcaatggaagtcataaacaaacatcttgaattttggcctaagctacttgtgcacaagatcaaacagcggctgacaaaaatgactcaatatcgtataagaatgaggaaacttcaactgaaagtgagggagaaggtcatgacaatgcccaggaagcaaacacagcgtgatctccggagaatggagaaagctgaaagggctgctcaactagaaaggaatattgaaaatgaattgaaggaacgcctgaacaaaggtgtttatgctgacatctataatgttcccttcaaagcgtttgatgaggttcttgatatggaaagagatgaagtggttcttgaagaagaggaggaagaagaaggtgaggtatatgttgaaggcgatgacatggaagagatggatgacatggaagactttgaaggcctcagtgatggaggcacagatgaagatgatgttttggatgatcccgtatcaaagaaacccaagggatcctcttcttattcgaagcaaaatgtcgggaaaaggtctaggaaggttatgactgaggtggaagaagacgaggagataaatacgaggcaaaggcaaagggcgtgagtgcgaaatgtgcaactgcaacgacggttatatgatgttagatgccggcaggcgccacttctgctgtatgttggatcattttatacttgccttcgtactgtaacgcggagtgctgagacgtcaattaattttggccgtggtttacatggcctaatatgttatgagcaagaaaaagaaacgggtgataactcagttgaggatgtgggagaccatctagttttcgaggtgaatttaggtatctatttttgtaagttacagattggtttagctttgttctttgttacgaggaaaaccagagtcatgcgtttactaacacattctgagttgtcattgaggatttgggatatcctaagatcctaggtgagtagcctaaaccgcatctttcgttgactgtatcaaggaggcaacagtagctacaaaatcacatcccggtttcgtttctaatgtcgagcactttctcatatctttaatactcctagttaatatggaggtatgctacattatagcctattgcactcatgggtgccaaatgttcgtgttggttgggatttctgcccgtgtgtcttggcgctactgtctggttgtgtttctgtgtgtctccctttttccttttcaaattgaa

SEQ ID NO: 77850 - DNA, 1819 bp, Zea Mays
atgcaaacctactgtattgggctgcatgcgctaactagccgcaggcccacctatcctttccagggcacacaccagaaacgacctggattccatcatgtacgtccatatctcatcggtcggcttgcaagttgcatcagccagcagcaactcgccaatgaagccactgcccgcccgcgcgccgcattcccaaaccctactataccccgctcctctcctccccgtctgccggctcccttcttcttcgctgtcgacgacgcggactccccgccgcgctccctctctcaggcctcgcggggtgatcagaggcggctgggagactcgtgcgctccgacgagtccggttacggcgcggtaattaagcaggggaggagccggccctgagcggcggagtccaaaatgagtgacgacgtggatcacaacggggatcttctgtcgcaacccctacaacgcgacgggcatctgcaaccggagctcctgcccgcttgccaacagccgctatgccaccatccgggatcatgaaggtattttctatctgtatatgaaaaccgccgaaagagctcatctgccaaacaaattatgggagagagtcaaactgccgaagaattatgagaaagcaatggaagtcataaacaaacatcttgaattttggcctaagctacttgtgcacaagatcaaacagcggctgacaaaaatgactcaatatcgtataagaatgaggaaacttcaactgaaagtgagggagaaggtcatgacaatgcccaggaagcaaacacagcgtgatctccggagaatggagaaagctgaaagggctgctcaactagaaaggaatattgaaaatgaattgaaggaacgcctgaacaaaggtgtttatgctgacatctataatgttcccttcaaagcgtttgatgaggttcttgatatggaaagagatgaagtggttcttgaagaagaggaggaagaagaaggtgaggtatatgttgaaggcgatgacatggaagagatggatgacatggaagactttgaaggcctcagtgatggaggcacagatgaagatgatgttttggatgatcccgtatcaaagaaacccaagggatcctcttcttattcgaagcaaaatgtcgggaaaaggtctaggaaggttatgactgaggtggaagaagacgaggagataaatacgaggcaaaggcaaagggcgtgagtgcgaaatgtgcaactgcaacgacggttatatgatgttagatgccggcaggcgccacttctgctgtatgttggatcattttatacttgccttcgtactgtaacgcggagtgctgagacgtcaattaattttggccgtggtttacatggcctaatatgttatgagcaagaaaaagaaacgggtgataactcagttgaggatgtgggagaccatctagttttcgaggtgaatttaggtatctatttttgtaagttacagattggtttagctttgttctttgttacgaggaaaaccagagtcatgcgtttactaacacattctgagttgtcattgaggatttgggatatcctaagatcctaggtgagtagcctaaaccgcatctttcgttgactgtatcaaggaggcaacagtagctacaaaatcacatcccggtttcgtttctaatgtcgagcactttctcatatctttaatactcctagttaatatggaggtatgctacattatagcctattgcactcatgggtgccaaatgttcgtgttggttgggatttctgcccgtgtgtcttggcgctactgtctggttgtgtttctgtgtgtctccctttttccttttcaaattgaa

SEQ ID NO: 77851 - DNA, 1854 bp, Zea Mays
atgcaaacctactgtattgggctgcatgcgctaactagccgcaggcccacctatcctttccagggcacacaccagaaacgacctggattccatcatgtacgtccatatctcatcggtcggcttgcaagttgcatcagccagcagcaactcgccaatgaagccactgcccgcccgcgcgccgcattcccaaaccctactataccccgctcctctcctccccgtctgccggctcccttcttcttcgctgtcgacgacgcggactccccgccgcgctccctctctcaggcctcgcggggtgatcagaggcggctgggagactcgtgcgctccgacgagtccggttacggcgcggtaattaagcaggggaggagccggccctgagcggcggagtccaaaatgagtgacgacgtggtatggcactgcatccgccacaaccactgcagcttcatgtccaagatcacaacggggatcttctgtcgcaacccctacaacgcgacgggcatctgcaaccggagctcctgcccgcttgccaacagccgctatgccaccatccgggatcatgaaggtattttctatctgtatatgaaaaccgccgaaagagctcatctgccaaacaaattatgggagagagtcaaactgccgaagaattatgagaaagcaatggaagtcataaacaaacatcttgaattttggcctaagctacttgtgcacaagatcaaacagcggctgacaaaaatgactcaatatcgtataagaatgaggaaacttcaactgaaagtgagggagaaggtcatgacaatgcccaggaagcaaacacagcgtgatctccggagaatggagaaagctgaaagggctgctcaactagaaaggaatattgaaaatgaattgaaggaacgcctgaacaaaggtgtttatgctgacatctataatgttcccttcaaagcgtttgatgaggttcttgatatggaaagagatgaagtggttcttgaagaagaggaggaagaagaaggtgaggtatatgttgaaggcgatgacatggaagagatggatgacatggaagactttgaaggcctcagtgatgatgaagatgatgttttggatgatcccgtatcaaagaaacccaagggatcctcttcttattcgaagcaaaatgtcgggaaaaggtctaggaaggttatgactgaggtggaagaagacgaggagataaatacgaggcaaaggcaaagggcgtgagtgcgaaatgtgcaactgcaacgacggttatatgatgttagatgccggcaggcgccacttctgctgtatgttggatcattttatacttgccttcgtactgtaacgcggagtgctgagacgtcaattaattttggccgtggtttacatggcctaatatgttatgagcaagaaaaagaaacgggtgataactcagttgaggatgtgggagaccatctagttttcgaggtgaatttaggtatctatttttgtaagttacagattggtttagctttgttctttgttacgaggaaaaccagagtcatgcgtttactaacacattctgagttgtcattgaggatttgggatatcctaagatcctaggtgagtagcctaaaccgcatctttcgttgactgtatcaaggaggcaacagtagctacaaaatcacatcccggtttcgtttctaatgtcgagcactttctcatatctttaatactcctagttaatatggaggtatgctacattatagcctattgcactcatgggtgccaaatgttcgtgttggttgggatttctgcccgtgtgtcttggcgctactgtctggttgtgtttctgtgtgtctccctttttccttttcaaattgaa

SEQ ID NO: 77852 - DNA, 1709 bp, Zea Mays
atgcaaacctactgtattgggctgcatgcgctaactagccgcaggcccacctatcctttccagggcacacaccagaaacgacctggattccatcatgtacgtccatatctcatcggtcggcttgcaagttgcatcagccagcagcaactcgccaatgaagccactgcccgcccgcgcgccgcattcccaaaccctactataccccgctcctctcctccccgtctgccggctcccttcttcttcgctgtcgacgacgcggactccccgccgcgctccctctctcaggcctcgcggggtgatcagaggcggctgggagactcgtgcgctccgacgagtccggttacggcgcggtaattaagcaggggaggagccggccctgagcggcggagtccaaaatgagtgacgacgtggtattttctatctgtatatgaaaaccgccgaaagagctcatctgccaaacaaattatgggagagagtcaaactgccgaagaattatgagaaagcaatggaagtcataaacaaacatcttgaattttggcctaagctacttgtgcacaagatcaaacagcggctgacaaaaatgactcaatatcgtataagaatgaggaaacttcaactgaaagtgagggagaaggtcatgacaatgcccaggaagcaaacacagcgtgatctccggagaatggagaaagctgaaagggctgctcaactagaaaggaatattgaaaatgaattgaaggaacgcctgaacaaaggtgtttatgctgacatctataatgttcccttcaaagcgtttgatgaggttcttgatatggaaagagatgaagtggttcttgaagaagaggaggaagaagaaggtgaggtatatgttgaaggcgatgacatggaagagatggatgacatggaagactttgaaggcctcagtgatggaggcacagatgaagatgatgttttggatgatcccgtatcaaagaaacccaagggatcctcttcttattcgaagcaaaatgtcgggaaaaggtctaggaaggttatgactgaggtggaagaagacgaggagataaatacgaggcaaaggcaaagggcgtgagtgcgaaatgtgcaactgcaacgacggttatatgatgttagatgccggcaggcgccacttctgctgtatgttggatcattttatacttgccttcgtactgtaacgcggagtgctgagacgtcaattaattttggccgtggtttacatggcctaatatgttatgagcaagaaaaagaaacgggtgataactcagttgaggatgtgggagaccatctagttttcgaggtgaatttaggtatctatttttgtaagttacagattggtttagctttgttctttgttacgaggaaaaccagagtcatgcgtttactaacacattctgagttgtcattgaggatttgggatatcctaagatcctaggtgagtagcctaaaccgcatctttcgttgactgtatcaaggaggcaacagtagctacaaaatcacatcccggtttcgtttctaatgtcgagcactttctcatatctttaatactcctagttaatatggaggtatgctacattatagcctattgcactcatgggtgccaaatgttcgtgttggttgggatttctgcccgtgtgtcttggcgctactgtctggttgtgtttctgtgtgtctccctttttccttttcaaattgaa

SEQ ID NO: 77853 - DNA, 2558 bp, Zea Mays
acggaatggacgggaaccccgaaccccaaattgatccgatccactcaccttttttccccttctaatttcactttcacctcctccgccaccagttcggggaaaaggaatttttggagaaaaatcccattggcccagcccagaatactcagccgcgcgccgcgaccttcgctcccgtctccggtctccgcctgccccccgtccccaacctatcgggagcgctcccgattcgcgggagcgagagaaatagagtgccccccgctctccgctctccgccgcggatcagcgccgtcgccgatcggaggccctcgcttccgccggcgggcggcgcgagccgggagatggacggcggcgcgggtgccggtcggaggagcgtcccctcctcctccggattcaggaggagggtcccgcccgccgagaacgggcacggccatgacgccccgccgccctccaggcggtcctccgcctccctctcccgcggccactccacgccgctgactggcgagaggaccgtgaaaaggctgaggttgtccaaggcactgacgataccggatcacacgaccgtgcacgaggcttgtcggaggatggcatcacgcagggtagatgccgtgttactgaccgactccaatgctttgctctgtgggatccttaccgacaaggacataaccacaagagtgattgctcgtgagttgaagatggaagagacactggtctccaaggtcatgactagaaaccctgtatttgttctcgcggacacgcttgccgttgaggcgttgcaaaagatggtgcaaggtaagttcagacatctgcctgttgttgagaatggtgaagtcattgcaattctggacatagccaagtgcctatatgatgctattgcacggatggaaagggcggcggagaaaggaaaagcgatcgccgctgctgttgagggcgttgaaaagcattggggaacagctgtatctggtcctaacaattttattgagactcttcgagaacggatgtttaggccatcactgtctaccattatctctgagaattcaaagtggtcactgttgtaccatcagacacggtgttgacagcatcaaagaagatgctggaactaaaaatgagttcagcagttgtagcaatcgaaagcaaacctgggggaattctgacatctagagatatcctgatgcgtgttatcgcccaaaatcttcctcctgagtccactacagtcgagaaggtcatgactcagtgtcctgaatgtgcctcggtagacaccccaattcttgatgctcttcacacaatgcatgatggaaaatttttacatttgcctgttctggacagggatggaaatgttgtgactgttgttgatgttcttcacataacgcatgctgcaattgctacggttggaaacagcggggcagctggatctgagtcaacgtctgccatgatgcagaggttctgggattcagcaatgtccattggacctcttgatgatgatgatgactccaccagaagcgaaggatcgacaaaggtggcatctgaggcagcagatataggaagatcagccttgtttccagcttctgctttatcaaacacttttgggttcaagattcaggacaagcaagggagaatgcacagatttaactgtgaaacgagcagcttgacagacctgataactagcattcttcagagggtcggcgatgacattgacagaaaacacctgccacaaattttgtatgaagatgaggaccatgataaggtcatattgtcgtcggacagtgaccttatagctgccgtagaccacgcaagacaaatcggttggaaggtagcgtcgtttcccaagcaaaggtgcgcccttgtttcctgcccaaagatgctcatcgacgctcctctttgcagagcctaaggctgcacttggactacgcccgccggaagagaggggacggttcctcagacttcgagtacgctggcaaggatgcatgggcttctgcatacagtgctgtcgcggcaggggcggctctggttgctgggctcggcgtgatggcttacttgaaacggtcagggtaatagcttgaggcaagcacggcagggactagggagcacggttttgatcgtctttgtgatacaagtgccacttcatcggaattggcagaatggctgtgtaagtaattcttgtgagagaggaaaaaaatgaagattttaataatactactgtcaaggcagtgaatggtcccttcatacaagtacacggaactgatcgagttttttttggtgggttgagacttgagagtcaccatggctgtcagcttcgtcacgattgtatttattatcataaaaacacatgattcattgtacaagaagagtcttgatagaccttcttcatgcagcgtctggctgattagaatttatccaaggcgatttttgtccatagttactagctcttgctgcaacctgcaatgtactaagctccttgttccagcagacaccagattttttgtatgatactgtgactaaaattttgctctccacagaccatgcgtgtatgaagacatgattttttttgtcatagttttttt

SEQ ID NO: 77854 - DNA, 2462 bp, Zea Mays
acggaatggacgggaaccccgaaccccaaattgatccgatccactcaccttttttccccttctaatttcactttcacctcctccgccaccagttcggggaaaaggaatttttggagaaaaatcccattggcccagcccagaatactcagccgcgcgccgcgaccttcgctcccgtctccggtctccgcctgccccccgtccccaacctatcgggagcgctcccgattcgcgggagcgagagaaatagagtgccccccgctctccgctctccgccgcggatcagcgccgtcgccgatcggaggccctcgcttccgccggcgggcggcgcgagccgggagatggacggcggcgcgggtgccggtcggaggagcgtcccctcctcctccggattcaggaggagggtcccgcccgccgagaacgggcacggccatgacgccccgccgccctccaggcggtcctccgcctccctctcccgcggccactccacgccgctgactggcgagaggaccgtgaaaaggctgaggttgtccaaggcactgacgataccggatcacacgaccgtgcacgaggcttgtcggaggatggcatcacgcagggtagatgccgtgttactgaccgactccaatgctttgctctgtgggatccttaccgacaaggacataaccacaagagtgattgctcgtgagttgaagatggaagagacactggtctccaaggtcatgactagaaaccctgtatttgttctcgcggacacgcttgccgttgaggcgttgcaaaagatggtgcaaggtaagttcagacatctgcctgttgttgagaatggtgaagtcattgcaattctggacatagccaagtgcctatatgatgctattgcacggatggaaagggcggcggagaaaggaaaagcgatcgccgctgctgttgagggcgttgaaaagcattggggaacagctgtatctggtcctaacaattttattgagactcttcgagaacggatgtttaggccatcactgtctaccattatctctgagaattcaaaacacggtgttgacagcatcaaagaagatgctggaactaaaaatgagttcagcagttgtagcaatcgaaagcaaacctgggggaattctgacatctagagatatcctgatgcgtgttatcgcccaaaatcttcctcctgagtccactacagtcgagaaggtcatgactcagtgtcctgaatgtgcctcggtagacaccccaattcttgatgctcttcacacaatgcatgatggaaaatttttacatttgcctgttctggacagggatggaaatgttgtgactgttgttgatgttcttcacataacgcatgctgcaattgctacggttggaaacagcggggcagctggatctgagtcaacgtctgccatgatgcagaggttctgggattcagcaatgtccattggacctcttgatgatgatgatgactccaccagaagcgaaggatcgacaaaggtggcatctgaggcagcagatataggaagatcagccttgtttccagcttctgctttatcaaacacttttgggttcaagattcaggacaagcaagggagaatgcacagatttaactgtgaaacgagcagcttgacagacctgataactagcattcttcagagggtcggcgatgacattgacagaaaacacctgccacaaattttgtatgaagatgaggaccatgataaggtcatattgtcgtcggacagtgaccttatagctgccgtagaccacgcaagacaaatcggttggaagagcctaaggctgcacttggactacgcccgccggaagagaggggacggttcctcagacttcgagtacgctggcaaggatgcatgggcttctgcatacagtgctgtcgcggcaggggcggctctggttgctgggctcggcgtgatggcttacttgaaacggtcagggtaatagcttgaggcaagcacggcagggactagggagcacggttttgatcgtctttgtgatacaagtgccacttcatcggaattggcagaatggctgtgtaagtaattcttgtgagagaggaaaaaaatgaagattttaataatactactgtcaaggcagtgaatggtcccttcatacaagtacacggaactgatcgagttttttttggtgggttgagacttgagagtcaccatggctgtcagcttcgtcacgattgtatttattatcataaaaacacatgattcattgtacaagaagagtcttgatagaccttcttcatgcagcgtctggctgattagaatttatccaaggcgatttttgtccatagttactagctcttgctgcaacctgcaatgtactaagctccttgttccagcagacaccagattttttgtatgatactgtgactaaaattttgctctccacagaccatgcgtgtatgaagacatgattttttttgtcatagttttttt

SEQ ID NO: 77855 - DNA, 2086 bp, Zea Mays
acggaatggacgggaaccccgaaccccaaattgatccgatccactcaccttttttccccttctaatttcactttcacctcctccgccaccagttcggggaaaaggaatttttggagaaaaatcccattggcccagcccagaatactcagccgcgcgccgcgaccttcgctcccgtctccggtctccgcctgccccccgtccccaacctatcgggagcgctcccgattcgcgggagcgagagaaatagagtgccccccgctctccgctctccgccgcggatcagcgccgtcgccgatcggaggccctcgcttccgccggcgggcggcgcgagccgggagatggacggcggcgcgggtgccggtcggaggagcgtcccctcctcctccggattcaggaggagggtcccgcccgccgagaacgggcacggccatgacgccccgccgccctccaggcggtcctccgcctccctctcccgcggccactccacggcggcggagaaaggaaaagcgatcgccgctgctgttgagggcgttgaaaagcattggggaacagctgtatctggtcctaacaattttattgagactcttcgagaacggatgtttaggccatcactgtctaccattatctctgagaattcaaaagtggtcactgttgtaccatcagacacggtgttgacagcatcaaagaagatgctggaactaaaaatgagttcagcagttgtagcaatcgaaagcaaacctgggggaattctgacatctagagatatcctgatgcgtgttatcgcccaaaatcttcctcctgagtccactacagtcgagaaggtcatgactcagtgtcctgaatgtgcctcggtagacaccccaattcttgatgctcttcacacaatgcatgatggaaaatttttacatttgcctgttctggacagggatggaaatgttgtgactgttgttgatgttcttcacataacgcatgctgcaattgctacggttggaaacagcggggcagctggatctgagtcaacgtctgccatgatgcagaggttctgggattcagcaatgtccattggacctcttgatgatgatgatgactccaccagaagcgaaggatcgacaaaggtggcatctgaggcagcagatataggaagatcagccttgtttccagcttctgctttatcaaacacttttgggttcaagattcaggacaagcaagggagaatgcacagatttaactgtgaaacgagcagcttgacagacctgataactagcattcttcagagggtcggcgatgacattgacagaaaacacctgccacaaattttgtatgaagatgaggaccatgataaggtcatattgtcgtcggacagtgaccttatagctgccgtagaccacgcaagacaaatcggttggaagagcctaaggctgcacttggactacgcccgccggaagagaggggacggttcctcagacttcgagtacgctggcaaggatgcatgggcttctgcatacagtgctgtcgcggcaggggcggctctggttgctgggctcggcgtgatggcttacttgaaacggtcagggtaatagcttgaggcaagcacggcagggactagggagcacggttttgatcgtctttgtgatacaagtgccacttcatcggaattggcagaatggctgtgtaagtaattcttgtgagagaggaaaaaaatgaagattttaataatactactgtcaaggcagtgaatggtcccttcatacaagtacacggaactgatcgagttttttttggtgggttgagacttgagagtcaccatggctgtcagcttcgtcacgattgtatttattatcataaaaacacatgattcattgtacaagaagagtcttgatagaccttcttcatgcagcgtctggctgattagaatttatccaaggcgatttttgtccatagttactagctcttgctgcaacctgcaatgtactaagctccttgttccagcagacaccagattttttgtatgatactgtgactaaaattttgctctccacagaccatgcgtgtatgaagacatgattttttttgtcatagttttttt

SEQ ID NO: 77856 - DNA, 1989 bp, Zea Mays
acggaatggacgggaaccccgaaccccaaattgatccgatccactcaccttttttccccttctaatttcactttcacctcctccgccaccagttcggggaaaaggaatttttggagaaaaatcccattggcccagcccagaatactcagccgcgcgccgcgaccttcgctcccgtctccggtctccgcctgccccccgtccccaacctatcgggagcgctcccgattcgcgggagcgagagaaatagagtgccccccgctctccgctctccgccgcggatcagcgccgtcgccgatcggaggccctcgcttccgccggcgggcggcgcgagccgggagatggacggcggcgcgggtgccggtcggaggagcgtcccctcctcctccggattcaggaggagggtcccgcccgccgagaacgggcacggccatgacgccccgccgccctccaggcggtcctccgcctccctctcccgcggccactccacgtcctaacaattttattgagactcttcgagaacggatgtttaggccatcactgtctaccattatctctgagaattcaaaacacggtgttgacagcatcaaagaagatgctggaactaaaaatgagttcagcagttgtagcaatcgaaagcaaacctgggggaattctgacatctagagatatcctgatgcgtgttatcgcccaaaatcttcctcctgagtccactacagtcgagaaggtcatgactcagtgtcctgaatgtgcctcggtagacaccccaattcttgatgctcttcacacaatgcatgatggaaaatttttacatttgcctgttctggacagggatggaaatgttgtgactgttgttgatgttcttcacataacgcatgctgcaattgctacggttggaaacagcggggcagctggatctgagtcaacgtctgccatgatgcagaggttctgggattcagcaatgtccattggacctcttgatgatgatgatgactccaccagaagcgaaggatcgacaaaggtggcatctgaggcagcagatataggaagatcagccttgtttccagcttctgctttatcaaacacttttgggttcaagattcaggacaagcaagggagaatgcacagatttaactgtgaaacgagcagcttgacagacctgataactagcattcttcagagggtcggcgatgacattgacagaaaacacctgccacaaattttgtatgaagatgaggaccatgataaggtcatattgtcgtcggacagtgaccttatagctgccgtagaccacgcaagacaaatcggttggaagagcctaaggctgcacttggactacgcccgccggaagagaggggacggttcctcagacttcgagtacgctggcaaggatgcatgggcttctgcatacagtgctgtcgcggcaggggcggctctggttgctgggctcggcgtgatggcttacttgaaacggtcagggtaatagcttgaggcaagcacggcagggactagggagcacggttttgatcgtctttgtgatacaagtgccacttcatcggaattggcagaatggctgtgtaagtaattcttgtgagagaggaaaaaaatgaagattttaataatactactgtcaaggcagtgaatggtcccttcatacaagtacacggaactgatcgagttttttttggtgggttgagacttgagagtcaccatggctgtcagcttcgtcacgattgtatttattatcataaaaacacatgattcattgtacaagaagagtcttgatagaccttcttcatgcagcgtctggctgattagaatttatccaaggcgatttttgtccatagttactagctcttgctgcaacctgcaatgtactaagctccttgttccagcagacaccagattttttgtatgatactgtgactaaaattttgctctccacagaccatgcgtgtatgaagacatgattttttttgtcatagttttttt

SEQ ID NO: 77857 - DNA, 2474 bp, Zea Mays
acggaatggacgggaaccccgaaccccaaattgatccgatccactcaccttttttccccttctaatttcactttcacctcctccgccaccagttcggggaaaaggaatttttggagaaaaatcccattggcccagcccagaatactcagccgcgcgccgcgaccttcgctcccgtctccggtctccgcctgccccccgtccccaacctatcgggagcgctcccgattcgcgggagcgagagaaatagagtgccccccgctctccgctctccgccgcggatcagcgccgtcgccgatcggaggccctcgcttccgccggcgggcggcgcgagccgggagatggacggcggcgcgggtgccggtcggaggagcgtcccctcctcctccggattcaggaggagggtcccgcccgccgagaacgggcacggccatgacgccccgccgccctccaggcggtcctccgcctccctctcccgcggccactccacgccgctgactggcgagaggaccgtgaaaaggctgaggttgtccaaggcactgacgataccggatcacacgaccgtgcacgaggcttgtcggaggatggcatcacgcagggtagatgccgtgttactgaccgactccaatgctttgctctgtgggatccttaccgacaaggacataaccacaagagtgattgctcgtgagttgaagatggaagagacactggtctccaaggtcatgactagaaaccctgtatttgttctcgcggacacgcttgccgttgaggcgttgcaaaagatggtgcaaggtaagttcagacatctgcctgttgttgagaatggtgaagtcattgcaattctggacatagccaagtgcctatatgatgctattgcacggatggaaagggcggcggagaaaggaaaagcgatcgccgctgctgttgagggcgttgaaaagcattggggaacagctgtatctggtcctaacaattttattgagactcttcgagaacggatgtttaggccatcactgtctaccattatctctgagaattcaaaagtggtcactgttgtaccatcagacacggtgttgacagcatcaaagaagatgctggaactaaaaatgagttcagcagttgtagcaatcgaaagcaaacctgggggaattctgacatctagagatatcctgatgcgtgttatcgcccaaaatcttcctcctgagtccactacagtcgagaaggtcatgactcagtgtcctgaatgtgcctcggtagacaccccaattcttgatgctcttcacacaatgcatgatggaaaatttttacatttgcctgttctggacagggatggaaatgttgtgactgttgttgatgttcttcacataacgcatgctgcaattgctacgcggggcagctggatctgagtcaacgtctgccatgatgcagaggttctgggattcagcaatgtccattggacctcttgatgatgatgatgactccaccagaagcgaaggatcgacaaaggtggcatctgaggcagcagatataggaagatcagccttgtttccagcttctgctttatcaaacacttttgggttcaagattcaggacaagcaagggagaatgcacagatttaactgtgaaacgagcagcttgacagacctgataactagcattcttcagagggtcggcgatgacattgacagaaaacacctgccacaaattttgtatgaagatgaggaccatgataaggtcatattgtcgtcggacagtgaccttatagctgccgtagaccacgcaagacaaatcggttggaagagcctaaggctgcacttggactacgcccgccggaagagaggggacggttcctcagacttcgagtacgctggcaaggatgcatgggcttctgcatacagtgctgtcgcggcaggggcggctctggttgctgggctcggcgtgatggcttacttgaaacggtcagggtaatagcttgaggcaagcacggcagggactagggagcacggttttgatcgtctttgtgatacaagtgccacttcatcggaattggcagaatggctgtgtaagtaattcttgtgagagaggaaaaaaatgaagattttaataatactactgtcaaggcagtgaatggtcccttcatacaagtacacggaactgatcgagttttttttggtgggttgagacttgagagtcaccatggctgtcagcttcgtcacgattgtatttattatcataaaaacacatgattcattgtacaagaagagtcttgatagaccttcttcatgcagcgtctggctgattagaatttatccaaggcgatttttgtccatagttactagctcttgctgcaacctgcaatgtactaagctccttgttccagcagacaccagattttttgtatgatactgtgactaaaattttgctctccacagaccatgcgtgtatgaagacatgattttttttgtcatagttttttt

SEQ ID NO: 77858 - DNA, 2548 bp, Zea Mays
cgcaaacgcacgggcatccaatccaaccagaaatttcgctgtgctttgtgcgtatccaaacggaatggacgggaaccccgaaccccaaattgatccgatccactcaccttttttccccttctaatttcactttcacctcctccgccaccagttcggggaaaaggaatttttggagaaaaatcccattggcccagcccagaatactcagccgcgcgccgcgaccttcgctcccgtctccggtctccgcctgccccccgtccccaacctatcgggagcgctcccgattcgcgggagcgagagaaatagagtgccccccgctctccgctctccgccgcggatcagcgccgtcgccgatcggaggccctcgcttccgccggcgggcggcgcgagccgggagatggacggcggcgcgggtgccggtcggaggagcgtcccctcctcctccggattcaggaggagggtcccgcccgccgagaacgggcacggccatgacgccccgccgccctccaggcggtcctccgcctccctctcccgcggccactccacgccgctgactggcgagaggaccgtgaaaaggctgaggttgtccaaggcactgacgataccggatcacacgaccgtgcacgaggcttgtcggaggatggcatcacgcagggtagatgccgtgttactgaccgactccaatgctttgctctgtgggatccttaccgacaaggacataaccacaagagtgattgctcgtgagttgaagatggaagagacactggtctccaaggtcatgactagaaaccctgtatttgttctcgcggacacgcttgccgttgaggcgttgcaaaagatggtgcaaggtaagttcagacatctgcctgttgttgagaatggtgaagtcattgcaattctggacatagccaagtgcctatatgatgctattgcacggatggaaagggcggcggagaaaggaaaagcgatcgccgctgctgttgagggcgttgaaaagcattggggaacagctgtatctggtcctaacaattttattgagactcttcgagaacggatgtttaggccatcactgtctaccattatctctgagaattcaaagtagagtggtcactgttgtaccatcagacacggtgttgacagcatcaaagaagatgctggaactaaaaatgagttcagcagttgtagcaatcgaaagcaaacctgggggaattctgacatctagagatatcctgatgcgtgttatcgcccaaaatcttcctcctgagtccactacagtcgagaaggtcatgactcagtgtcctgaatgtgcctcggtagacaccccaattcttgatgctcttcacacaatgcatgatggaaaatttttacatttgcctgttctggacagggatggaaatgttgtgactgttgttgatgttcttcacataacgcatgctgcaattgctacggttggaaacagcggggcagctggatctgagtcaacgtctgccatgatgcagaggttctgggattcagcaatgtccattggacctcttgatgatgatgatgactccaccagaagcgaaggatcgacaaaggtggcatctgaggcagcagatataggaagatcagccttgtttccagcttctgctttatcaaacacttttgggttcaagattcaggacaagcaagggagaatgcacagatttaactgtgaaacgagcagcttgacagacctgataactagcattcttcagagggtcggcgatgacattgacagaaaacacctgccacaaattttgtatgaagatgaggaccatgataaggtcatattgtcgtcggacagtgaccttatagctgccgtagaccacgcaagacaaatcggttggaagagcctaaggctgcacttggactacgcccgccggaagagaggggacggttcctcagacttcgagtacgctggcaaggatgcatgggcttctgcatacagtgctgtcgcggcaggggcggctctggttgctgggctcggcgtgatggcttacttgaaacggtcagggtaatagcttgaggcaagcacggcagggactagggagcacggttttgatcgtctttgtgatacaagtgccacttcatcggaattggcagaatggctgtgtaagtaattcttgtgagagaggaaaaaaatgaagattttaataatactactgtcaaggcagtgaatggtcccttcatacaagtacacggaactgatcgagttttttttggtgggttgagacttgagagtcaccatggctgtcagcttcgtcacgattgtatttattatcataaaaacacatgattcattgtacaagaagagtcttgatagaccttcttcatgcagcgtctggctgattagaatttatccaaggcgatttttgtccatagttactagctcttgctgcaacctgcaatgtactaagctccttgttccagcagacaccagattttttgtatgatactgtgactaaaattttgctctccacagaccatgcgtgtatgaagacatgattttttttgtcatagttttttt

SEQ ID NO: 77859 - DNA, 1779 bp, Zea Mays
aagaaattaagaaaaaggcaagaaaggttatcttctccggttctccctcccctccctgtccggctgtcccctcgctgtacacagggtgtctgtctgtcaccgagcagcgggcagccggcaggcaatgcgatgatagtagctgctgctgcccctgcgccgccagttccagcaccaccgggcaaaccgccctttcctctctcctccttctccctccgccgccgcttgtggttctcaaacggcaacgcgcatggaagagacagcgccaccgccgccacgagcagcagggcgacgaggaggtggtggtggtccgaccccggcggcagccgagaagactacggctcctcttctctagaggaggaggaggacggttacgattaggcagcgttccccggatttggaggggccgcggcggagctgttcgacgagccctggttctccaaggaagacactccacaaagtatacttttactcaagcagacttgcaaaagtggtttgttgatgattgggataaaagagctcctgtaaaagcctctatcgatgggtgcaccaatgactttttaatggttgacctttctacaaaggacatgccagcgactaaagccgattcaatagatgttttatgtgattatatcatgacaatagaagacgatacgacactagagtaagtgctcattgatttatctattttatgtataccaactacttagattcttgatatagactttcgtcatgctacattacaggatgacatcagtgcgaagttttaattcttttaagatataaatatctgtcaaatacctgcaaaacatactaacgataaatcaagatatgattctaagatattttgacatggctgttcggctgcttgccaatagtcacgtaggccgaaaggagaaatcataaataatagaaagcattatatggacatgcgtttctcggtaagtttgtttccaatcattaatgtattaatatatagtatctacatctaatcctcatgtggacatgtatatatactgtccagagaatggttgttttggtaaacttccaaagtaccaccaggatcctacaacagaagagttagctaaaacactcgattgttggccatcaatgaattattatatcacgagttgtaggtatgtaagtatgtgttcatttcgaatgtatttataaaggacagttctttgcaatcctaatgactgatattttgcaggttcttatgccatggaaatttaacggatgtcacgcccttttcgttatagatcatgttaaaaagcatgtgacttttatcgactttacaccgactcaagattggtgtaaacacatgtcatacaagaggttcgcggaagcgattatcatgacctcaaagaaatataagattgcttacagcaagaaatgttctagatgggcggaggatatctttaagtgggaacatacaattcagactagtgttccaattgacttaagagggtttaatactagctacctcgttctacaagctatgaccatgtgggggaatgacagacaaatgaaatttgttgggaatgcaaagattctttgaaggaactttgtgattgatctgttaagttatgaagacaattcgtgccgatatgccatccctgcaaacatacaactgagacttatcgatatcgctaaaaaggattagctgattagtgtagggttgtcgacacatttgtttgtaattaaaaattctaaattaactttttagaaataatttgtgtaatattgataatattttccacacggattttgcatattata

SEQ ID NO: 77860 - DNA, 1095 bp, Zea Mays
ccatcagtcctgcactgtcatgatgaatgtagactaccgctcgaaagcaaccgtagttcaatcaacctttgtcataattgatcaggaaaatttctctgaagttgcatgcttctgaggtttgaaagcgtgctacacacgaattcctcagaaccttcctagcgactcgtgctttgtcataacaaaaaaagaactgagaacatcagaaagaaacggacttggctgcattctaccatgaggagtgacaaggttcacatcgtacccacaccgcttcaccacatccatcgcaaagcccgaatggggggcggtcgtcaagacggagaccgacgcgttccaagaccagtactaccctgccgtccacctcaacggcgccggcgccggcgccctcttccacgacaaggaccggaagcacctcccattcctgaccaaccacaacaatggatgccagccattcaccgtcaccacgacggcttcctcagagagcagcagcaagcacagcaacggcaactgtgctctctctcttctgtcagacaacccgacaccagcacaggcacagacggccacgatccctaccgcgcagcccctcgtcgccacggcatcgcagtacggcaggctccctggcggcgacgacgacgacgtctccctcgccgggatgtcgtacatgagggtgggagacagccggcaggcttccaatctgacaacgtcctcacccggtcctgccactgcagctgcaacacagcagcacctgcagtaccaccatggctactactaccatgtgagcggtggcgagcagggcaacaacagcccagatggcgccgccattcaggccctccccttctcgtcgtggtagacgcgcgactttctgatgaagatcatgtgctaggataggcaggcagtcgctcttgttgttcaccaaacacatgggttgtaacactaggctcggtcatactgaaaaaccatgacaaaaaatgtccatttttcagcttgttctgataggtctaatctatggaaaattcttccctaagttactatgtgattcagaatcgtgtaaaaatgcccactttcagttgcccacacggatgagcttgtgcaggcagg

SEQ ID NO: 77861 - DNA, 1200 bp, Zea Mays
ctcacccggacaacaagttgcccttctccagctctgttctctccgatgtccgtgtgtgtccctgccgtcgctgtggactgcgtggtttgcccatgctttccacattccttccatatgcttgtcaactccgactctctccagggcctcaatcacatgcatatcgtgttctagaagacgaggattcaattgatgagtaggagaggtgtttcatctgctcgaggagttcgacgaggtgaagcgaagctgcaggaagcgcctcgacggacacaaccggcgccgccgcaagccgcagccggaccctctcagccctgccggcttgtttggcgatcaccaccatggaggagtgacaaggttcacatcgtacccacaccgcttcaccacatccatcgcaaagcccgaatggggggcggtcgtcaagacggagaccgacgcgttccaagaccagtactaccctgccgtccacctcaacggcgccggcgccggcgccctcttccacgacaaggaccggaagcacctcccattcctgaccaaccacaacaatggatgccagccattcaccgtcaccacgacggcttcctcagagagcagcagcaagcacagcaacggcaactgtgctctctctcttctgtcagacaacccgacaccagcacaggcacagacggccacgatccctaccgcgcagcccctcgtcgccacggcatcgcagtacggcaggctccctggcggcgacgacgacgacgtctccctcgccgggatgtcgtacatgagggtgggagacagccggcaggcttccaatctgacaacgtcctcacccggtcctgccactgcagctgcaacacagcagcacctgcagtaccaccatggctactactaccatgtgagcggtggcgagcagggcaacaacagcccagatggcgccgccattcaggccctccccttctcgtcgtggtagacgcgcgactttctgatgaagatcatgtgctaggataggcaggcagtcgctcttgttgttcaccaaacacatgggttgtaacactaggctcggtcatactgaaaaaccatgacaaaaaatgtccatttttcagcttgttctgataggtctaatctatggaaaattcttccctaagttactatgtgattcagaatcgtgtaaaaatgcccactttcagttgcccacacggatgagcttgtgcaggcagg

SEQ ID NO: 77862 - DNA, 1044 bp, Zea Mays
aagcggccgcgcccgggccacgcgcagcaggcggcgccggcgtgctccgtgcagggctgcgacgccgacctgtcccagtgccgcgactaccaccgccgccacaaggtctgcgtggcgcactccaaggcgcccttcgtcaccgtcgccggccagcagcagcgcttctgccagcagtgcagcaggaggagtgacaaggttcacatcgtacccacaccgcttcaccacatccatcgcaaagcccgaatggggggcggtcgtcaagacggagaccgacgcgttccaagaccagtactaccctgccgtccacctcaacggcgccggcgccggcgccctcttccacgacaaggaccggaagcacctcccattcctgaccaaccacaacaatggatgccagccattcaccgtcaccacgacggcttcctcagagagcagcagcaagcacagcaacggcaactgtgctctctctcttctgtcagacaacccgacaccagcacaggcacagacggccacgatccctaccgcgcagcccctcgtcgccacggcatcgcagtacggcaggctccctggcggcgacgacgacgacgtctccctcgccgggatgtcgtacatgagggtgggagacagccggcaggcttccaatctgacaacgtcctcacccggtcctgccactgcagctgcaacacagcagcacctgcagtaccaccatggctactactaccatgtgagcggtggcgagcagggcaacaacagcccagatggcgccgccattcaggccctccccttctcgtcgtggtagacgcgcgactttctgatgaagatcatgtgctaggataggcaggcagtcgctcttgttgttcaccaaacacatgggttgtaacactaggctcggtcatactgaaaaaccatgacaaaaaatgtccatttttcagcttgttctgataggtctaatctatggaaaattcttccctaagttactatgtgattcagaatcgtgtaaaaatgcccactttcagttgcccacacggatgagcttgtgcaggcagg

SEQ ID NO: 77863 - DNA, 1348 bp, Zea Mays
aagcggccgcgcccgggccacgcgcagcaggcggcgccggcgtgctccgtgcagggctgcgacgccgacctgtcccagtgccgcgactaccaccgccgccacaaggtctgcgtggcgcactccaaggcgcccttcgtcaccgtcgccggccagcagcagcgcttctgccagcagtgcagcaggtttcatctgctcgaggagttcgacgaggtgaagcgaagctgcaggaagcgcctcgacggacacaaccggcgccgccgcaagccgcagccggaccctctcagccctgccggcttgtttggcgatcaccaccatggtaagtaagttcgcttctcacgccagtcggtttcggtttcagggagaaggcaaggcatgtcaattagatctgaacatgcatgcatgcatgagaactcggagctgacaacacttgtggcaccattgctatgcaaccaaacatttcacatgttacaggtgctgccatccaatgaggagtgacaaggttcacatcgtacccacaccgcttcaccacatccatcgcaaagcccgaatggggggcggtcgtcaagacggagaccgacgcgttccaagaccagtactaccctgccgtccacctcaacggcgccggcgccggcgccctcttccacgacaaggaccggaagcacctcccattcctgaccaaccacaacaatggatgccagccattcaccgtcaccacgacggcttcctcagagagcagcagcaagcacagcaacggcaactgtgctctctctcttctgtcagacaacccgacaccagcacaggcacagacggccacgatccctaccgcgcagcccctcgtcgccacggcatcgcagtacggcaggctccctggcggcgacgacgacgacgtctccctcgccgggatgtcgtacatgagggtgggagacagccggcaggcttccaatctgacaacgtcctcacccggtcctgccactgcagctgcaacacagcagcacctgcagtaccaccatggctactactaccatgtgagcggtggcgagcagggcaacaacagcccagatggcgccgccattcaggccctccccttctcgtcgtggtagacgcgcgactttctgatgaagatcatgtgctaggataggcaggcagtcgctcttgttgttcaccaaacacatgggttgtaacactaggctcggtcatactgaaaaaccatgacaaaaaatgtccatttttcagcttgttctgataggtctaatctatggaaaattcttccctaagttactatgtgattcagaatcgtgtaaaaatgcccactttcagttgcccacacggatgagcttgtgcaggcagg

SEQ ID NO: 77864 - DNA, 1071 bp, Zea Mays
ctcctagtcctaggctgctgagggagcaagcaaagcaacggaaacgaaaggcagcaccccaccgaaggcgaagaggtttcatctgctcgaggagttcgacgaggtgaagcgaagctgcaggaagcgcctcgacggacacaaccggcgccgccgcaagccgcagccggaccctctcagccctgccggcttgtttggcgatcaccaccatggaggagtgacaaggttcacatcgtacccacaccgcttcaccacatccatcgcaaagcccgaatggggggcggtcgtcaagacggagaccgacgcgttccaagaccagtactaccctgccgtccacctcaacggcgccggcgccggcgccctcttccacgacaaggaccggaagcacctcccattcctgaccaaccacaacaatggatgccagccattcaccgtcaccacgacggcttcctcagagagcagcagcaagcacagcaacggcaactgtgctctctctcttctgtcagacaacccgacaccagcacaggcacagacggccacgatccctaccgcgcagcccctcgtcgccacggcatcgcagtacggcaggctccctggcggcgacgacgacgacgtctccctcgccgggatgtcgtacatgagggtgggagacagccggcaggcttccaatctgacaacgtcctcacccggtcctgccactgcagctgcaacacagcagcacctgcagtaccaccatggctactactaccatgtgagcggtggcgagcagggcaacaacagcccagatggcgccgccattcaggccctccccttctcgtcgtggtagacgcgcgactttctgatgaagatcatgtgctaggataggcaggcagtcgctcttgttgttcaccaaacacatgggttgtaacactaggctcggtcatactgaaaaaccatgacaaaaaatgtccatttttcagcttgttctgataggtctaatctatggaaaattcttccctaagttactatgtgattcagaatcgtgtaaaaatgcccactttcagttgcccacacggatgagcttgtgcaggcagg

SEQ ID NO: 77865 - DNA, 1513 bp, Zea Mays
cttactacatcgtacggtacgacatgggggcgggattgttcggaggcagcagcaagcagagcggccacgcggtgtcgttcctcctcggcgcggcgctgcccactgccctactcttcttcctcgcgtccgaccgcctcggcgagggcttgtccaccatctccagcagctggcggggcaacgggtcgatatcgaccgcgcagcagcctgccgcggcaaagccggcgacgaccgatgctcatgctctgtccgccgccgccgccgacgcctccgatgcccgtgccgcgcctacgcaagatcacgagctggtatgcaggtagagttcgcgggccttgccgagctgctggcgagagtggcgacggaggacaggacggtgatcatgacgtcggtgaacgagatatggacgcggcccaactcgctgctcgacatcttcctcggcggcttgaggggcggcgaggacacagcgcacctcgtcgaccacgtcctcatcgtcaccgtcgacgccggctccttcagcggctgcaaggccgtgcacccgcactgctacctcctcgaggtcaagtccatggacatgaacagggccaagacgttcgggaccccggagtacgtggagatgatctggctcaagctctccatccagcagcgcgtcctggagctcggctacaacttcctcttcacggacgccgacatactgtggcttcgcaacccgttccagcgcatctccgtctacgccgacatgagctgctcggtggacaactccaagatggcgccggcgctcctggactgcgagaacaacgtcgggttctactacatgaagtcgacgaaccggagcgtcgagatggtcaggtactggcgggcggcgagggcgaggttcgacgggaacctgatcgagcaggtggtgttcaacaagatcaagtacgagctcatcagcaggctcggggccaggatccagccgctggagacggagtacatcagcggcttctgcgacttccaggatcatttcgacaaggtctgcaccgtgcacgccaactgctgcatggggctggagaacaaggtgcatgacctcaagagcgtcgccgcggattggaggaactacacgagcctgacgccggagcagaggaagctgcaggaggggagcttcaaggtgacgcccccgcgcatgtgccagaagtccatgggatgggtctgaactctgaaggagaccggagatgcatcagagaccgcggagtttcaggttgaaatgcagttcgagcatccaccgctgcgcctgcgcgcactagtaatgcgacctctcagctctgaataacatacacacacacggttgcttgttactcctgtatgataaaatgaaggtgtcatgcgacagagtttttttttagaaaccttttgcaaattactagacgggagagagagaatgttgcgaagcaattgccaagcacgaggaccctttgacttattactctcgtttccagatcaataaacagtcgttgtactgggtgatctacccttatttttc

SEQ ID NO: 77866 - DNA, 1343 bp, Zea Mays
ccgagatcgatcgatagacagggtagcagctagcccagacacacacatattggtctgtggccatatggcggggctggggtttccgaggagcaaggaggcggcccgtagccacgcggtgtcgttcctcctcggcgcggcgctgcccactgccctcctcttcttcctcgcgtccgaccgcctcggcgacggcttgtccaccatctcgcacagctgggggaacgggccggcgggcgacgacgaagcaaaccagcatgccatgttcaagggcctagccgagctgctgccgagagttgccatggacgacaggacggtgatcatcacgtcggtgaacgaggcgtgggcgcggcccggctccctgctggacctctacctcgacagcttcaggaacggccaggacaccgcgcacctcctcggccacctcctcgtggtcgcgctcgacgcccgcggcttccgccgctgccaggccgtgcaccctcactgctacctcctcctcaacgtcacgtcgtccgtggacatgagctccgccaagccgttcatgagcacggactacctggagctcgtctggaccaagctcgtcttccagcagcgcgtgctggagctcggctacaacttccttttcacggactgcgacatggtatggttccgcaacccgttccagcacttccccgtgtacgccgacatgagctgctcgtcggacgacttcaagccgtcgcgcgcgccgctggacaacccgctcaacacaggcctctactacatcaagtcgacgcaccggagcgtcgagatgatcaagtactggcgggcggccagggagaggttcccggggcagcacgaccaggccgtgttcgtcaacatcaggcacgagctcgtcaccaagctgcaggtcaggatcccagccgctggacacggtgtactatggagggatctgcgagtaccacgacgaccccgagaaggtctgcaccatccacgccgactgctgcgttgggctggacaccaaggtgcacgacctcaaggcctttgccgcggactggaagaactacaccagccaggcgccggaggagaggcagaaggctgctttcaagtggacctacccgactcggtgccgggattccataggttggcgtaagccttgactagcgcgcaatctcaagtgggtaacaggagccattgtataatatttttaaacatgacatacagacacccgagaatgtatgcacgcctgtccactgttaggactcctgcaacctttgctcaaaatctagtcgcttatgctcaaaatctagcaactagatacgatagaacttgagatatacctttatgttggtcaatgatgctattgagacggt

SEQ ID NO: 77867 - DNA, 1290 bp, Zea Mays
ggatgttatttttcacatatgctggtctgtgaaatgtatcgagattaacaaacagtcaaagatgtcttttgagacatcagcaagccgacttccagcgaacctgggttgcaccattacttggcacaataccgatgcttcagttgaaccttcgcactggcttgaagggtcaagtgttgttattgtggatccaccaaggaaaggattgcacccatctgttatcagcgctttacagaaagttgctttgtctgagcgcaaggcatacaaggctaaaagttcgcttgcaaaggttaaggatgagaagagaccatggatcttacgggcaagggaggctgcagttcatgttgataatacaacaactgaagagggcaatgaaacgtggcctgaaactctcatatacattagctgtggatgggaaagttttaagagggactgcaaaagcttgatatccagcaaggcctggcagttggaaaatgctcatgcttttaacttcttccctggcacagatagcattgaaattctggctatcttcaaacgggaatcagaagctggtcaaaagaaaaagaagaaagcaaaaaagaaggctaagtagattaacaaaaggctgatccaccttgcggattttgtatttttgtgaatcttaggcattgatccagaacttcagaatgagtgctcatgtctgttatgaggaattttgcatcgtccgaaccaatcaagtgaccaatatgacacaggtcactcaaaatgtagccgtccaaaagcgtcggctcggaatgaaagggtcttttttgctaatcataccggggacttggttttgcgtaccacccgtggtgacattgtgacaggcaagtgggtgtttgcacacaagctgcacgccgatggctctttccaccgatacaagtctcgttagatccttggcgggtcagtggcttggagttaactatgataacactttcagtcctacggtgaagttagccactatgtgcactgttctatctatggctctatctggttttggcttgtctatcaattggacgtcaagaacgtcttccttcgtggcactctgactgagataatgtattgcaaccagcagatcgtttttgtagattcagctcatttgaacattgtatgcaaactcaacaagtcattgtatgatctgaagcatgcaccttgagtttggtatggtcactttgcttcctttgtctcgctggactttgatgaggctaagtcagaactcatcgttgtttatctatcgccagtggtgacactatgtgtctacttctgtacgtcgat

SEQ ID NO: 77868 - DNA, 2385 bp, Zea Mays
cttaatccttatcccctccccacgtttccctcttcacttcccggttcccgcctgcatacggtacagtggtacacccaccgccggtgagccatgcctcccccggcggggctgcccccctggccgacgccgtccaccacgcgcctcgcgaccccgaccccgacgcggcctcctcctcgcaccacccacgttcggccgccgcctccaccttacactcgcgtccgccttcctccgcctccgcctgctacgacgccactgccgccccgcctggagcccgctgcgccaaaaccagcggccgtcgccacactcctgcctccctccactgcctctgcagcgtcttcttcgtccacctgcctcgactgcgtccattttggcaagtgctcagggtgcacgcacgaggtggacctcgacaagccgccggtgctgcaggaggtggcgaatttcttcaagggacacggggtcggagatttcaccttcagcaggggcaggctgtcccaatggcggtgccgagcaaagctagctgttcgtggaacaccagagaacccgttgattggtttataccaggaagggacgcatgctgttatagatattccagagtgcagagctcatcacccaagcattaatgctgctgttaagttgttaaggcaaggtataactgagctaagtattcagccatttgatgaagatgctggagctggtgaactcagatatgttcagatggccgtgacaacatataacacatctattccggttgataaaagatacgagcaagggaaagttcaagtttcattggtttggaattcaagagacgagcgctcccagaacgcagagaagctgacttcaataatagaatacttgtggacaaatggtgggccaaaaagtagtgtccatctcattcattctatatgggccaattttcagacatcaaccagcaacataatttttgggcataaatggagacatcttaagggggagagggacatgtgggagcgttatgggggagttgatatttctctggatccttgtagctttggccaggctaatactctgttcaacagttgttgatttgtactctggggctggtgttattggcctatcagttgctgcttcaaggaaatgtaggtctgtgaaatgtatcgagattaacaaacagtcaaagatgtcttttgagacatcagcaagccgacttccagcgaacctgggttgcaccattacttggcacaataccgatgcttcagttgaaccttcgcactggcttgaagggtcaagtgttgttattgtggatccaccaaggaaaggattgcacccatctgttatcagcgctttacagaaagttgctttgtctgagcgcaaggcatacaaggctaaaagttcgcttgcaaaggttaaggatgagaagagaccatggatcttacgggcaagggaggctgcagttcatgttgataatacaacaactgaagagggcaatgaaacgtggcctgaaactctcatatacattagctgtggatgggaaagttttaagagggactgcaaaagcttgatatccagcaaggcctggcagttggaaaatgctcatgcttttaacttcttccctggcacagatagcattgaaattctggctatcttcaaacgggaatcagaagctggtcaaaagaaaaagaagaaagcaaaaaagaaggctaagtagattaacaaaaggctgatccaccttgcggattttgtatttttgtgaatcttaggcattgatccagaacttcagaatgagtgctcatgtctgttatgaggaattttgcatcgtccgaaccaatcaagtgaccaatatgacacaggtcactcaaaatgtagccgtccaaaagcgtcggctcggaatgaaagggtcttttttgctaatcataccggggacttggttttgcgtaccacccgtggtgacattgtgacaggcaagtgggtgtttgcacacaagctgcacgccgatggctctttccaccgatacaagtctcgttagatccttggcgggtcagtggcttggagttaactatgataacactttcagtcctacggtgaagttagccactatgtgcactgttctatctatggctctatctggttttggcttgtctatcaattggacgtcaagaacgtcttccttcgtggcactctgactgagataatgtattgcaaccagcagatcgtttttgtagattcagctcatttgaacattgtatgcaaactcaacaagtcattgtatgatctgaagcatgcaccttgagtttggtatggtcactttgcttcctttgtctcgctggactttgatgaggctaagtcagaactcatcgttgtttatctatcgccagtggtgacactatgtgtctacttctgtacgtcgat

SEQ ID NO: 77869 - DNA, 2649 bp, Zea Mays
atggcggagagcgtggaagcagtcgggtcggcggagagcgaaggagcagaagcgtcgccggagaatgtagggttttcgccggtcgccggacgcagcggggcgaatattggagcgaggattggggacaccgaggacgcgccgctcaaatgtcgtttgcgactggatcgacagcgagcggcgaggggttggaagagtcgtcggaaaggggagcggagtcgccggggatggaagaatcgccggagaatcccggagtcgtggcggggttggggttttgcggttatggaaactgagccgggagcaaaggagctaatcgcgggatgcacgtcggtatttatatggaaaccgaaagggtgcacgcacgaggtggacctcgacaagccgccggtgctgcaggaggtggcgaatttcttcaagggacacggggtcggagatttcaccttcagcaggggcaggctgtcccaatggcggtgccgagcaaagctagctgttcgtggaacaccagagaacccgttgattggtttataccaggaagggacgcatgctgttatagatattccagagtgcagagctcatcacccaagcattaatgctgctgttaagttgttaaggcaaggtataactgagctaagtattcagccatttgatgaagatgctggagctggtgaactcagatatgttcagatggccgtgacaacatataacacatctattccggttgataaaagatacgagcaagggaaagttcaagtttcattggtttggaattcaagagacgagcgctcccagaacgcagagaagctgacttcaataatagaatacttgtggacaaatggtgggccaaaaagtagtgtccatctcattcattctatatgggccaattttcagacatcaaccagcaacataatttttgggcataaatggagacatcttaagggggagagggacatgtgggagcgttatgggggagttgatatttctctggatccttgtagctttggccaggctaatactctggtatgtgcacttaaattacccatactcatgtacaatttcaccaaatataccgtgctaaatttcaagaaaaaaatcttgacaattcaattggctgcaagctactcgatacccccgagtacatgtgccacctgttttgttgcgtgctcgagcaaggatctaaaatgtgtttgaagctagtgtatttagtgttagctatctcatgtaatttttctcgtaccatttccttgctatcacactgttttttttgcagtcatttaactctttgttgcataagctgaacaagtatgtaccacgtagttcaacagttgttgatttgtactctggggctggtgttattggcctatcagttgctgcttcaaggaaatgtaggtctgtgaaatgtatcgagattaacaaacagtcaaagatgtcttttgagacatcagcaagccgacttccagcgaacctgggttgcaccattacttggcacaataccgatgcttcagttgaaccttcgcactggcttgaagggtcaagtgttgttattgtggatccaccaaggaaaggattgcacccatctgttatcagcgctttacagaaagttgctttgtctgagcgcaaggcatacaaggctaaaagttcgcttgcaaaggttaaggatgagaagagaccatggatcttacgggcaagggaggctgcagttcatgttgataatacaacaactgaagagggcaatgaaacgtggcctgaaactctcatatacattagctgtggatgggaaagttttaagagggactgcaaaagcttgatatccagcaaggcctggcagttggaaaatgctcatgcttttaacttcttccctggcacagatagcattgaaattctggctatcttcaaacgggaatcagaagctggtcaaaagaaaaagaagaaagcaaaaaagaaggctaagtagattaacaaaaggctgatccaccttgcggattttgtatttttgtgaatcttaggcattgatccagaacttcagaatgagtgctcatgtctgttatgaggaattttgcatcgtccgaaccaatcaagtgaccaatatgacacaggtcactcaaaatgtagccgtccaaaagcgtcggctcggaatgaaagggtcttttttgctaatcataccggggacttggttttgcgtaccacccgtggtgacattgtgacaggcaagtgggtgtttgcacacaagctgcacgccgatggctctttccaccgatacaagtctcgttagatccttggcgggtcagtggcttggagttaactatgataacactttcagtcctacggtgaagttagccactatgtgcactgttctatctatggctctatctggttttggcttgtctatcaattggacgtcaagaacgtcttccttcgtggcactctgactgagataatgtattgcaaccagcagatcgtttttgtagattcagctcatttgaacattgtatgcaaactcaacaagtcattgtatgatctgaagcatgcaccttgagtttggtatggtcactttgcttcctttgtctcgctggactttgatgaggctaagtcagaactcatcgttgtttatctatcgccagtggtgacactatgtgtctacttctgtacgtcgat

SEQ ID NO: 77870 - DNA, 2399 bp, Zea Mays
atggcggagagcgtggaagcagtcgggtcggcggagagcgaaggagcagaagcgtcgccggagaatgtagggttttcgccggtcgccggacgcagcggggcgaatattggagcgaggattggggacaccgaggacgcgccgctcaaatgtcgtttgcgactggatcgacagcgagcggcgaggggttggaagagtcgtcggaaaggggagcggagtcgccggggatggaagaatcgccggagaatcccggagtcgtggcggggttggggttttgcggttatggaaactgagccgggagcaaaggagctaatcgcgggatgcacgtcggtatttatatggaaaccgaaagggtgcacgcacgaggtggacctcgacaagccgccggtgctgcaggaggtggcgaatttcttcaagggacacggggtcggagatttcaccttcagcaggggcaggctgtcccaatggcggtgccgagcaaagctagctgttcgtggaacaccagagaacccgttgattggtttataccaggaagggacgcatgctgttatagatattccagagtgcagagctcatcacccaagcattaatgctgctgttaagttgttaaggcaaggtataactgagctaagtattcagccatttgatgaagatgctggagctggtgaactcagatatgttcagatggccgtgacaacatataacacatctattccggttgataaaagatacgagcaagggaaagttcaagtttcattggtttggaattcaagagacgagcgctcccagaacgcagagaagctgacttcaataatagaatacttgtggacaaatggtgggccaaaaagtagtgtccatctcattcattctatatgggccaattttcagacatcaaccagcaacataatttttgggcataaatggagacatcttaagggggagagggacatgtgggagcgttatgggggagttgatatttctctggatccttgtagctttggccaggctaatactctgtcatttaactctttgttgcataagctgaacaagtatgtaccacgtagttcaacagttgttgatttgtactctggggctggtgttattggcctatcagttgctgcttcaaggaaatgtaggtctgtgaaatgtatcgagattaacaaacagtcaaagatgtcttttgagacatcagcaagccgacttccagcgaacctgggttgcaccattacttggcacaataccgatgcttcagttgaaccttcgcactggcttgaagggtcaagtgttgttattgtggatccaccaaggaaaggattgcacccatctgttatcagcgctttacagaaagttgctttgtctgagcgcaaggcatacaaggctaaaagttcgcttgcaaaggttaaggatgagaagagaccatggatcttacgggcaagggaggctgcagttcatgttgataatacaacaactgaagagggcaatgaaacgtggcctgaaactctcatatacattagctgtggatgggaaagttttaagagggactgcaaaagcttgatatccagcaaggcctggcagttggaaaatgctcatgcttttaacttcttccctggcacagatagcattgaaattctggctatcttcaaacgggaatcagaagctggtcaaaagaaaaagaagaaagcaaaaaagaaggctaagtagattaacaaaaggctgatccaccttgcggattttgtatttttgtgaatcttaggcattgatccagaacttcagaatgagtgctcatgtctgttatgaggaattttgcatcgtccgaaccaatcaagtgaccaatatgacacaggtcactcaaaatgtagccgtccaaaagcgtcggctcggaatgaaagggtcttttttgctaatcataccggggacttggttttgcgtaccacccgtggtgacattgtgacaggcaagtgggtgtttgcacacaagctgcacgccgatggctctttccaccgatacaagtctcgttagatccttggcgggtcagtggcttggagttaactatgataacactttcagtcctacggtgaagttagccactatgtgcactgttctatctatggctctatctggttttggcttgtctatcaattggacgtcaagaacgtcttccttcgtggcactctgactgagataatgtattgcaaccagcagatcgtttttgtagattcagctcatttgaacattgtatgcaaactcaacaagtcattgtatgatctgaagcatgcaccttgagtttggtatggtcactttgcttcctttgtctcgctggactttgatgaggctaagtcagaactcatcgttgtttatctatcgccagtggtgacactatgtgtctacttctgtacgtcgat

SEQ ID NO: 77871 - DNA, 2603 bp, Zea Mays
atggcggagagcgtggaagcagtcgggtcggcggagagcgaaggagcagaagcgtcgccggagaatgtagggttttcgccggtcgccggacgcagcggggcgaatattggagcgaggattggggacaccgaggacgcgccgctcaaatgtcgtttgcgactggatcgacagcgagcggcgaggggttggaagagtcgtcggaaaggggagcggagtcgccggggatggaagaatcgccggagaatcccggagtcgtggcggggttggggttttgcggttatggaaactgagccgggagcaaaggagctaatcgcgggatgcacgtcggtatttatatggaaaccgaaagggtgcacgcacgaggtggacctcgacaagccgccggtgctgcaggaggtggcgaatttcttcaagggacacggggtcggagatttcaccttcagcaggggcaggctgtcccaatggcggtgccgagcaaagctagctgttcgtggaacaccagagaacccgttgattggtttataccaggaagggacgcatgctgttatagatattccagagtgcagagctcatcacccaagcattaatgctgctgttaagttgttaaggcaaggtataactgagctaagtattcagccatttgatgaagatgctggagctggtgaactcagatatgttcagatggccgtgacaacatataacacatctattccggttgataaaagatacgagcaagggaaagttcaagtttcattggtttggaattcaagagacgagcgctcccagaacgcagagaagctgacttcaataatagaatacttgtggacaaatggtgggccaaaaagtagtgtccatctcattcattctatatgggccaattttcagacatcaaccagcaacataatttttgggcataaatggagacatcttaagggggagagggacatgtgggagcgttatgggggagttgatatttctctggatccttgtagctttggccaggctaatactctgtcatttaactctttgttgcataagctgaacaagtatgtaccacgtagttcaacagttgttgatttgtactctggggctggtgttattggcctatcagttgctgcttcaaggaaatgtaggtctgtgaaatgtatcgagattaacaaacagtcaaagatgtcttttgagacatcagcaagccgacttccagcgaacctgggttgcaccattacttggcacaataccgatgcttcagttgaaccttcgcactggcttgaagggtcaagtgttgttattgtggatccaccaaggaaaggattgcacccatctgttatcagcgctttacagaaagttgctttgtctgagcgcaaggcatacaaggctaaaagttcgcttgcaaaggttaaggatgagaagagaccatggatcttacgggcaagggaggctgcagttcatgttgataatacaacaactgaagagggcaatgaaacgtggcctgaaactctcatatacattagctgtggatgggaaagttttaagagggactgcaaaagcttgatatccagcaaggcctggcagttggaaaatgctcatgcttttaacttcttccctggcacagatagcattgaaattctggctatcttcaaacgggaatcagaagctggtcaaaagaaaaagaagaaagcaaaaaagaaggctaagtagattaacaaaaggctgatccaccttgcggattttgtatttttgtgaatcttaggcattgatccagaacttcagaatgagtgctcatgtctgttatgaggaattttgcatcgtccgaaccaatcaagtgaccaatatgacacagggtaattacagaaactttctcagctagaccaagtttttgcctgcacaggaaattatatcatagatcagcaacttcagttctgtagtatgaaataaaaataaacagaaaacacgcatatttcaatggttagacgactcttctgatatgcttcgtggacccttttattctactgatgaatcttcaacttttcatcttctatttctagtcactcaaaatgtagccgtccaaaagcgtcggctcggaatgaaagggtcttttttgctaatcataccggggacttggttttgcgtaccacccgtggtgacattgtgacaggcaagtgggtgtttgcacacaagctgcacgccgatggctctttccaccgatacaagtctcgttagatccttggcgggtcagtggcttggagttaactatgataacactttcagtcctacggtgaagttagccactatgtgcactgttctatctatggctctatctggttttggcttgtctatcaattggacgtcaagaacgtcttccttcgtggcactctgactgagataatgtattgcaaccagcagatcgtttttgtagattcagctcatttgaacattgtatgcaaactcaacaagtcattgtatgatctgaagcatgcaccttgagtttggtatggtcactttgcttcctttgtctcgctggactttgatgaggctaagtcagaactcatcgttgtttatctatcgccagtggtgacactatgtgtctacttctgtacgtcgat

SEQ ID NO: 77872 - DNA, 2494 bp, Zea Mays
cttaatccttatcccctccccacgtttccctcttcacttcccggttcccgcctgcatacggtacagtggtacacccaccgccggtgagccatgcctcccccggcggggctgcccccctggccgacgccgtccaccacgcgcctcgcgaccccgaccccgacgcggcctcctcctcgcaccacccacgttcggccgccgcctccaccttacactcgcgtccgccttcctccgcctccgcctgctacgacgccactgccgccccgcctggagcccgctgcgccaaaaccagcggccgtcgccacactcctgcctccctccactgcctctgcagcgtcttcttcgtccacctgcctcgactgcgtccattttggcaagtgctcagggtgcacgcacgaggtggacctcgacaagccgccggtgctgcaggaggtggcgaatttcttcaagggacacggggtcggagatttcaccttcagcaggggcaggctgtcccaatggcggtgccgagcaaagctagctgttcgtggaacaccagagaacccgttgattggtttataccaggaagggacgcatgctgttatagatattccagagtgcagagctcatcacccaagcattaatgctgctgttaagttgttaaggcaaggtataactgagctaagtattcagccatttgatgaagatgctggagctggtgaactcagatatgttcagatggccgtgacaacatataacacatctattccggttgataaaagatacgagcaagggaaagttcaagtttcattggtttggaattcaagagacgagcgctcccagaacgcagagaagctgacttcaataatagaatacttgtggacaaatggtgggccaaaaagtagtgtccatctcattcattctatatgggccaattttcagacatcaaccagcaacataatttttgggcataaatggagacatcttaagggggagagggacatgtgggagcgttatgggggagttgatatttctctggatccttgtagctttggccaggctaatactctgtcatttaactctttgttgcataagctgaacaagtatgtaccacgtagttcaacagttgttgatttgtactctggggctggtgttattggcctatcagttgctgcttcaaggaaatgtaggtctgtgaaatgtatcgagattaacaaacagtcaaagatgtcttttgagacatcagcaagccgacttccagcgaacctgggttgcaccattacttggcacaataccgatgcttcagttgaaccttcgcactggcttgaagggtcaagtgttgttattgtggatccaccaaggaaaggattgcacccatctgttatcagcgctttacagaaagttgctttgtctgagcgcaaggcatacaaggctaaaagttcgcttgcaaaggttaaggatgagaagagaccatggatcttacgggcaagggaggctgcagttcatgttgataatacaacaactgaagagggcaatgaaacgtggcctgaaactctcatatacattagctgtggatgggaaagttttaagagggactgcaaaagcttgatatccagcaaggcctggcagttggaaaatgctcatgcttttaacttcttccctggcacagatagagtttcatgctgccggtggacgaagaggtgctaatgttgaggtcttattccccgggtccaatgtggttggtagtggcagtgcaactgcaagtgattctgttcctcccgaaatgcacatgtatctaaaaaggaacatgagacttgtgattactgctaatactgaagaaggtgaagagggagaagagcgagatgatgaaggtcctgaaccaagttctgggacaaaaaacaagcaaacaaaaaagaaaattgcccaagctgccatgtcctcatttcttgtatctgctcctccaaaaccaagtacccagaaggcaagcaaatcagtgagtgccatgctctgcaagactccagaagaagtagttgcagagaggcataaaaacaaaacttctcagtccacccttgagcactgcacaaagaaagggacacaagcacagcaaattgttgacgaccatgtagctgattttctgtatgagaacaagattccattgaatgtcgtaaactcaagaagttgggagattatgttggagtctattggtcagtacggtcctggatatcatggcccatcgtatcatgaggctagagtaccttggcttgaaagggcagtgaagagaacatcgacattgagagataagcacgaagaggcttggaaggaatatggttgctcaattatgtcagatgggtggaccgacacaagacaacgtcatttgatcaacttccttgccaacagtccagcagggacatacttcctaggttctgttgatgcatcaagtgaggtagcaaatgccaatatgttggcagatctgttggagaagcaaataatgaaggtgggcaaagaacttccaatttaa

SEQ ID NO: 77873 - DNA, 1304 bp, Zea Mays
tttgtcgtctttgctccccagctctttttcccacgcccatttctcaaaaagcgagggcatgaccgccccggcgtcgccgcactgtttcctagtaaaagacgcccactctttggctcctcgcctccctcctcccctccgtctcatctcctccctgagtaacctgccccgtgtccgcgctcgcactcgcacagacatgcttcttgccgcgtcttgaaaggggagaaagtgaagatgggtgcttgcgcttcagttcacaaggacccggggtaccccaaggagcagtttcttgactcgcccaccaaggcggaagctgcaaacgagaagggcggctgcggcggcggtgacgatgactttgctgatttcaagtccaaggtcgacgctgagcagcagcgggcagagttgaaccccaagagcccggattctggtagcaaggatgaagtgttcttcgaatctcgagcttggttagattccgactgcgaggatgacttctacagcgtgaatggagatttcactccatctcgtggcagcacacccatccatcagcccagagcgcagacggtgatgagcaacatctttcaaccagacacgcacggttccaaatcaccggagccttctccaactggacggaggaagctagctgagctcctgcaggaggcaatgcaaaacggccccgaagaaagcaccgaccaggagctgcagttgcggtctgttgccgcagatgggaagccggtgtctgaatccacatccagctccgcttgcagcactgtgacgactccgatcgcagtcgctaacgccaagagccggaaggagaaggcgtggtacaccggacgctgttgcctgccgagctttgttcatagcctgaccttagatgagagtgagagggcgcagaagatgagctctaggccatgtgctgtttgacagtggggctccagtgccctcacggctcatgccctgagctatactgtaaaggagaagtattaagagtactgtatgtatagagagagggtaatcaagtggataatagctactagttaaatgctctgcacaccatgtttatcaattgcccttacctgtgtatatatatctaatcgaatctcaaatgtcaacagccagctgagctgtcctcttggcacttgcatttgcatgattgacgccagacaaatgtgttgttcattgctccattctattccaagtggaccttttaattttctctaaaaaacaaaagggtctctagctgagttggttaggtggtatgagtagcactacttaggtcctgagtttgaatttcagtggtagtgaatttc

SEQ ID NO: 77874 - DNA, 1282 bp, Zea Mays
tttgtcgtctttgctccccagctctttttcccacgcccatttctcaaaaagcgagggcatgaccgccccggcgtcgccgcactgtttcctagtaaaagacgcccactctttggctcctcgcctccctcctcccctccgtctcatctcctccctgagtaacctgccccgtgtccgcgctcgcactcgcacagacatgcttcttgccgcgtcttgaaaggggagaaagtgaagatgggtgcttgcgcttcagttcacaaggacccggggtaccccaaggagcagtttcttgactcgcccaccaaggcggaagctgcaaacgagaagggcggctgcggcggcggtgacgatgactttgctgatttcaagtccaaggtcgacgctgagcagcagcgggcagagttgaaccccaagagcccggattctggtagcaaggatgaagtgttcttcgaatctcgagcttggttagattccgactgcgaggatgacttctacagcgtgaatggagcacacccatccatcagcccagagcgcagacggtgatgagcaacatctttcaaccagacacgcacggttccaaatcaccggagccttctccaactggacggaggaagctagctgagctcctgcaggaggcaatgcaaaacggccccgaagaaagcaccgaccaggagctgcagttgcggtctgttgccgcagatgggaagccggtgtctgaatccacatccagctccgcttgcagcactgtgacgactccgatcgcagtcgctaacgccaagagccggaaggagaaggcgtggtacaccggacgctgttgcctgccgagctttgttcatagcctgaccttagatgagagtgagagggcgcagaagatgagctctaggccatgtgctgtttgacagtggggctccagtgccctcacggctcatgccctgagctatactgtaaaggagaagtattaagagtactgtatgtatagagagagggtaatcaagtggataatagctactagttaaatgctctgcacaccatgtttatcaattgcccttacctgtgtatatatatctaatcgaatctcaaatgtcaacagccagctgagctgtcctcttggcacttgcatttgcatgattgacgccagacaaatgtgttgttcattgctccattctattccaagtggaccttttaattttctctaaaaaacaaaagggtctctagctgagttggttaggtggtatgagtagcactacttaggtcctgagtttgaatttcagtggtagtgaatttc

SEQ ID NO: 77875 - DNA, 1420 bp, Zea Mays
cccagggctcagcatcctacatgccaccgtgtcatgtgcggactccttccacctcgaggctatgggtggggaggtgatctacctatcggtgaagacttcttccagatgagggaaaaggagaagtttgagaaggaagctgagaggcagaaagatcaaggaaatttggaagacaagagccaagtctaggcaaaagagaagaaattattgaaagttccttgcttgctatcaggccctcatcaagtaaagatggttatacggttaaccagaaggttgacccagaaacgccacatataaaggaggccaccatgtcagatgtatcaccaactaaagtaaccaaacacaacaatggggatctgctatatatgaaggaattatatcatgtgcttcccatggattatgtgacaatagccaaacttcaatgaaagccattgagtgagactgcttgcttctgtcctgtaatgaatactttatattttgttatggagggagtgccttcctctattgaatgaatactggcactgaatatataagacctcactgcacattgatatatgtggtattcagccattgagtgagactgcttgcttctgtcctgtaatgaaatctggcatctagaaaaaaaaagtaagattgcattgttcttttgtatgaggctgcatatggcgaggcgatgtctagtcagcacggaccagactatgactggaggacctcacctattgatcctcaggctgtgtatgcaagtggtggaaaagctcatggaaggtacacaatgtttgctaacgtcatcgactcgagccaggtgagggttcagcgtggaggttcgtcgaggtctgctgctcgtagctcccgtcgctccactcaagatctagcagaagtggagcaactgcgagaagaacttaggcgacatcaggattacttgaagcaacaagctgcgcaacatgaatattatgctacacagattcagcaacagcaaacactcatacaacaactagcagatgcccaagggatacacgtcccggtgcccccccccaccacctcccgttcattatccttggtcttcacctccacctatacctacatctccatctaccgaacatcagacccctccagctaccttgccgacgcatgaacaagaggacgggttagactttgtcgaaaccctcttcaacagtggaggtatcgatggtgatcggcgatcgtgagcttccatgttattgcgttctgatacttgagacttttattatgactatgtatgagatattgtcttttattagtattggatgatgatatgtgtgagacttttgtgatgtaattgatgacactatggatgagacttttgtgatgtaattgatgagactatggatttatatattgttatgtgattgtgtgtgagatgttttatgcgaaaatatgttgtgct

SEQ ID NO: 77876 - DNA, 2095 bp, Zea Mays
cacaagaatagtctagaacctgacgtcgctcttcttcccaccacgccgctcttcttcccaccgcgttcaggctccgcccgacgcccgacaccaacgaagccctccacaaaaaacggcacgcaactgtctccatctccatcggtgccaccgtccgtcctccgcgtgtctgacgacccgagcttggtgtttgacaaaatgtccatgtcgtctatcatggtcgtgtcatgcccagcgttcggagatcgtgctcacctactgcagctaatcgtataaagcgactttagctttcgtctgggaacaatttgttttttagttctcaatgtcaaatggtaggatgttggcgggctagaggatgtgaaaaggattcttctagatactattctggtaaattggacttggtttagcagtaaatatcagcaacaccaatacgacgctcaattatagctccctttgacgtataatcgcatgatttcttctaaattgcgcaagcgattaggtgtctgggtatatggacctccgggaacagggaagggctcagcatcctacatgccaccgtgtcatgtgcggactccttccacctcgaggctatgggtggggaggtgatctacctatcggtgaagacttcttccagatgagggaaaaggagaagtttgagaaggaagctgagaggcagaaagatcaaggaaatttggaagacaagagccaagtctaggcaaaagagaagaaattattgaaagttccttgcttgctatcaggccctcatcaagtaaagatggttatacggttaaccagaaggttgacccagaaacgccacatataaaggaggccaccatgtcagatgtatcaccaactaaagtaaccaaacacaacaatggggatctgctatatatgaaggtgaaccttctttgacctaatataatttgtctgcatatgtcacctgttaatataacatagtataaactaatctcgatatgcgaggggtaagacaacccccagtcattgtgttaaggaaacctcacatgatatataacataatattacaggaattatatcatgtgcttcccatggattatgtgacaatagccaaacttcaatgaaagccattgagtgagactgcttgcttctgtcctgtaatgaatactttatattttgttatggagggagtgccttcctctattgaatgaatactggcactgaatatataagacctcactgcacattgatatatgtggtattcagccattgagtgagactgcttgcttctgtcctgtaatgaaatctggcatctagaaaaaaaaagtaagattgcattgttcttttgtatgaggctgcatatggcgaggcgatgtctagtcagcacggaccagactatgactggaggacctcacctattgatcctcaggctgtgtatgcaagtggtggaaaagctcatggaaggtacacaatgtttgctaacgtcatcgactcgagccaggtgagggttcagcgtggaggttcgtcgaggtctgctgctcgtagctcccgtcgctccactcaagatctagcagaagtggagcaactgcgagaagaacttaggcgacatcaggattacttgaagcaacaagctgcgcaacatgaatattatgctacacagattcagcaacagcaaacactcatacaacaactagcagatgcccaagggatacacgtcccggtgcccccccccaccacctcccgttcattatccttggtcttcacctccacctatacctacatctccatctaccgaacatcagacccctccagctaccttgccgacgcatgaacaagaggacgggttagactttgtcgaaaccctcttcaacagtggaggtatcgatggtgatcggcgatcgtgagcttccatgttattgcgttctgatacttgagacttttattatgactatgtatgagatattgtcttttattagtattggatgatgatatgtgtgagacttttgtgatgtaattgatgacactatggatgagacttttgtgatgtaattgatgagactatggatttatatattgttatgtgattgtgtgtgagatgttttatgcgaaaatatgttgtgct

SEQ ID NO: 77877 - DNA, 6306 bp, Zea Mays
gctcttcttcccaccgcgttcaggctccgcccgacgcccgacaccaacgaagccctccacaaaaaacggcacgcaactgtctccatctccatcggtgccaccgtccgtcctccgcgtgtctgacgacccgagcttggtgtttgacaaaatgtccatgtcgtctatcatggtcgtgtcatgcccagcgttcggagatcgtgctcacctactgcagctaatcgtataaagcgactttagctttcgtctgggaacaatttgttttttagttctcaatgtcaaatggtaggatgttggcgggctagaggatgtgaaaaggattcttctagatactattctgctccctttgacgtataatcgcatgatttcttctaaattgcgcaagcgattaggtgtctgggtatatggacctccgggaacagggaaggtaggtttgaaaaagtttcacacgaattaaattatatttttttgtttagttaccataacaagtgcattctgtctcataggagacatccgataacaagtgcatcctaaagacatggaatcgctaaaatgaatgtccgttggacttctaggttttacttgcgaaagcctgaatactcactgaactttcgtagcgtcaaaggtccagaactgataaacatgtatgttgcagaaacagaaaagaatgtttaggatattttgaaaaggtatggaatttacatagccaagtaactgcccgaaacatcaataatttttcccagtttttacactttcaaccttaggctggagtccaaggagattttttccaatgcgtttttggcacaaaagtccaagtgaaattactttgctaagaatagcaaaatcattgaatatgtttacttggaaatagtcatttgccgagaacagttaccagggcgagaagcacgccacgcgcgcatgggcgcgcgacaggtactagtttatataaggttttgtattcttaggtttgtctctcctttgttctagagaattgatttaaatttcaccatttacgcactctataataaattattatgcattttttaaggcaaatacatcacctcaatatttgctctagtttcaccattgtcggctactacattgtcgcactagatctcacatcagatacctcgagatcaagaattgctaatgcctggttttaatgggatgaacacgtccggtggatgcaccgaagtgttcaaagagtacgcaagtttttttgccttacttccaacgttagattagacatagagactacaaatatcagttcaaccaactattcaagaagtgtgggaactaagaaacataaatagtatgttaagacttaagaccccattcatacaactctagatactaggtgctcaaagatcactcgatgattagtgaatatacttttataaagtgtttaggatagtaaactgatgtattagtgctttctatagactatgcatagtgattcagagtatgattagacaccctcaaacccaggggcgaagccagcctccagaattgttggtgtcgatttatttctaactcgtgtcatcaatactgtaaccaatgtttaaacagtattctacactgatttttcaaaaatcgttggaatctcaagctctagctccacccttgcgcaaaacgttcacgtttgtgtgtgtcattgtaactatgtcgcgccttaccctaccttgcctaggtcacgtcaagaccttgtatagacctcttgcaaagacaaatagagacgattcaatctcataggattatttaactgtcttaatattacatcaatatagtattattctaatattacgttactaggacaatgaaacctatatgtcacatgttttggattgacacatgtcatgtatgagatttatcggtccgaaattattctttgttggacaacctccgagtgaccaaccatattcgagtgtctatgtggagggatggaggcaggggcgaagccaggatttaagtttaggagggacaaataagattaggaggggttgctagaaggtattttacactatttacatgatggtcggctaagaaaattaatagctcctaacctcctgtagaattaggggagtattatggggacattgcctatgtgccctccctgtattcgccactggctggaggccagtccaaaattatcccttttcgaatagcctccaaggtacaacatggtatttatgacgaacctataaggttcaaacaaaatttcaacgcttacctacactattcttcattgtatcatattcagatgtgcaggtgtagaacaacagagttatgttgtcaaattttcatttgaactctatagattcattaagtgctcatcaataatttgtagaaggcactgaaggtgcaaaacaagcaacttcaatgctggtgtcaacacccgaagaatagcataccttcgattgtacacgtttaaggatcctcgccaaaggagttagacgtaggcttatgatggaatggtcaccacacttgagactttatggctagaaggccactgaccacgagaagcgaaagatttcagcactaatctccgacaaacttcctatcacatcttctatttttgaaagggaattaggcttacaccttttttctaattgattttggtggttgaattgtccaacacagatgattggactaactagtttgctctagattatatgttctatatgtgccaaaggttcatctacaactatactaaatcgactatctggaataccgtagattattccaaacaggataagctttctagaaaatcaggccaagcgcggaccgtccgggcccttgcggcggaccgtccgcgacaccactttgacttcgaccaggaactataaatcatggatagtccgactaaaccgcggaccgtccagctacaacgcgcggaccgtccggctataattcacggacagtccgcaggtgaagacctggttcagcccgaaggtgacaagttgagcaaaaggaattatatagctggcgcggaccgtccggaaccaagggcggaccgtccgcgtggtgtcaccgaggcagatagccgttgatctgtcagaagtatccgttgaagatgtcagaatcgaccgttggagggtcacggaccgtccgggccctagccgcggaccgtccgccagtgcaatttcgggcagatgcgccccaacgactatatgggtggttgagggctataaataccacccccaccggccacttcaatgtgtgggagcccaagcaacattccaagtcacatagttgacatactcaagccctcccaaccacatatattcattgatacatcctatacacaagatctagaccactacaaccgacacaagtgccacaaaagagagagcaggaaattgagagctactcaattgagtttagccctagtgccttgtgagattcattgagagatagtgtgtgctacatctttgtgttcatttgtgcgtggagttttgactcccattgaacttcctccaaagttttggaggcttgtaaaagctatcaagagacaccaaagagtgtggtggtccttgcgggatcgagagtgatccttgagaagaagaagagctcgccgatccttgagtgatcggtggagagagggaaagggttgaaaaagacccgtcctttagtggactcctcaacggggactaggccttcgagggccgaacctcggtaaaacaaatcacccgtgtctcgtgtgcttattgcttgtgatttgtttgtgctttctctttctaagtttgtcgtgcactactctttgctaattctatttggtgttgctttaagttaaactctcatttggtgaagcaacacattgcaagagagaacttgtgttattgctcttcttgcctaagccttcttgctttaaatctcatagacttattagtagtattgatttatcaattccacattatttgaaagcaatactctttacaagcaaggacttagtttttatactcctataattatatatatcttgttctaaccactaatcaagggatctagttgggggaaaaagtttttaatttcaggtttcgcctatccaccccccctctaggcgactttcaattggtatcagagctaggcacttcatcttgagtctaacaactcgaagtgatggctcgtagaagatcccaaaagaacaagaagactcctccatcgaacgtaactcaaaaggaggtaactcttgaaatattatttgatgattgttctaattatgactcatggtctactagtgtgataaatgcttttagaaccatagatccacgattagaacaaattatagacaagagtattttttcctctaatttcaatgaaaaaattaattccaaggaggatcaaagatgttatcgcttaaactatctagcttttgacatcttaactaattctcttagcaatgaagattatcgtgccttcatatcaaaatatgatgaacctattcatgatgcacatgatatttggactagaattaaaagcaaatttgatgagtccaaacatgatagttcattttatgcttctacttcctttggtatttgtgatactaacccttgcaaggaaaaggaagagaatgaacgatggagaccaaacgatgaatccacctctccaaaaggtttgccttcccatttcgattcccacatatgttgtgtggctaatgaaaatgatagggaaagcatcaatgaggatgaggaggaagaaagaagcttcttgcaactctacgctcgcctaagccaagaagataaggcggtcatgctcaaacttctagaaagagctagagagcaaagtgaagctcgtcaaaggctagaagatattctctccataaaaatgctacactttgacgagttgactaaagaacatgaggagctaaagtgctctcatgttgacttggtccaaaggtatgaaactatttcaattgagcaagataacgctttacattgtatcgctcaattagtaaataggaataccttgcttaaggaccaggtagaaaagctaaaagttgaaaatctagcttttcaagaaaaatatgatatgctcctatgctctcatgaaaatcttatggatgatcatatcatattagatattgctcatgaggttgtgatagaaaacttaaaatcccaacaacctcacttttacacatgtattcaaattgaaactatattaccatgtgttaatgcttgttgtccgtcgacaagcaaatcttcctttgagctagaatttgcaggaacaaacgatgatacatatcaaaagctcaaagaagaaaatgagaggctaaaaatgagcttgactcaactaaaagggaaatgcattgctcaaccttctcaagataaccgtgatcacatggtgaagaagcttgagacgggaacaaccgaggcatgcactaaatcccttgaagaaaatgtcaaggacttgaggattgccaagaggaggaatcaaaagaagaaaatcaatacctcttctaaaagcctcaaccatgcctccataaaaggtaacatccaaggtaataatcaagttacacttcatacaaatagaatcaagaagtgtagtgaatgctttgaagaggggcacttgattagatcatgtccctatattaaaaatggcttgattattaacaaggatgataaactttgttttaaatgttcaaggaagggacactttattaaatcttgtccccatttaaaacaaaagggcatagggttagaaaagaaagtttttactaaccatgtagcaagcaacaaacaaggaaagaagaaatcttcaaaacttggaaaacgcctatggtacacatgccgagaaaagggatatcaatgcaagggttgtcccattggtaactcctccactcatagcttgtcatttgattcatatataactaggcaacccaaaattgcaacttgtgctagaaaggcaatgaatttgccaagcgctagcacaaaggacatttgggttcctagatctttgttgactaaccataatggattcatcaagcgatgggtaccaaaacatacttgacaagctttgcaggagaaggagatgatatgaaactttgggtgcttgagagagtcaagtcaattcacattaactcaagctatcaatctacaatgatctacatatccaagattgacccaaggttatttcaaattattatgtctaaaactcatatcatctcgggaaaatattgatgttgtaggaaacaaagaactaatcccaagtcgaaaagtcaagacctacaacatggaggaaagccaaaggatggtaacaattatgcttttaagtgcaaacactacaccaaaatcatacacttcctacggtttt

SEQ ID NO: 77878 - DNA, 6190 bp, Zea Mays
cacaagaatagtctagaacctgacgtcgctcttcttcccaccacgccgctcttcttcccaccgcgttcaggctccgcccgacgcccgacaccaacgaagccctccacaaaaaacggcacgcaactgtctccatctccatcggtgccaccgtccgtcctccgcgtgtctgacgacccgagcttggtgtttgacaaaatgtccatgtcgtctatcatggtcgtgtcatgcccagcgttcggagatcgtgctcacctactgcagctaatcgtataaagcgactttagctttcgtctgggaacaatttgttttttagttctcaatgtcaaatggtaggatgttggcgggctagaggatgtgaaaaggattcttctagatactattctggtaaattggacttggtttagcagtaaatatcagcaacaccaatacgacgctcaattatagctccctttgacgtataatcgcatgatttcttctaaattgcgcaagcgattaggtgtctgggtatatggacctccgggaacagggaaggttttacttgcgaaagcctgaatactcactgaactttcgtagcgtcaaaggtccagaactgataaacatgtatgttgcagaaacagaaaagaatgtttaggatattttgaaaaggctggagtccaaggagattttttccaatgcgtttttggcacaaaagtccaagtgaaattactttgctaagaatagcaaaatcattgaatatgtttacttggaaatagtcatttgccgagaacagttaccagggcgagaagcacgccacgcgcgcatgggcgcgcgacaggtactagtttatataaggttttgtattcttaggtttgtctctcctttgttctagagaattgatttaaatttcaccatttacgcactctataataaattattatgcattttttaaggcaaatacatcacctcaatatttgctctagtttcaccattgtcggctactacattgtcgcactagatctcacatcagatacctcgagatcaagaattgctaatgcctggttttaatgggatgaacacgtccggtggatgcaccgaagtgttcaaagagtacgcaagtttttttgccttacttccaacgttagattagacatagagactacaaatatcagttcaaccaactattcaagaagtgtgggaactaagaaacataaatagtatgttaagacttaagaccccattcatacaactctagatactaggtgctcaaagatcactcgatgattagtgaatatacttttataaagtgtttaggatagtaaactgatgtattagtgctttctatagactatgcatagtgattcagagtatgattagacaccctcaaacccaggggcgaagccagcctccagaattgttggtgtcgatttatttctaactcgtgtcatcaatactgtaaccaatgtttaaacagtattctacactgatttttcaaaaatcgttggaatctcaagctctagctccacccttgcgcaaaacgttcacgtttgtgtgtgtcattgtaactatgtcgcgccttaccctaccttgcctaggtcacgtcaagaccttgtatagacctcttgcaaagacaaatagagacgattcaatctcataggattatttaactgtcttaatattacatcaatatagtattattctaatattacgttactaggacaatgaaacctatatgtcacatgttttggattgacacatgtcatgtatgagatttatcggtccgaaattattctttgttggacaacctccgagtgaccaaccatattcgagtgtctatgtggagggatggaggcaggggcgaagccaggatttaagtttaggagggacaaataagattaggaggggttgctagaaggtattttacactatttacatgatggtcggctaagaaaattaatagctcctaacctcctgtagaattaggggagtattatggggacattgcctatgtgccctccctgtattcgccactggctggaggccagtccaaaattatcccttttcgaatagcctccaaggtacaacatggtatttatgacgaacctataaggttcaaacaaaatttcaacgcttacctacactattcttcattgtatcatattcagatgtgcaggtgtagaacaacagagttatgttgtcaaattttcatttgaactctatagattcattaagtgctcatcaataatttgtagaaggcactgaaggtgcaaaacaagcaacttcaatgctggtgtcaacacccgaagaatagcataccttcgattgtacacgtttaaggatcctcgccaaaggagttagacgtaggcttatgatggaatggtcaccacacttgagactttatggctagaaggccactgaccacgagaagcgaaagatttcagcactaatctccgacaaacttcctatcacatcttctatttttgaaagggaattaggcttacaccttttttctaattgattttggtggttgaattgtccaacacagatgattggactaactagtttgctctagattatatgttctatatgtgccaaaggttcatctacaactatactaaatcgactatctggaataccgtagattattccaaacaggataagctttctagaaaatcaggccaagcgcggaccgtccgggcccttgcggcggaccgtccgcgacaccactttgacttcgaccaggaactataaatcatggatagtccgactaaaccgcggaccgtccagctacaacgcgcggaccgtccggctataattcacggacagtccgcaggtgaagacctggttcagcccgaaggtgacaagttgagcaaaaggaattatatagctggcgcggaccgtccggaaccaagggcggaccgtccgcgtggtgtcaccgaggcagatagccgttgatctgtcagaagtatccgttgaagatgtcagaatcgaccgttggagggtcacggaccgtccgggccctagccgcggaccgtccgccagtgcaatttcgggcagatgcgccccaacgactatatgggtggttgagggctataaataccacccccaccggccacttcaatgtgtgggagcccaagcaacattccaagtcacatagttgacatactcaagccctcccaaccacatatattcattgatacatcctatacacaagatctagaccactacaaccgacacaagtgccacaaaagagagagcaggaaattgagagctactcaattgagtttagccctagtgccttgtgagattcattgagagatagtgtgtgctacatctttgtgttcatttgtgcgtggagttttgactcccattgaacttcctccaaagttttggaggcttgtaaaagctatcaagagacaccaaagagtgtggtggtccttgcgggatcgagagtgatccttgagaagaagaagagctcgccgatccttgagtgatcggtggagagagggaaagggttgaaaaagacccgtcctttagtggactcctcaacggggactaggccttcgagggccgaacctcggtaaaacaaatcacccgtgtctcgtgtgcttattgcttgtgatttgtttgtgctttctctttctaagtttgtcgtgcactactctttgctaattctatttggtgttgctttaagttaaactctcatttggtgaagcaacacattgcaagagagaacttgtgttattgctcttcttgcctaagccttcttgctttaaatctcatagacttattagtagtattgatttatcaattccacattatttgaaagcaatactctttacaagcaaggacttagtttttatactcctataattatatatatcttgttctaaccactaatcaagggatctagttgggggaaaaagtttttaatttcaggtttcgcctatccaccccccctctaggcgactttcaattggtatcagagctaggcacttcatcttgagtctaacaactcgaagtgatggctcgtagaagatcccaaaagaacaagaagactcctccatcgaacgtaactcaaaaggaggtaactcttgaaatattatttgatgattgttctaattatgactcatggtctactagtgtgataaatgcttttagaaccatagatccacgattagaacaaattatagacaagagtattttttcctctaatttcaatgaaaaaattaattccaaggaggatcaaagatgttatcgcttaaactatctagcttttgacatcttaactaattctcttagcaatgaagattatcgtgccttcatatcaaaatatgatgaacctattcatgatgcacatgatatttggactagaattaaaagcaaatttgatgagtccaaacatgatagttcattttatgcttctacttcctttggtatttgtgatactaacccttgcaaggaaaaggaagagaatgaacgatggagaccaaacgatgaatccacctctccaaaaggtttgccttcccatttcgattcccacatatgttgtgtggctaatgaaaatgatagggaaagcatcaatgaggatgaggaggaagaaagaagcttcttgcaactctacgctcgcctaagccaagaagataaggcggtcatgctcaaacttctagaaagagctagagagcaaagtgaagctcgtcaaaggctagaagatattctctccataaaaatgctacactttgacgagttgactaaagaacatgaggagctaaagtgctctcatgttgacttggtccaaaggtatgaaactatttcaattgagcaagataacgctttacattgtatcgctcaattagtaaataggaataccttgcttaaggaccaggtagaaaagctaaaagttgaaaatctagcttttcaagaaaaatatgatatgctcctatgctctcatgaaaatcttatggatgatcatatcatattagatattgctcatgaggttgtgatagaaaacttaaaatcccaacaacctcacttttacacatgtattcaaattgaaactatattaccatgtgttaatgcttgttgtccgtcgacaagcaaatcttcctttgagctagaatttgcaggaacaaacgatgatacatatcaaaagctcaaagaagaaaatgagaggctaaaaatgagcttgactcaactaaaagggaaatgcattgctcaaccttctcaagataaccgtgatcacatggtgaagaagcttgagacgggaacaaccgaggcatgcactaaatcccttgaagaaaatgtcaaggacttgaggattgccaagaggaggaatcaaaagaagaaaatcaatacctcttctaaaagcctcaaccatgcctccataaaaggtaacatccaaggtaataatcaagttacacttcatacaaatagaatcaagaagtgtagtgaatgctttgaagaggggcacttgattagatcatgtccctatattaaaaatggcttgattattaacaaggatgataaactttgttttaaatgttcaaggaagggacactttattaaatcttgtccccatttaaaacaaaagggcatagggttagaaaagaaagtttttactaaccatgtagcaagcaacaaacaaggaaagaagaaatcttcaaaacttggaaaacgcctatggtacacatgccgagaaaagggatatcaatgcaagggttgtcccattggtaactcctccactcatagcttgtcatttgattcatatataactaggcaacccaaaattgcaacttgtgctagaaaggcaatgaatttgccaagcgctagcacaaaggacatttgggttcctagatctttgttgactaaccataatggattcatcaagcgatgggtaccaaaacatacttgacaagctttgcaggagaaggagatgatatgaaactttgggtgcttgagagagtcaagtcaattcacattaactcaagctatcaatctacaatgatctacatatccaagattgacccaaggttatttcaaattattatgtctaaaactcatatcatctcgggaaaatattgatgttgtaggaaacaaagaactaatcccaagtcgaaaagtcaagacctacaacatggaggaaagccaaaggatggtaacaattatgcttttaagtgcaaacactacaccaaaatcatacacttcctacggtttt

SEQ ID NO: 77879 - DNA, 6179 bp, Zea Mays
cacaagaatagtctagaacctgacgtcgctcttcttcccaccacgccgctcttcttcccaccgcgttcaggctccgcccgacgcccgacaccaacgaagccctccacaaaaaacggcacgcaactgtctccatctccatcggtgccaccgtccgtcctccgcgtgtctgacgacccgagcttggtgtttgacaaaatgtccatgtcgtctatcatggtcgtgtcatgcccagcgttcggagatcgtgctcacctactgcagctaatcgtataaagcgactttagctttcgtctgggaacaatttgttttttagttctcaatgtcaaatggtaggatgttggcgggctagaggatgtgaaaaggattcttctagatactattctggtaaattggacttggtttagcagtaaatatcagcaacaccaatacgacgctcaattatagctccctttgacgtataatcgcatgatttcttctaaattgcgcaagcgattaggtgtctgggtatatggacctccgggaacagggaaggagacatccgataacaagtgcatcctaaagacatggaatcgctaaaatgaatgtccgttggacttctagaaacagaaaagaatgtttaggatattttgaaaaggctggagtccaaggagattttttccaatgcgtttttggcacaaaagtccaagtgaaattactttgctaagaatagcaaaatcattgaatatgtttacttggaaatagtcatttgccgagaacagttaccagggcgagaagcacgccacgcgcgcatgggcgcgcgacaggtactagtttatataaggttttgtattcttaggtttgtctctcctttgttctagagaattgatttaaatttcaccatttacgcactctataataaattattatgcattttttaaggcaaatacatcacctcaatatttgctctagtttcaccattgtcggctactacattgtcgcactagatctcacatcagatacctcgagatcaagaattgctaatgcctggttttaatgggatgaacacgtccggtggatgcaccgaagtgttcaaagagtacgcaagtttttttgccttacttccaacgttagattagacatagagactacaaatatcagttcaaccaactattcaagaagtgtgggaactaagaaacataaatagtatgttaagacttaagaccccattcatacaactctagatactaggtgctcaaagatcactcgatgattagtgaatatacttttataaagtgtttaggatagtaaactgatgtattagtgctttctatagactatgcatagtgattcagagtatgattagacaccctcaaacccaggggcgaagccagcctccagaattgttggtgtcgatttatttctaactcgtgtcatcaatactgtaaccaatgtttaaacagtattctacactgatttttcaaaaatcgttggaatctcaagctctagctccacccttgcgcaaaacgttcacgtttgtgtgtgtcattgtaactatgtcgcgccttaccctaccttgcctaggtcacgtcaagaccttgtatagacctcttgcaaagacaaatagagacgattcaatctcataggattatttaactgtcttaatattacatcaatatagtattattctaatattacgttactaggacaatgaaacctatatgtcacatgttttggattgacacatgtcatgtatgagatttatcggtccgaaattattctttgttggacaacctccgagtgaccaaccatattcgagtgtctatgtggagggatggaggcaggggcgaagccaggatttaagtttaggagggacaaataagattaggaggggttgctagaaggtattttacactatttacatgatggtcggctaagaaaattaatagctcctaacctcctgtagaattaggggagtattatggggacattgcctatgtgccctccctgtattcgccactggctggaggccagtccaaaattatcccttttcgaatagcctccaaggtacaacatggtatttatgacgaacctataaggttcaaacaaaatttcaacgcttacctacactattcttcattgtatcatattcagatgtgcaggtgtagaacaacagagttatgttgtcaaattttcatttgaactctatagattcattaagtgctcatcaataatttgtagaaggcactgaaggtgcaaaacaagcaacttcaatgctggtgtcaacacccgaagaatagcataccttcgattgtacacgtttaaggatcctcgccaaaggagttagacgtaggcttatgatggaatggtcaccacacttgagactttatggctagaaggccactgaccacgagaagcgaaagatttcagcactaatctccgacaaacttcctatcacatcttctatttttgaaagggaattaggcttacaccttttttctaattgattttggtggttgaattgtccaacacagatgattggactaactagtttgctctagattatatgttctatatgtgccaaaggttcatctacaactatactaaatcgactatctggaataccgtagattattccaaacaggataagctttctagaaaatcaggccaagcgcggaccgtccgggcccttgcggcggaccgtccgcgacaccactttgacttcgaccaggaactataaatcatggatagtccgactaaaccgcggaccgtccagctacaacgcgcggaccgtccggctataattcacggacagtccgcaggtgaagacctggttcagcccgaaggtgacaagttgagcaaaaggaattatatagctggcgcggaccgtccggaaccaagggcggaccgtccgcgtggtgtcaccgaggcagatagccgttgatctgtcagaagtatccgttgaagatgtcagaatcgaccgttggagggtcacggaccgtccgggccctagccgcggaccgtccgccagtgcaatttcgggcagatgcgccccaacgactatatgggtggttgagggctataaataccacccccaccggccacttcaatgtgtgggagcccaagcaacattccaagtcacatagttgacatactcaagccctcccaaccacatatattcattgatacatcctatacacaagatctagaccactacaaccgacacaagtgccacaaaagagagagcaggaaattgagagctactcaattgagtttagccctagtgccttgtgagattcattgagagatagtgtgtgctacatctttgtgttcatttgtgcgtggagttttgactcccattgaacttcctccaaagttttggaggcttgtaaaagctatcaagagacaccaaagagtgtggtggtccttgcgggatcgagagtgatccttgagaagaagaagagctcgccgatccttgagtgatcggtggagagagggaaagggttgaaaaagacccgtcctttagtggactcctcaacggggactaggccttcgagggccgaacctcggtaaaacaaatcacccgtgtctcgtgtgcttattgcttgtgatttgtttgtgctttctctttctaagtttgtcgtgcactactctttgctaattctatttggtgttgctttaagttaaactctcatttggtgaagcaacacattgcaagagagaacttgtgttattgctcttcttgcctaagccttcttgctttaaatctcatagacttattagtagtattgatttatcaattccacattatttgaaagcaatactctttacaagcaaggacttagtttttatactcctataattatatatatcttgttctaaccactaatcaagggatctagttgggggaaaaagtttttaatttcaggtttcgcctatccaccccccctctaggcgactttcaattggtatcagagctaggcacttcatcttgagtctaacaactcgaagtgatggctcgtagaagatcccaaaagaacaagaagactcctccatcgaacgtaactcaaaaggaggtaactcttgaaatattatttgatgattgttctaattatgactcatggtctactagtgtgataaatgcttttagaaccatagatccacgattagaacaaattatagacaagagtattttttcctctaatttcaatgaaaaaattaattccaaggaggatcaaagatgttatcgcttaaactatctagcttttgacatcttaactaattctcttagcaatgaagattatcgtgccttcatatcaaaatatgatgaacctattcatgatgcacatgatatttggactagaattaaaagcaaatttgatgagtccaaacatgatagttcattttatgcttctacttcctttggtatttgtgatactaacccttgcaaggaaaaggaagagaatgaacgatggagaccaaacgatgaatccacctctccaaaaggtttgccttcccatttcgattcccacatatgttgtgtggctaatgaaaatgatagggaaagcatcaatgaggatgaggaggaagaaagaagcttcttgcaactctacgctcgcctaagccaagaagataaggcggtcatgctcaaacttctagaaagagctagagagcaaagtgaagctcgtcaaaggctagaagatattctctccataaaaatgctacactttgacgagttgactaaagaacatgaggagctaaagtgctctcatgttgacttggtccaaaggtatgaaactatttcaattgagcaagataacgctttacattgtatcgctcaattagtaaataggaataccttgcttaaggaccaggtagaaaagctaaaagttgaaaatctagcttttcaagaaaaatatgatatgctcctatgctctcatgaaaatcttatggatgatcatatcatattagatattgctcatgaggttgtgatagaaaacttaaaatcccaacaacctcacttttacacatgtattcaaattgaaactatattaccatgtgttaatgcttgttgtccgtcgacaagcaaatcttcctttgagctagaatttgcaggaacaaacgatgatacatatcaaaagctcaaagaagaaaatgagaggctaaaaatgagcttgactcaactaaaagggaaatgcattgctcaaccttctcaagataaccgtgatcacatggtgaagaagcttgagacgggaacaaccgaggcatgcactaaatcccttgaagaaaatgtcaaggacttgaggattgccaagaggaggaatcaaaagaagaaaatcaatacctcttctaaaagcctcaaccatgcctccataaaaggtaacatccaaggtaataatcaagttacacttcatacaaatagaatcaagaagtgtagtgaatgctttgaagaggggcacttgattagatcatgtccctatattaaaaatggcttgattattaacaaggatgataaactttgttttaaatgttcaaggaagggacactttattaaatcttgtccccatttaaaacaaaagggcatagggttagaaaagaaagtttttactaaccatgtagcaagcaacaaacaaggaaagaagaaatcttcaaaacttggaaaacgcctatggtacacatgccgagaaaagggatatcaatgcaagggttgtcccattggtaactcctccactcatagcttgtcatttgattcatatataactaggcaacccaaaattgcaacttgtgctagaaaggcaatgaatttgccaagcgctagcacaaaggacatttgggttcctagatctttgttgactaaccataatggattcatcaagcgatgggtaccaaaacatacttgacaagctttgcaggagaaggagatgatatgaaactttgggtgcttgagagagtcaagtcaattcacattaactcaagctatcaatctacaatgatctacatatccaagattgacccaaggttatttcaaattattatgtctaaaactcatatcatctcgggaaaatattgatgttgtaggaaacaaagaactaatcccaagtcgaaaagtcaagacctacaacatggaggaaagccaaaggatggtaacaattatgcttttaagtgcaaacactacaccaaaatcatacacttcctacggtttt

SEQ ID NO: 77880 - DNA, 2832 bp, Zea Mays
cacaagaatagtctagaacctgacgtcgctcttcttcccaccacgccgctcttcttcccaccgcgttcaggctccgcccgacgcccgacaccaacgaagccctccacaaaaaacggcacgcaactgtctccatctccatcggtgccaccgtccgtcctccgcgtgtctgacgacccgagcttggtgtttgacaaaatgtccatgtcgtctatcatggtcgtgtcatgcccagcgttcggagatcgtgctcacctactgcagctaatcgtataaagcgactttagctttcgtctgggaacaatttgttttttagttctcaatgtcaaatggtaggatgttggcgggctagaggatgtgaaaaggattcttctagatactattctggtaaattggacttggtttagcagtaaatatcagcaacaccaatacgacgctcaattatagctccctttgacgtataatcgcatgatttcttctaaattgcgcaagcgattaggtgtctgggtatatggacctccgggaacagggaagttgggggaaaaagtttttaatttcaggtttcgcctatccaccccccctctaggcgactttcaattggtatcagagctaggcacttcatcttgagtctaacaactcgaagtgatggctcgtagaagatcccaaaagaacaagaagactcctccatcgaacgtaactcaaaaggaggtaactcttgaaatattatttgatgattgttctaattatgactcatggtctactagtgtgataaatgcttttagaaccatagatccacgattagaacaaattatagacaagagtattttttcctctaatttcaatgaaaaaattaattccaaggaggatcaaagatgttatcgcttaaactatctagcttttgacatcttaactaattctcttagcaatgaagattatcgtgccttcatatcaaaatatgatgaacctattcatgatgcacatgatatttggactagaattaaaagcaaatttgatgagtccaaacatgatagttcattttatgcttctacttcctttggtatttgtgatactaacccttgcaaggaaaaggaagagaatgaacgatggagaccaaacgatgaatccacctctccaaaaggtttgccttcccatttcgattcccacatatgttgtgtggctaatgaaaatgatagggaaagcatcaatgaggatgaggaggaagaaagaagcttcttgcaactctacgctcgcctaagccaagaagataaggcggtcatgctcaaacttctagaaagagctagagagcaaagtgaagctcgtcaaaggctagaagatattctctccataaaaatgctacactttgacgagttgactaaagaacatgaggagctaaagtgctctcatgttgacttggtccaaaggtatgaaactatttcaattgagcaagataacgctttacattgtatcgctcaattagtaaataggaataccttgcttaaggaccaggtagaaaagctaaaagttgaaaatctagcttttcaagaaaaatatgatatgctcctatgctctcatgaaaatcttatggatgatcatatcatattagatattgctcatgaggttgtgatagaaaacttaaaatcccaacaacctcacttttacacatgtattcaaattgaaactatattaccatgtgttaatgcttgttgtccgtcgacaagcaaatcttcctttgagctagaatttgcaggaacaaacgatgatacatatcaaaagctcaaagaagaaaatgagaggctaaaaatgagcttgactcaactaaaagggaaatgcattgctcaaccttctcaagataaccgtgatcacatggtgaagaagcttgagacgggaacaaccgaggcatgcactaaatcccttgaagaaaatgtcaaggacttgaggattgccaagaggaggaatcaaaagaagaaaatcaatacctcttctaaaagcctcaaccatgcctccataaaaggtaacatccaaggtaataatcaagttacacttcatacaaatagaatcaagaagtgtagtgaatgctttgaagaggggcacttgattagatcatgtccctatattaaaaatggcttgattattaacaaggatgataaactttgttttaaatgttcaaggaagggacactttattaaatcttgtccccatttaaaacaaaagggcatagggttagaaaagaaagtttttactaaccatgtagcaagcaacaaacaaggaaagaagaaatcttcaaaacttggaaaacgcctatggtacacatgccgagaaaagggatatcaatgcaagggttgtcccattggtaactcctccactcatagcttgtcatttgattcatatataactaggcaacccaaaattgcaacttgtgctagaaaggcaatgaatttgccaagcgctagcacaaaggacatttgggttcctagatctttgttgactaaccataatggattcatcaagcgatgggtaccaaaacatacttgacaagctttgcaggagaaggagatgatatgaaactttgggtgcttgagagagtcaagtcaattcacattaactcaagctatcaatctacaatgatctacatatccaagattgacccaaggttatttcaaattattatgtctaaaactcatatcatctcgggaaaatattgatgttgtaggaaacaaagaactaatcccaagtcgaaaagtcaagacctacaacatggaggaaagccaaaggatggtaacaattatgcttttaagtgcaaacactacaccaaaatcatacacttcctacggtttt

SEQ ID NO: 77881 - DNA, 2623 bp, Zea Mays
gtttttgatggttgtaatcccagcttggtcacaaccccttagggtggctagggaagaggcggtgctctggtccttgactggagccaagaccctgtccttcctccaagttgatgagttgctggcttaaaacagcgttgtgggtcgtgtttcctccatgatagttggtgatccttagttagtctctagtggtgtgtgtgctgtaatggggttctctccccctttcttattcttctattaatacaaagatgtgcagctctcctgcgtattccagaaaaaacctcttattgacaaggtggctgatctcttaccggcttggaaagctgacatgatgacccgtgctggcaaagctacccaggtgcaatttgtgctcacggctactgttatttaccaaatgatggctctggatttacctaagtgggctattaaagcaattgataaaatccgccgcaggttcttgtggagagggcgtaaagaggctaatggtggccattgtatggtggcctggggcaaggtaacacgccccaaagagttggggggacttggtatctctgatcttcaatgcttaaatagggccctacgtgtaagatggatttggctccaaaaaacggattcttccaaaccgtggactgatttgacgttccaatcaaaccggtttttggatagcttgtgctccttggcaatggcctccatagtgggtgatgggcagtccactcttttttggcatgacagatggatcttgggtcagaggattgcagacttggcccctcatgtttttagtttggttcctaaaaggctggtgaagcgaaggacagtggctgatgctttggggatttaaggggagtggtaacatgggaggtcattgctgacttcattttgctggatgttgtggctgacgttgatcttcaatcgggagttccagataaacattattggaggttctcttccaatggtatctattcggccaaatctgcttatgagataatgttctgtggttctacctccctggcgggctttgaaagagtgtggaacacatgggcgccgactaagtgtcagtttttcctctggttggtcctacataataaatattggacgactgaccggctcgctaagaggggtcttccccatcctagttcttgccccttatgtggccaggaaggagagtctattcatcacttgcttgtttcctgtgtcctcgcgaggcaattttggtatcttctccaacgtgtcaacctgtccgcccttgcccccgggatggaagatatcaattttgaagcttggtggtgtagatcggctgaggttactcctaaggacctcagagatggctttaactccttggtgatcctgggggcttggactatctggagacaccacaatgactgtgttttcaaatggtgctcagccttctatagctggattgcttacctcaaccagtgatgagttcaatatgtggtgttttgcggggggccaaaggcttgacccgtctttcggacctagcttttgtattcaaccccggctaggtggcggttattcctcttgttgtgtgtgtgtgtgagtggtgtgttaggtcattgtaaataccatccttcttctaatgaaatgatacgcagctctcctgcgtgttcgagaaaaagataagttacctagttggaaagctgcattaatccatccagcagggagggcgacattagttaaataagtgcttacggcaatccctatcatctcatagcacttcaatgccccaaatgggttgtcaaggcaataaataaaatccggaggggatttctatggaaaggaagaactgatatagtgatatcaaaggaggtcattgtgttgttggttggactaaggtatgcaaaccagtgaaccaaggaggcaaggaggtttgggtttgcacaacttggaattcttggttgggtactaaacatgaggtgactttggcttaaaaaaactcaaccggacagaccatggactgtagttaatattcaaatacatccaaatgcagcagccctcttctcaacttatgtgtgttccattgttggtgacggatcttcgacccttttctggattgactgttggctccatgggcaatacattaagcagattgctccatctctgataagcattatttccaaaaggtttcagaataggagaatagtccaggaagctttgatagaaaacagatgggtgaatgatatcaatggaagtctgccggttcaagtgttatccgagtacttcaagatttgggccttgattcagggggtacagcttcatccagtattgaactgaaaaccctaaccagggttgggtgctatatttatttataatagatgttgggcctagcccgttacacaggataaacacagtaactctaaccctccccccccccccccgcgcacagtcgaaactctagccacgggagatgttgagactggaccgaaactccttgaacactgacgtagggaggcccttggtgaagatgtcggcgaactgagaagtggttgggacatgaagaacttgaacatttccgacggcaacccgctcgcgaacgaagcggaggtcgagcccgacatgcttcgtacgctgatgttggacggggttggagaggtacatggcgctgagattg

SEQ ID NO: 77882 - DNA, 793 bp, Zea Mays
tgggcttcagtttgttgtaaactaacatcttaatatatattattcaaataggcatgtagaaccacatggacatgttgctgcagacatttattgtaaaattaggtatccaacaaaaaatgtatcaacccttcaactaagaatggtctaagcaaaaatcaagagaaacattttaccaaaagtcgcatagctgcaatgaagttctgaaactaatgattctgatagtttgtcgattagatcctcctttcttgtttcattgcaacatccgactgaatgggatgataggtcgtcatcttcaaaagtatgcccatttgatggcagatgaaagaaaaataatccagcaggaaatctgtgcctcctcatcacccatagagttaactcagcataaggagtggattggattagagcaatgacaatttccagcatcacacacacccagataaccgttgttgtcaagatagagaagaatacatagaatacagaagttgtaggtataagaagtaggattggtgtaaacaacagggaaccaaccacgtgctgttcaactgtgtagtcataactatctaacctctgcctaagaggattccatttgcgccctctgttatggcattagcaagtgttagcaaacttacgaagcaaatatgaaaaaaaaactgacaggaaacaaacacctcatcagatgctatcgtaacaacttagcaatatttatggcatattaaataaaaaccatagaaaagttacaggcaacaaaaatgacaagaaataatattaaaaatagctaatgttttatggtgca

SEQ ID NO: 77883 - DNA, 1570 bp, Zea Mays
aaaattccctcaattaattgtcgaactcctcttccttttgcctcttcatttcaaattccagcttcttcctcgcggcgcactgcttgttcggtttgttcgaggcgacgaggccacaaatggtcatcgtgagtggcagcaacttccaaacggattcgtgacccttccgcgatggatcccgtctccaaaggtgcgtggcagaagcgattcttcagcgtcgcgccgccggcggcgctggtcttcttcttcgtgctgatattcgtcgccggtgcagccgtcacgctagatcataaggagttgcagccaaaactagtgactgcagcagcggagatgaggcctccagcgacgacgagcgagctgcgcgcagggccagcagaggaacccgacatctgtgagagtaaatgtagacctccaggcagcgaggcgttgccgcggggcatcgtgcaggacaagtccaacttggagatggagtcgatgggtggcaaccctgaacgtgaggagaacggcagcggcaggcggtcgaaaagcctcctcgccatccccgtcggcatcaagcagaaggcggtcgtcgacaagctcgtctccaagttcccggacaccaagttcaccgtgatgctgttccactacgacggcgaggtggacgggtggcgagacctcgagtggtcgggccgcgcggtccacgtcgccgcgcgcgaccagaccaagtggtggttcgccaagaggttcctgcacccggacctggtggcggagtacgactacgtcttcctctgggacgaggacgtcgaggtggacagcttcgacccgctcaggtacctgcgggtcgtgaggaaggaagggctcgaggtctcgcagccggcgctggaccgccggtcgcagatccaccacgggctcacggcccgcgcgcggcggggcggcggcgtccaccggcggtactacaagacgaaggggcacggcaggtgctacggcaacagcacgggcccgccgtgcacggggtgggtggagatgatggtgcccgtgttctcgcgcgcggcgtggcggtgcgcgtggcgcatggtccagaacgacctcgtctacgcgtggggaatggactacaagctcggctactgcgcgcagggcgaccggcgccgcaacgtcggcatcgtcgatagccagtacgtgctgcaccggggcatccccaccctcggcggcggcggcggcaacggcaacggcaagccttcgttctccgcttccgcgtcagcgttgggggcagaccggttagcggtcaggcagcggtcctacaccgagctgcaggtgttcaataggaggtggaagaaggccgtgtcggaggacgggtgctggactgacccttacccgaacacggcgaccaccggctgaccgttggacggaacgagacagctcagtagttggtagctgtcggattgacctcgtctagatgatggtagcagatcatacaccgcattactttacagattcagagagctcatatatgatgtacagattaaaaaaaaaatcctaactcttgactgttgtctatacaagggaaagagcaaattttgtactgtcaatcagttgt

SEQ ID NO: 77884 - DNA, 2348 bp, Zea Mays
aaggaacacccagaacggtcgctctcccccggccccgccgagatggacacgggctgcctccaaccaccctgcaacccctcctcgtcggaggcgtcgggaggcgacgcctccgacgcctgcggctccgcctctgcctcccggtcctcctccgcccgccgcagcaagggggtgcggctccggctccggctgcggcgaaggcggcaggagccgggccccgccgctacgcctgggggtgagggtcagggtggcgccggcgtgcaggtgcaggacgacctcgcgctgcccctcgggatgtcgttcgcggccgtcctcgcgcaggttgtgaatacaaagaatcgttcaggcgaaagattacagcctgcacttctttccaagactttggatgcagatctgtacatcggcagtgaaggaatcattgagaaatatatatggtaacaagttagacagttttatgagaaactttgagaaatcattcagcagcacattgacaacgcttcatcttgttaatgagatgcctgtctatggacaaggtccagttcctcaatgttcttctaagcatgaagactctgaagcttcaagcaagttgagcactggtggtacacaaaatctaacgcgtgaaatcaagcaggagcgtttgaattcagtggaaagtcagcttgttctttatgctggcggctatcagcagatgactcgccgcgctcatagcttatcttctcctgaagctgatcagcgcatccttaatgcatttgagagatctttgaaagaacaaactcggtcaaatgagctcaaggaatttgagataagccttagcatgagaaagttgaagctaaaacagtctcaactagaacttaactcctattcacacatgttagacaagattaagttatccttgggatttcagaaagcttccttccaagtggaaaaattcaagactcagatgcaggacacgaggcatgcacaaataatgaggacactcatagattttcttgttagtgcagtgattattatgtcagtatgctttgggtatggaacttatacttattcataccaaaggataactgatattacagcagcatgttcagccacttcaaagtgtcaaacttcaatactgggttgctcttcataagatgtcatgtaatagctgcaacacggatgttctttggtatagtaatgattttggcagttgtttggttagcgttccagcgctctgcggtgtctgtatcaagtatgccagtaacttttaacatcattctgttgggagttatttgtggctacgctggaaggttctgtaccaacacacttggtggtgatgggaacatgtggcttatatgctgggaggtactttgttccgtccatttgattggaaattgttatccatcggtcttgtaccgtgttctccatggtcctatatctgtatctcatagcaaggagtctgtctggttcccgtattggattcgccgttggatgttttatgctgtgctggggttttttatcccagccttgaatggcttactgccatttgcttctctttctgactggaataaccatttcactaaggagctaaaatccatcttcattgatgagagaatcgaagcctgaatgaatcatggatgcaacaattggtgcagtgttgtcctttttgtgccagcggtgcagccaaaggaaagcgaggactgaatgatctttagctgcaactagtgcacaatgtcaatgatttctgagaaatgaaatggttctgtttgagaagcgattcagaagttcagcttggtgttgtctcaagagaataatatatgggatggaagttataggcaccgttcaaggaataagttgactgtacactactgcaggagacgctagcattttgatccaactcaacgtgctttcatcagtgcctcctaccaccgcagtcaaagcttcagatgatctaggattttgacttttgagatcttcgtgtctcttcgacttcaaatgcctcgatttgccctaggcattttatgatgcaagtttacattacagttcagcgtgtaggcaggttcaccaccagttggaaattctgttgaattcgtttttgttgtctttgttgtagctcgataatttgtttttttcactgtaaatatcaagagccgtttatctggtactggctgcttactctttgtggttagtttatgtgcatgttatctccgggcttgagagaacacagcctgatgttgtacttgttcagtgtgttcatgtattgtaagtgcacttgcatttaagcccaaaaactaatgtaagattttgatgtgtacaatttttttatgggatcatatacccaatcatgtactccttcaggattgcggtggtttgct

SEQ ID NO: 77885 - DNA, 2282 bp, Zea Mays
aaggaacacccagaacggtcgctctcccccggccccgccgagatggacacgggctgcctccaaccaccctgcaacccctcctcgtcggaggcgtcgggaggcgacgcctccgacgcctgcggctccgcctctgcctcccggtcctcctccgcccgccgcagcaagggggtgcggctccggctccggctgcggcgaaggcggcaggagccgggccccgccgctacgcctgggggtgagggtcagggtggcgccggcgtgcaggtgcaggacgacctcgcgctgcccctcgggatgtcgttcgcggccgtcctcgcgcaggttgtgaatacaaagaatcgttcaggcgaaagattacagcctgcacttctttccaagatctgtacatcggcagtgaaggaatcattgagaaatcagcacattgacaacgcttcatcttgttaatgagatgcctgtctatggacaaggtccagttcctcaatgttcttctaagcatgaagactctgaagcttcaagcaagttgagcactggtggtacacaaaatctaacgcgtgaaatcaagcaggagcgtttgaattcagtggaaagtcagcttgttctttatgctggcggctatcagcagatgactcgccgcgctcatagcttatcttctcctgaagctgatcagcgcatccttaatgcatttgagagatctttgaaagaacaaactcggtcaaatgagctcaaggaatttgagataagccttagcatgagaaagttgaagctaaaacagtctcaactagaacttaactcctattcacacatgttagacaagattaagttatccttgggatttcagaaagcttccttccaagtggaaaaattcaagactcagatgcaggacacgaggcatgcacaaataatgaggacactcatagattttcttgttagtgcagtgattattatgtcagtatgctttgggtatggaacttatacttattcataccaaaggataactgatattacagcagcatgttcagccacttcaaagtgtcaaacttcaatactgggttgctcttcataagatgtcatgtaatagctgcaacacggatgttctttggtatagtaatgattttggcagttgtttggttagcgttccagcgctctgcggtgtctgtatcaagtatgccagtaacttttaacatcattctgttgggagttatttgtggctacgctggaaggttctgtaccaacacacttggtggtgatgggaacatgtggcttatatgctgggaggtactttgttccgtccatttgattggaaattgttatccatcggtcttgtaccgtgttctccatggtcctatatctgtatctcatagcaaggagtctgtctggttcccgtattggattcgccgttggatgttttatgctgtgctggggttttttatcccagccttgaatggcttactgccatttgcttctctttctgactggaataaccatttcactaaggagctaaaatccatcttcattgatgagagaatcgaagcctgaatgaatcatggatgcaacaattggtgcagtgttgtcctttttgtgccagcggtgcagccaaaggaaagcgaggactgaatgatctttagctgcaactagtgcacaatgtcaatgatttctgagaaatgaaatggttctgtttgagaagcgattcagaagttcagcttggtgttgtctcaagagaataatatatgggatggaagttataggcaccgttcaaggaataagttgactgtacactactgcaggagacgctagcattttgatccaactcaacgtgctttcatcagtgcctcctaccaccgcagtcaaagcttcagatgatctaggattttgacttttgagatcttcgtgtctcttcgacttcaaatgcctcgatttgccctaggcattttatgatgcaagtttacattacagttcagcgtgtaggcaggttcaccaccagttggaaattctgttgaattcgtttttgttgtctttgttgtagctcgataatttgtttttttcactgtaaatatcaagagccgtttatctggtactggctgcttactctttgtggttagtttatgtgcatgttatctccgggcttgagagaacacagcctgatgttgtacttgttcagtgtgttcatgtattgtaagtgcacttgcatttaagcccaaaaactaatgtaagattttgatgtgtacaatttttttatgggatcatatacccaatcatgtactccttcaggattgcggtggtttgct

SEQ ID NO: 77886 - DNA, 2265 bp, Zea Mays
tcacaaagcgcaaggggggtggccctgccccggagaaaggaacacccagaacggtcgctctcccccggccccgccgagatggacacgggctgcctccaaccaccctgcaacccctcctcgtcggaggcgtcgggaggcgacgcctccgacgcctgcggctccgcctctgcctcccggtcctcctccgcccgccgcagcaagggggtgcggctccggctccggctgcggcgaaggcggcaggagccgggccccgccgctacgcctgggggtgagggtcagggtggcgccggcgtgcaggtgcaggacgacctcgcgctgcccctcgggatgtcgttcgcggccgtcctcgcgcaggttgtgaatacaaagaatcgttcaggcgaaagattacagcctgcacttctttccaagatctgtacatcggcagtgaaggaatcattgagaaatgtccagttcctcaatgttcttctaagcatgaagactctgaagcttcaagcaagttgagcactggtggtacacaaaatctaacgcgtgaaatcaagcaggagcgtttgaattcagtggaaagtcagcttgttctttatgctggcggctatcagcagatgactcgccgcgctcatagcttatcttctcctgaagctgatcagcgcatccttaatgcatttgagagatctttgaaagaacaaactcggtcaaatgagctcaaggaatttgagataagccttagcatgagaaagttgaagctaaaacagtctcaactagaacttaactcctattcacacatgttagacaagattaagttatccttgggatttcagaaagcttccttccaagtggaaaaattcaagactcagatgcaggacacgaggcatgcacaaataatgaggacactcatagattttcttgttagtgcagtgattattatgtcagtatgctttgggtatggaacttatacttattcataccaaaggataactgatattacagcagcatgttcagccacttcaaagtgtcaaacttcaatactgggttgctcttcataagatgtcatgtaatagctgcaacacggatgttctttggtatagtaatgattttggcagttgtttggttagcgttccagcgctctgcggtgtctgtatcaagtatgccagtaacttttaacatcattctgttgggagttatttgtggctacgctggaaggttctgtaccaacacacttggtggtgatgggaacatgtggcttatatgctgggaggtactttgttccgtccatttgattggaaattgttatccatcggtcttgtaccgtgttctccatggtcctatatctgtatctcatagcaaggagtctgtctggttcccgtattggattcgccgttggatgttttatgctgtgctggggttttttatcccagccttgaatggcttactgccatttgcttctctttctgactggaataaccatttcactaaggagctaaaatccatcttcattgatgagagaatcgaagcctgaatgaatcatggatgcaacaattggtgcagtgttgtcctttttgtgccagcggtgcagccaaaggaaagcgaggactgaatgatctttagctgcaactagtgcacaatgtcaatgatttctgagaaatgaaatggttctgtttgagaagcgattcagaagttcagcttggtgttgtctcaagagaataatatatgggatggaagttataggcaccgttcaaggaataagttgactgtacactactgcaggagacgctagcattttgatccaactcaacgtgctttcatcagtgcctcctaccaccgcagtcaaagcttcagatgatctaggattttgacttttgagatcttcgtgtctcttcgacttcaaatgcctcgatttgccctaggcattttatgatgcaagtttacattacagttcagcgtgtaggcaggttcaccaccagttggaaattctgttgaattcgtttttgttgtctttgttgtagctcgataatttgtttttttcactgtaaatatcaagagccgtttatctggtactggctgcttactctttgtggttagtttatgtgcatgttatctccgggcttgagagaacacagcctgatgttgtacttgttcagtgtgttcatgtattgtaagtgcacttgcatttaagcccaaaaactaatgtaagattttgatgtgtacaatttttttatgggatcatatacccaatcatgtactccttcaggattgcggtggtttgct

SEQ ID NO: 77887 - DNA, 846 bp, Zea Mays
cctgtggtgcgtcgggcgagatattttttgccaagctggcaggcacatgacacatcgccccagccccaagtccaaagccgcgagaggcaggggcgcagcaaaaccctagccgccttcccgtccttttcctttcataaaccccaagccgcgccgcaatagctcgccccctcgttcgccgcctctcctgctcctaccgcagctctccctcaggtttagtgttcgcaatggcggccttcaacaagcttggtggccttctaaggcacagtgctctggtgagcggtatcactggtggctcttctcctgcagtgttcaatgctgcacggctcatgtctaccaagctatttattggtggtcttgactggggtgttgatgacgtgaaactaagagaagcatttagcagctttggagaggttactgaagcgagggtgatcacagacagggagactgggaggtcaagaggctttggctttgtgaactactccgacagtgatgctgccaaggaagctatttctgcaatggatggcaaggaaattgatgggcggcaggtacgtgtcaacatggctaatgagagacctgctgggaaccgtggtggtggcggctatggtggcagccaaagctatgatgcttgaggggggcaggatcctattaagtgcattatcaaccaagatatttgaaataatgaactttaggacttggtatgacgttttatgttaagcattgtcaggttttgctattcgtgttatgctgaattgttggaactcctagatgcagaatattacgtattggttttggttccttcgagaagtgcaaatgcaagacgcatctattcccattgaaaaaaacaaa

SEQ ID NO: 77888 - DNA, 979 bp, Zea Mays
gttgaagcaacatgaatccgccgcacccagagccgggccttccccgccgccaccaccacatggtccacctccacctcgacccgcgccaccaccaccacgtccacatccacctccgctgctgccatcatcaccaccacggcacccacctgctcgctcctgcgccgccggcccgcctcaacgacaaccagcagcggcacccggctcccgtactcttccccaacacctacccgaacccaagcgcggcgcctgggcagccagagccgccccgcgccgccgtaagggaggacgtggaggatttggatcccgagccggggctgctgcacgcggaggaggaggaggaggaagacgaggagccggtgttcgtacttacggacgagtgggcggagttcttcgccaaatccgaggccaagagaagactgctaaacagcagaagaagaagagccggaagtgatctgatgtgtctgggccatcatcagacagtctggccagagtctggagctcgggaagagaacggacgaatagcttgtcaacatatacgcatcgctttgccaggagttcattatgttttttttttactttatacagagagttacgagttcacatgatctaaacactgtaaccttttgagttcacatcatctgaaatctgtgctgtatctattcggacttggagaaggaaaacgaaaacagtactatgacagtcgacaaggttataaagttatgatcttctcactcaccgtacaagacgcaacatcaagtttttgtaacctggctctgctactacaaatttcggtctcttaaagcttgcctgaaaatctgtaccatcagcaaataggtcactgtgcaccggtaatggtgacataagctgtctccacatcaatttaaccacctcatctcctacttcaaactttataaacaatgtaaagaggtattttgcataaccatacacacgatctgctggaataaccatctcagggctt

SEQ ID NO: 77889 - DNA, 1162 bp, Zea Mays
cgggcgagatattttttgccaagctggcaggcacatgacacatcgccccagccccaagtccaaagccgcgagaggcaggggcgcagcaaaaccctagccgccttcccgtccttttcctttcataaaccccaagccgcgccgcaatagctcgccccctcgttcgccgcctctcctgctcctaccgcagctctccctcaggtttagtgttcgcaatggcggccttcaacaagcttggtggccttctaaggcacagtgctctggtgagcggtatcactggtggctcttctcctgcagtgttcaatgctgcacggctcatgtctaccaagctatttattggtggtcttgactggggtgttgatgacgtgaaactaagagaagcatttagcagctttggagaggttactgaagcgagggtgatcacagacagggagactgggaggtcaagaggctttggggggcaggatcctattaagtgcattatcaaccaagatatttgaaataatgaactttaggacttggtatgacgttttatgttaagcattgtcaggttttgctattcgtgttatgctgaattgttggaactcctagatgcagaatattacgtattggttttggttccttcgagaagtgcaaatgcaagacgcatctattcccattgagtgaatacaggactaccacatgaagtatttgcttgaaaatttgcttagctaccctgtttattggtgggttttgtgtttttagtgtagctactttaattggaggtctacattcatcttgtctgttctcatcaattgaatttttttcgaatgagagcggttgtgctggctacaataaccttatcattcatatagaggacttaaagccaatttaacataaaccaaaccattgtcaggtttaagccaggtcaaaggatttggcgtctgaacatgacggaattttccttgtgccactcatattgattactgtgctcgttttttcctcctagacttttcctacctggaaaattaatatacagttaagtttttgtacaatcaaactatcaaaaaaaatcatatttgttttaaaaaagcataagctttaggagccatataaattaaacggactcgcagatacgtgagataggaaccctattagttcataattagccagttgtctgtgtttt

SEQ ID NO: 77890 - DNA, 1387 bp, Zea Mays
cgggcgagatattttttgccaagctggcaggcacatgacacatcgccccagccccaagtccaaagccgcgagaggcaggggcgcagcaaaaccctagccgccttcccgtccttttcctttcataaaccccaagccgcgccgcaatagctcgccccctcgttcgccgcctctcctgctcctaccgcagctctccctcagtgttcgcaatggcggccttcaacaagcttggtggccttctaaggcacagtgctctggtgagcggtatcactggtggctcttctcctgcagtgttcaatgctgcacggctcatgtctaccaagctatttattggtggtcttgactggggtgttgatgacgtgaaactaagagaagcatttagcagctttggagaggttactgaagcgagggtgatcacagacagggagactgggaggtcaagaggctttggctttgtgaactactccgacagtgatgctgccaaggaagctatttctgcaatggatggcaaggaaattgatgggcggcaggtacgtgtcaacatggctaatgagagacctgctgggaaccgtggtggtggcggctatggtggcggcggctatggaggtggtggctacggaggtggtggcggctacggaggtggtggctatggtggtggcagccaaagctatgatgcttgaggggggcaggatcctattaagtgcattatcaaccaagatatttgaaataatgaactttaggacttggtatgacgttttatgttaagcattgtcaggttttgctattcgtgttatgctgaattgttggaactcctagatgcagaatattacgtattggttttggttccttcgagaagtgcaaatgcaagacgcatctattcccattgagtgaatacaggactaccacatgaagtatttgcttgaaaatttgcttagctaccctgtttattggtgggttttgtgtttttagtgtagctactttaattggaggtctacattcatcttgtctgttctcatcaattgaatttttttcgaatgagagcggttgtgctggctacaataaccttatcattcatatagaggacttaaagccaatttaacataaaccaaaccattgtcaggtttaagccaggtcaaaggatttggcgtctgaacatgacggaattttccttgtgccactcatattgattactgtgctcgttttttcctcctagacttttcctacctggaaaattaatatacagttaagtttttgtacaatcaaactatcaaaaaaaatcatatttgttttaaaaaagcataagctttaggagccatataaattaaacggactcgcagatacgtgagataggaaccctattagttcataattagccagttgtctgtgtttt

SEQ ID NO: 77891 - DNA, 840 bp, Zea Mays
gcgacgtttcctctcctcgcgttgcctccctttgcgccgtcgcctcccctcgtgtcggccgtcgcccctcaccggctccacggcggcgacagtctcctcgttgtactcacggtcaccgagcctaccgtcgacgagccccgccaccatgttgatggtcgacgaaccctaacctcccatccacaaacttgtcgtcgacgagacacgccctagatctcatcaaagttgttactgtcaagctcatcaaagcagataacggtacaattggagttgacaggagtagagatgtcaatggggacccgatacccgccaacccgtggggaattcccctattagggtacgggtatgagacgaaaattgtccccatgggtacggatatgagacaaaatctccacccattgggtaaacgggtatgggtttgggaagcaataatccgaacccgattacccatgggtatttcatacgtgtgcatctgtcgtgtttgtatgaatgagttgaggtcgagccaaccaccaagcccagcacggcagcgcaccaggccccaggtcctagcccaacaaagcaacacgacaaggcaactagcagactagcaaaaaacaaaatcctaaaataaccagccatatgctacgccctacccaggtgacggtgacgaccatggattcttaggcgccaacgaactcagatggtaccaaggaaggtgatcaaacttcatttctccatttcttatatcggtcccgaagtacttatttcttttctgatggatggatgaatggatcatggttcatggatgagtgcttgccaatgtaatgatgtctgaaatctagattgtttgtgctacatgtt

SEQ ID NO: 77892 - DNA, 674 bp, Zea Mays
ctctcccacggctcggcgacgtttcctctcctcgcgttgcctccctttgcgccgtcgcctcccctcgtgtcggccgtcgcccctcaccggtacaattggagttgacaggagtagagatgtcaatggggacccgatacccgccaacccgtggggaattcccctattagggtacgggtatgagacgaaaattgtccccatgggtacggatatgagacaaaatctccacccattgggtaaacgggtatgggtttgggaagcaataatccgaacccgattacccatgggtatttcatacgtgtgcatctgtcgtgtttgtatgaatgagttgaggtcgagccaaccaccaagcccagcacggcagcgcaccaggccccaggtcctagcccaacaaagcaacacgacaaggcaactagcagactagcaaaaaacaaaatcctaaaataaccagccatatgctacgccctacccaggtgacggtgacgaccatggattcttaggcgccaacgaactcagatggtaccaaggaaggtgatcaaacttcatttctccatttcttatatcggtcccgaagtacttatttcttttctgatggatggatgaatggatcatggttcatggatgagtgcttgccaatgtaatgatgtctgaaatctagattgtttgtgctacatgtt

SEQ ID NO: 77893 - DNA, 780 bp, Zea Mays
gcgtgcgcgcgcgctcatcacaagctgtcacaaactcagcacacaatcacactgacacacacacaccacaccacggcaccgctagtgagaagcagagcgggaggacacgcggcgcggactgcgatggctcgtgcgctcggcgcttgcgtgctgctcgccgtcctgctcggtgccctggcgccggcgccggcgccggcggcggccgcgcgcgcccacgacgaccagggcagcggggccggcatacggcagccgagcggcgagtaccgcgggaggaaggtgggggccaggaccgaggtgcgggacgtggagggcgacggcgaggtgcaggagctcggccggttctccgtcgccgagtacaaccggcagctccgagaaggtggcggcggcggcggcaggctcgagttcggcagggtggtggcggcgcagcggcaggtggtgtcggggctcaagtactacctccgcgtcgtggccgtggaggagggcggcggcgcggggaacggcggcgagcgcgtgttcgacgccgtcgtcgtcgtcaagccctggctcgactcgcgtaccctgctcacgttcgcgcccgcggccgccaacgtactagagagtgaagatggacgaactctgcgctgccgcgcgcagatcgatgtttttttttgaaaggctgttccataaatagaggagacaagagtctgagactgagagagaataattaaatcgctgtgcttctataacaaatcatgctgttttgttcaccagagatcccgaattatgattattcagtttcta

SEQ ID NO: 77894 - DNA, 759 bp, Zea Mays
ccaaaactggcgacgcctttccgttccaagcaggcgagctgccgcctcccgctatggtatataacggcgacaccacagcaccgcacactgcgtgcgcgcgcgctcatcacaagctgtcacaaactcagcacacaatcacactgacacacacacaccacaccacggcaccgctagtgagaagcagagcgggaggacacgcggcgcggactgcgatggctcgtgcgctcggcgcttgcgtgctgctcgccgtcctgctcggtgccctggcgccggcgccggcgccggcggcggccgcgcgcgcccacgacgaccagggcagcggggccggcatacggcagccgagcggcgagtaccgcgggaggaaggtgggggccaggaccgaggtgcgggacgtggagggcgacggcgaggtgcaggagctcggccggttctccgtcgccgagtacaaccggcagctccgagaagtaagcgcggcgctaccgccggtgtagtgtagtatctctggtctacccttctcggagaccatggacgctgaataaagtcttgtgtgttttgtataagcgaagcgtactagagagtgaagatggacgaactctgcgctgccgcgcgcagatcgatgtttttttttgaaaggctgttccataaatagaggagacaagagtctgagactgagagagaataattaaatcgctgtgcttctataacaaatcatgctgttttgttcaccagagatcccgaattatgattattcagtttcta

SEQ ID NO: 77895 - DNA, 1062 bp, Zea Mays
gaacatttattcaagatgattaatttaagcgaccaatctccatttatgatatttactcaatcaacaaccatagaacatgatagttactaaaacaaagcatcacttcaccaattaagaatcagctaaacttacttagccaaacaatagtaacttcaagccaacaatttaatacttgcagaatttttagacagcagcacagccgcagcggttaattgttttattcatagctcacaaaatatgcatccaatgatccaaaaatagtaaactaggactttctggaaagcttagaaagtcctctataactcttatattatcataacaacatgattcgacagtttgaaaggtcaaacagtgctaaactttaattctgtccagatttggacagaattcggctactcacttcaaaaaaaatcataactggagtttcaggcatcgaaatcaggtgatcctagactttttagaaagctaatagaattgtctacaattcatttataaacatctttggttaatacaatacatatcaaagtcagttactacaaacagacttcgctgtccaaatttggacagattcagactctatagttcaaacagctgtaacttgatctctagaccaccaaaaatggtgctccaaaatttgttggaaagcttaagaaaaatactacaatttttctataattactaagggctgattctcagtttagtttagccaaacaatccaattttcgaaacctgtacagaatttggacagattctgaaactggacttggaaaaatcataactcataaactactacacctatggtcatgaaattttaacacaagcaagataaaaagattatctacaagaatgctgatagtgacagtataattcaacacccaaacaagaagtatcctggagcctaaacagtcaagtacaagtaaggatatcactgtgtctgaagtgaaagaaaaatcgccttatgaaatgaagaaggaagttgggttcagaaatgtaacagtggaagctgcttctgttgaacatctgcaggaggaagaagctcccacaagtaaagacggccaaaag

SEQ ID NO: 77896 - DNA, 1879 bp, Zea Mays
attagacagaattactggagatagtctcatgcttatgcgtagacagattcgcacacgacgcacgaaaccagtgaacgtaggagggtgggtcttctcttcccccttcgcttcctcgtgcagctccgaccacgggctcgtccctgcctcggacgtcgctgcacggttacctccccatcggagctactgacctggggaagcgttcgtcgtcggagcatgctgatgaaaacaggagtggcgctgcaattggggaggaattgtcgcagggtgagcgggagtccttagtggagcagaatggtcagggtggcgacgtgaattcaagccaaacgtctgcagcttcaggaaagatggatgacaacgagccggatccagcttcttccagtgataccacaacgattccggacgaggatacatctaatgaatctcaaaaggctgagcaagataattgtgatctatatcgtggagagtgggttactgattcttctgggccactatacacaaacaactcctgccctatcatcacacagatgcagaattgccagggaaatgggcgaccggacaaggactatgaaaattggagatggaagccagaacagtgtaacctcccacgcttcgatgcaaggaagttcttggagttgatgagaggtagatgtcccacaaaaccgaggcaacaaaaggatgcacaagtggctcttcaaatcaactaaaacaactatcgcccgcgtctggtcttcttggttagtgcacaggtcaactgaagctgtggggattgctcctaagggtattgataaagtttttctggatattcctgatgagaccttcatggagttcctcccaaggtttgatgtactcgtcctttcctctggccactggtttgctaaacgatcagcctatatcctgaacgagaatgttgttggagggcagctttggtggcctcgtaaagcaggaaaaatgcaggtcaacaatgtggatgcctttggtatctctgtcgagacttgcctaactgctgtggtgaataacccaaattttacaggcctagcaattgtgcgcacatggtcacctgatcattatgaaggcggagcatggaacaccggtggatcatgcaccggaaaggtcaagcccttgaatgaagtggtgaggaacggatttaccgatgcgatgcatgaaaagcaggttgcaggcttcaggaaggcagtgaagaatgcaggggaacacggttctaggttgaaattgatggatatcactgaaccctttgccttcagggctgacggtcatcctggcccgtacagaagtcctgacccaaacaagaagacacagagagggccagatggaaaacctccacctcaggattgtttgcactggtgcatgccaggaccagtagacacatggaatgagatgttgctagaaaccattcgaagagagttcgagacagatagaacctgaggatagaaagtgctggctacttcgccatcatgtattcatgttatacattctgcgctgcgaactccatagggatgtatcgctgcacttagtagcatgttgtgtttaccatagataggaaggaacaaagcttcggatacgtaagattcactgtattttctctgacacgattcttggacatcattttcttgccaaattttgtgggcctgaatcccaaaaagtgtcaactgatatttgcattctgtccttgtactagtcaacctggtttggtgtaatagaataaaatgtaacaaccggaaagatgagaattgtttgccgaaaaatcgtctgtagctgttttttttttgtgtgtttttgtacaaaaaaggtgtactgctcttcttgtgccatacatgcagatattctagaaattgcagatgcggtttatgttttggggcgtggt

SEQ ID NO: 77897 - DNA, 1878 bp, Zea Mays
attagacagaattactggagatagtctcatgcttatgcgtagacagattcgcacacgacgcacgaaaccagtgaacgtaggagggtgggtcttctcttcccccttcgcttcctcgtgcagctccgaccacgatgccgctaggacgggaggattaatctcgtggcccatgagcttaccggggaggaaggccccagcgggggcctccggagtccggcggtggctcgtcaccgtcgtcgtgtcggtgctggcgctggtgctgaccctcgttgtgatatcgctgtcccagggctcgtccctgcctcggacgtcgctgcacggttacctccccatcggagctactgacctggggaagcgttcgtcgtcggagcatgctgatgaaaacaggagtggcgctgcaattggggaggaattgtcgcaggcttcaggaaagatggatgacaacgagccggatccagcttcttccagtgataccacaacgattccggacgaggatacatctaatgaatctcaaaaggctgagcaagataattgtgatctatatcgtggagagtgggttactgattcttctgggccactatacacaaacaactcctgccctatcatcacacagatgcagaattgccagggaaatgggcgaccggacaaggactatgaaaattggagatggaagccagaacagtgtaacctcccacgcttcgatgcaaggaagttcttggagttgatgagaggcaagacacttgcgttcgttggggattcagttgctcggaatcagatggagtccctcctttgcattctgtggcaagtagatgtcccacaaaaccgaggcaacaaaaggatgcacaagtggctcttcaaatcaactaaaacaactatcgcccgcgtctggtcttcttggttagtgcacaggtcaactgaagctgtggggattgctcctaagggtattgataaagtttttctggatattcctgatgagaccttcatggagttcctcccaagctttggtggcctcgtaaagcaggaaaaatgcaggcctagcaattgtgcgcacatggtcacctgatcattatgaaggcggagcatggaacaccggtggatcatgcaccggaaaggtcaagcccttgaatgaagtggtgaggaacggatttaccgatgcgatgcatgaaaagcaggttgcaggcttcaggaaggcagtgaagaatgcaggggaacacggttctaggttgaaattgatggatatcactgaaccctttgccttcagggctgacggtcatcctggcccgtacagaagtcctgacccaaacaagaagacacagagagggccagatggaaaacctccacctcaggattgtttgcactggtgcatgccaggaccagtagacacatggaatgagatgttgctagaaaccattcgaagagagttcgagacagatagaacctgaggatagaaagtgctggctacttcgccatcatgtattcatgttatacattctgcgctgcgaactccatagggatgtatcgctgcacttagtagcatgttgtgtttaccatagataggaaggaacaaagcttcggatacgtaagattcactgtattttctctgacacgattcttggacatcattttcttgccaaattttgtgggcctgaatcccaaaaagtgtcaactgatatttgcattctgtccttgtactagtcaacctggtttggtgtaatagaataaaatgtaacaaccggaaagatgagaattgtttgccgaaaaatcgtctgtagctgttttttttttgtgtgtttttgtacaaaaaaggtgtactgctcttcttgtgccatacatgcagatattctagaaattgcagatgcggtttatgttttggggcgtggt

SEQ ID NO: 77898 - DNA, 1744 bp, Zea Mays
tgctcagccagtaaaacttctcacatgctggcttgttcttgctgccaaataccaccgctgtatagcttggttaccacacaaattagtttcaccacaatttgactcagccacggcctcatgagtggctggtacggtggcaggtggcagctctgagacttgaaagcaacagcacagcagctgaagcctgccagcccccagcatggcaacatcctccacccaccaaagcccaggggggggggggggggttgggggttgtaaaaatacgtcgcagatccagagcttccaaccattactgtcgacgagatatcaccagacgtacggctctggatatgaaatccagatgcagcaggccatgcctcttgggctctggaggtcacgtgaggagacggacagcggtggactgagcaaagaccttgccatgcagaaatgcaggatccagagcttgctcatccatttattatgccaacttatcacttttaatccaccttttcttttatatactcctgtagggccccatctttcatctgggtatgaaatccgaccgtccgtccgaacttgttagctttggtttggatgactttctcttccacggtcttagactgaagatttggagttggtttccattcattttgtcgcagcgaagagccatgtcaactgtcttcctttcctgctgctcgatactgaaacacccaagctttgtattcggatcttgtgcccgctaacttcgattgtgctgtaaattttttttgttaagttcgaaatgggatacatgaaaaaaaatgcagaaaggcacatgcataacagtcaacagacgaagtgacgctatggtaataattgaaccaagcccccccgtagctaagtttcagatgcacctgttatcccgtgcgttcgtgcatacgagagggtggagccacatggacatggtggtctccgcagtccccactgttccctctccataccagtgtctctgcatggtatggcacagggatatgcatatgcaaggcatgagcagagtctcagtcacagagcggccgcacacaggccattgcacctgtctccagtttatataacctctagcatttgctcccttatgctgtttctctgaatccaaataaagcatcatcctcccatatgctacccatcgctcacttgaacaagaggaatggctaatggttgccccacatctaccacaagctccctgcccctcttcttccttctctcttgcctgcttatcggccatgctctctgcagccaagcccacaatggcagaacatcagatgctgattatgtggtgcaatttcctcaccaagaattgactactaagcatataattttgccgaaggtcatcaagggggtgtcgattcaagtgtactgctgagcaagtcccagtggatgcaaatgaccccatgaacagtgcttaccactacaagtgtgtttgccacaggtgatcttcaatgagtaggaggagctgctatgttatggtatgtcctggagaatagtagtatttttttccccattcttggttctccgttctccctcttcgcttccttctattctttgttttctctgttgaaaagggttccttttttttcatttctattttacaagaggctagctagtagaggactggagcctagaggagcattttgtactttaaaatgcttgttcaggttatgaactagtaattttgttagtaaatggttatcaattttgacatctgaagtatgaatgacccctattcaag

SEQ ID NO: 77899 - DNA, 1514 bp, Zea Mays
aaagtgagtcaccaaaacaacaccaagagagatggaatgcgagctagtgtttacattcaaaagagtgcaaaagcagcagtaagtttccattgattccatattagcgtagacactatacaactctccagagcacccaccgaacaacaaactccccagaaacttattaagcgatgcgtctctcggtcatgcgatgcagctcaggcccaggcaccctcccagcagattcctcaggagcttcttctgcaacacaaacaaaagagcatgagaacaaaactctcacctaaaatctttctggagtttacagtccagctttattgctcatgatctttggcaaagctccacttgcttcttcaccttgcagagaagctgcggggatatcttgtagaggtcctcgtccacagctcccttgggcttccacttctgttgctcgttcacgcggcgcctccttcctcccttcctcgccgccggaggcacagcagttcctttctcccccttcactcgaacaacgcactgcacatgcaagcatcgaccacagaattgctgtagggcgtggcagggaactggggcaccttgaagagatcctcgtcgtcgtccttctctgtcgtcggcgcggcgaagaagaaggtccctgcctgaaagtactgggtgacgggcatgtcgtcccacaggttccagtcgccgaacgccgggacttggcgccacttgcagtcgtcttgcgcctatcagaaaaaacgaaacggaacaaagcttactcctctggactctggtgaaagcttggaagccagtcttggaagcaagaaagacagtgtgtgaatgtatgacacatacgtgcttgtttgaaaagaaaataaacactgttaagagcatagtatgtctcttagattaacagtagataactactactatctctattcttttttgtttgtcacgttttagtttaaaattaaactagcggcgacaaatatttaagaacagaggtagtagagcatgtcccaactgccatggtatatttctctgttagcaaggacatgctgcatagtttagtttccttattgcatgaggatgcagatccccatataccatgcatgaagaggctggtattcatctgccgaaaaaaaaaaacaagagaagaaaacaaacaaagacagacgcattcttggctcacctccatctcggtcgcagttgatgccgaagcaggcgccgaggtgcgaaaagaggaggaggaggaacagggggcaaagaactgagcagcaagcaagggcagccaaagctgggttgcctgagtgttggaattgggtagcagggggtcgctcatctatacatagccggccgaagagaatgcgggggcacacgtacccaaactgttcagagaaaagcggtcgaggaaaagcgagcgcccaaagcagcggctagcgttcagctgttactgatgagccgaggcccgccccggcaggcaggcaatgagtactagcaccccacagtcactgagagtcactcatgccgcaggagtgcag

SEQ ID NO: 77900 - DNA, 4065 bp, Zea Mays
gggagttttgggcaatgtctcgtactctcgttcctgtacggtcgaagcccacggcattgtttccaaacaagcgaaaccgagcgtgtcgatgcagcctccccgtttcgccgtcgccctgccgccgctcgtctcccgcctcccctctgcgcctctccaaccttctcctcgccgtcgcgtccgttccggtgccgccgagcacgcggacgcgtcttcgcgcgcctcccggagcccgccgcccgcgaccagaagcaagggcaaatgggcgccacaccggtgcggtggccgcgggtgctgaccccggcgcagctagccggagccatacgccagcagaaggacccgctcgaagccgcccacctgtactgggacgcacctcgccgctacccacactcctaccgccacaacgacgacgtccgcttcaccctccttggcaccgccgccggctcccccgtcctcccgtccctcctccgccgggttctcccatcctccccatccgccgactccctccttgccgcttcgatacccaaactctctcctccagacgccgtgtccatcttccgctcgtcgctcccctcctccccgtccccgtcttggtccctctccttcaccgccctcctccggcacctcgtctcccaagcactactccccgaggctgcccgcctcttcgctgacttcgccaggcggccggaagtgtcaatagcatccgcggatctgactcttctcataattggtctctgccgcgtgcgccgccctgaccttgcgctgcaggtgctcgacgaaatgcccaacctatgcctcgctccggaaagggacgcgtaccgcgcgattgtgcctgctctctgtgatgctggcatgcttgatgaggccacacacgtcgtctattccatgatgtggcgggtgtcgcagaggggctgtgatgcagatgttatggtgtaccggacattgctggccgcactctgtgcggctggccggggtgaacaggctgagctggttctggataaggtgctcaggaagggtctgagatcaccaagtagtcgtcggtctcttcgtgtgccaatgcttgctgtgcttagtgtcgaggatgctcgggaagccattgaccaggcgttggctgttcgaactggacgtactgtatgcagctttgagtccatgatttttgagctctatgaagagggtcggtttgatcaggctgacagattgttccaggacatggccaagaaggggttcaggccaaccatctgcatgtatgaggcaaagatcggtgctttatgcagggaacggaatgtggatgatgctgtggaagtgctggaagaggagctgccaaagaatgaccttgttccaacagtgacaacatataacttgctcatgaagggtctatgtgacacgatgcaatcaatgagggcactagaatacctcaaaaagatggataagcagctcggttgtgttgctcaaaaggacactttctcaatcttggttcacggtttgtgctcagaaacgaagtttgttgatgcatcaaagttaatggagagaatggtgaagggacatcatcggcctgacaaaagtgcattcaacagagttatcgaaggtttatgttctgctggcagaatatatgatgcattgctatggctagaggagatgatcaaccatggagaaacaccaaacgccggtgtttggtcatccttagtctcagcagtatgtttgccccagtttgaagctttaggagctggactgctggagacagcataggttgtaactgcagaagaagactcgttcgacctaggaaactcttgaaaccacaatacaccaataatgagtgcccaagatacaatgatacctcaaatccatttacctttctgcctgatccaaatgacctagagaaccatggcacacttggtcatgatgacgacaaattttcagagaaaaatatgggctgaaatgaattcagaatgggagcaggagcagcactacagcaggtgatgctgatatagcttcatatgcagagttttgctttctacacgtgccctgttcacattttttatattcttatagcattaaaacgttatatggctcgtctatcacactggctgaatcattgaacttgccctaacaagtcttgctgaagacattagttaaccaaggtcaaatttgtgactgtgctaagataataaagctaaaaaattatgcattttccaaacagccttactcgtactctcgatcggggtagtttccggaatccgaaattttaacgctattagataagatagtactgtaaattccatttttgttttttttttaccgctctctgccctaaccgctttaatgtactgctagtaacaaagtgagtcaccaaaacaacaccaagagagatggaatgcgagctagtgtttacattcaaaagagtgcaaaagcagcagtaagtttccattgattccatattagcgtagacactatacaactctccagagcacccaccgaacaacaaactccccagaaacttattaagcgatgcgtctctcggtcatgcgatgcagctcaggcccaggcaccctcccagcagattcctcaggagcttcttctgcaacacaaacaaaagagcatgagaacaaaactctcacctaaaatctttctggagtttacagtccagctttattgctcatgatctttggcaaagctccacttgctgtgaaaaatgaagtgcttaagcttttgaagaaaggtcacagcatatattggcaaagtatagctgttctatctagtgttgttatcctaacaaaagctacttgcaaagggtcagcttaggctagataaaggcttatgccaatcacatgacgagaactagataagaagtagacccacttaggtacacgtggggtgcaaattaggattacaggatccttgccttcttcaccttgcagagaagctgcggggatatcttgtagaggtcctcgtccacagctcccttgggcttccacttctgttgctcgttcacgcggcgcctccttcctcccttcctcgccgccggaggcacagcagttcctttctcccccttcactcgaacaacgcactgcacatgcaagcatcgaccacagaattgctgtagggcgtggcagggaactggggcaccttgaagagatcctcgtcgtcgtccttctctgtcgtcggcgcggcgaagaagaaggtccctgcctgaaagtactgggtgacgggcatgtcgtcccacaggttccagtcgccgaacgccgggacttggcgccacttgcagtcgtcttgcgcctatcagaaaaaacgaaacggaacaaagcttactcctctggactctggtgaaagcttggaagccagtcttggaagcaagaaagacagtgtgtgaatgtatgacacatacgtgcttgtttgaaaagaaaataaacactgttaagagcatagtatgtctcttagattaacagtagataactactactatctctattcttttttgtttgtcacgttttagtttaaaattaaactagcggcgacaaatatttaagaacagaggtagtagagcatgtcccaactgccatggtatatttctctgttagcaaggacatgctgcatagtttagtttccttattgcatgaggatgcagatccccatataccatgcatgaagaggctggtattcatctgccgaaaaaaaaaaacaagagaagaaaacaaacaaagacagacgcattcttggctcacctccatctcggtcgcagttgatgccgaagcaggcgccgaggtgcgaaaagaggaggaggaggaacagggggcaaagaactgagcagcaagcaagggcagccaaagctgggttgcctgagtgttggaattgggtagcagggggtcgctcatctatacatagccggccgaagagaatgcgggggcacacgtacccaaactgttcagagaaaagcggtcgaggaaaagcgagcgcccaaagcagcggctagcgttcagctgttactgatgagccgaggcccgccccggcaggcaggcaatgagtactagcaccccacagtcactgagagtcactcatgccgcaggagtgcag

SEQ ID NO: 77901 - DNA, 2944 bp, Zea Mays
gggagttttgggcaatgtctcgtactctcgttcctgtacggtcgaagcccacggcattgtttccaaacaagcgaaaccgagcgtgtcgatgcagcctccccgtttcgccgtcgccctgccgccgctcgtctcccgcctcccctctgcgcctctccaaccttctcctcgccgtcgcgtccgttccggtgccgccgagcacgcggacgcgtcttcgcgcgcctcccggagcccgccgcccgcgaccagaagcaagggcaaatgggcgccacaccggtgcggtggccgcgggtgctgaccccggcgcagctagccggagccatacgccagcagaaggacccgctcgaagccgcccacctgtactgggacgcacctcgccgctacccacactcctaccgccacaacgacgacgtccgcttcaccctccttggcaccgccgccggctcccccgtcctcccgtccctcctccgccgggttctcccatcctccccatccgccgactccctccttgccgcttcgatacccaaactctctcctccagacgccgtgtccatcttccgctcgtcgctcccctcctccccgtccccgtcttggtccctctccttcaccgccctcctccggcacctcgtctcccaagcactactccccgaggctgcccgcctcttcgctgacttcgccaggcggccggaagtgtcaatagcatccgcggatctgactcttctcataattggtctctgccgcgtgcgccgccctgaccttgcgctgcaggtgctcgacgaaatgcccaacctatgcctcgctccggaaagggacgcgtaccgcgcgattgtgcctgctctctgtgatgctggcatgcttgatgaggccacacacgtcgtctattccatgatgtggcgggtgtcgcagaggggctgtgatgcagatgttatggtgtaccggacattgctggccgcactctgtgcggctggccggggtgaacaggctgagctggttctggataaggtgctcaggaagggtctgagatcaccaagtagtcgtcggtctcttcgtgtgccaatgcttgctgtgcttagtgtcgaggatgctcgggaagccattgaccaggcgttggctgttcgaactggacgtactgtatgcagctttgagtccatgatttttgagctctatgaagagggtcggtttgatcaggctgacagattgttccaggacatggccaagaaggggttcaggccaaccatctgcatgtatgaggcaaagatcggtgctttatgcagggaacggaatgtggatgatgctgtggaagtgctggaagaggagctgccaaagaatgaccttgttccaacagtgacaacatataacttgctcatgaagggtctatgtgacacgatgcaatcaatgagggcactagaatacctcaaaaagatggataagcagctcggttgtgttgctcaaaaggacactttctcaatcttggttcacggtttgtgctcagaaacgaagtttgttgatgcatcaaagttaatggagagaatggtgaagggacatcatcggcctgacaaaagtgcattcaacagagttatcgaaggtttatgttctgctggcagaatatatgatgcattgctatggctagaggagatgatcaaccatggagaaacaccaaacgccggtgtttggtcatccttagtctcagcagtatgtttgccccagtttgaagctttaggagctggactgctggagacagcataggttgtaactgcagaagaagactcgttcgacctaggaaactcttgaaaccacaatacaccaataatgagtgcccaagatacaatgatacctcaaatccatttacctttctgcctgatccaaatgacctagagaaccatggcacacttggtcatgatgacgacaaattttcagagaaaaatatgggctgaaatgaattcagaatgggagcaggagcagcactacagcagctgtagggcgtggcagggaactggggcaccttgaagagatcctcgtcgtcgtccttctctgtcgtcggcgcggcgaagaagaaggtccctgcctgaaagtactgggtgacgggcatgtcgtcccacaggttccagtcgccgaacgccgggacttggcgccacttgcagtcgtcttgcgcctatcagaaaaaacgaaacggaacaaagcttactcctctggactctggtgaaagcttggaagccagtcttggaagcaagaaagacagtgtgtgaatgtatgacacatacgtgcttgtttgaaaagaaaataaacactgttaagagcatagtatgtctcttagattaacagtagataactactactatctctattcttttttgtttgtcacgttttagtttaaaattaaactagcggcgacaaatatttaagaacagaggtagtagagcatgtcccaactgccatggtatatttctctgttagcaaggacatgctgcatagtttagtttccttattgcatgaggatgcagatccccatataccatgcatgaagaggctggtattcatctgccgaaaaaaaaaaacaagagaagaaaacaaacaaagacagacgcattcttggctcacctccatctcggtcgcagttgatgccgaagcaggcgccgaggtgcgaaaagaggaggaggaggaacagggggcaaagaactgagcagcaagcaagggcagccaaagctgggttgcctgagtgttggaattgggtagcagggggtcgctcatctatacatagccggccgaagagaatgcgggggcacacgtacccaaactgttcagagaaaagcggtcgaggaaaagcgagcgcccaaagcagcggctagcgttcagctgttactgatgagccgaggcccgccccggcaggcaggcaatgagtactagcaccccacagtcactgagagtcactcatgccgcaggagtgcag

SEQ ID NO: 77902 - DNA, 2938 bp, Zea Mays
gggagttttgggcaatgtctcgtactctcgttcctgtacggtcgaagcccacggcattgtttccaaacaagcgaaaccgagcgtgtcgatgcagcctccccgtttcgccgtcgccctgccgccgctcgtctcccgcctcccctctgcgcctctccaaccttctcctcgccgtcgcgtccgttccggtgccgccgagcacgcggacgcgtcttcgcgcgcctcccggagcccgccgcccgcgaccagaagcaagggcaaatgggcgccacaccggtgcggtggccgcgggtgctgaccccggcgcagctagccggagccatacgccagcagaaggacccgctcgaagccgcccacctgtactgggacgcacctcgccgctacccacactcctaccgccacaacgacgacgtccgcttcaccctccttggcaccgccgccggctcccccgtcctcccgtccctcctccgccgggttctcccatcctccccatccgccgactccctccttgccgcttcgatacccaaactctctcctccagacgccgtgtccatcttccgctcgtcgctcccctcctccccgtccccgtcttggtccctctccttcaccgccctcctccggcacctcgtctcccaagcactactccccgaggctgcccgcctcttcgctgacttcgccaggcggccggaagtgtcaatagcatccgcggatctgactcttctcataattggtctctgccgcgtgcgccgccctgaccttgcgctgcaggtgctcgacgaaatgcccaacctatgcctcgctccggaaagggacgcgtaccgcgcgattgtgcctgctctctgtgatgctggcatgcttgatgaggccacacacgtcgtctattccatgatgtggcgggtgtcgcagaggggctgtgatgcagatgttatggtgtaccggacattgctggccgcactctgtgcggctggccggggtgaacaggctgagctggttctggataaggtgctcaggaagggtctgagatcaccaagtagtcgtcggtctcttcgtgtgccaatgcttgctgtgcttagtgtcgaggatgctcgggaagccattgaccaggcgttggctgttcgaactggacgtactgtatgcagctttgagtccatgatttttgagctctatgaagagggtcggtttgatcaggctgacagattgttccaggacatggccaagaaggggttcaggccaaccatctgcatgtatgaggcaaagatcggtgctttatgcagggaacggaatgtggatgatgctgtggaagtgctggaagaggagctgccaaagaatgaccttgttccaacagtgacaacatataacttgctcatgaagggtctatgtgacacgatgcaatcaatgagggcactagaatacctcaaaaagatggataagcagctcggttgtgttgctcaaaaggacactttctcaatcttggttcacggtttgtgctcagaaacgaagtttgttgatgcatcaaagttaatggagagaatggtgaagggacatcatcggcctgacaaaagtgcattcaacagagttatcgaaggtttatgttctgctggcagaatatatgatgcattgctatggctagaggagatgatcaaccatggagaaacaccaaacgccggtgtttggtcatccttagtctcagcagtatgtttgccccagtttgaagctttaggagctggactgctggagacagcataggttgtaactgcagaagaagactcgttcgacctaggaaactcttgaaaccacaatacaccaataatgagtgcccaagatacaatgatacctcaaatccatttacctttctgcctgatccaaatgacctagagaaccatggcacacttggtcatgatgacgacaaattttcagagaaaaatatgggctgaaatgaattcagaatgggagcaggagcagcactacagcagggcgtggcagggaactggggcaccttgaagagatcctcgtcgtcgtccttctctgtcgtcggcgcggcgaagaagaaggtccctgcctgaaagtactgggtgacgggcatgtcgtcccacaggttccagtcgccgaacgccgggacttggcgccacttgcagtcgtcttgcgcctatcagaaaaaacgaaacggaacaaagcttactcctctggactctggtgaaagcttggaagccagtcttggaagcaagaaagacagtgtgtgaatgtatgacacatacgtgcttgtttgaaaagaaaataaacactgttaagagcatagtatgtctcttagattaacagtagataactactactatctctattcttttttgtttgtcacgttttagtttaaaattaaactagcggcgacaaatatttaagaacagaggtagtagagcatgtcccaactgccatggtatatttctctgttagcaaggacatgctgcatagtttagtttccttattgcatgaggatgcagatccccatataccatgcatgaagaggctggtattcatctgccgaaaaaaaaaaacaagagaagaaaacaaacaaagacagacgcattcttggctcacctccatctcggtcgcagttgatgccgaagcaggcgccgaggtgcgaaaagaggaggaggaggaacagggggcaaagaactgagcagcaagcaagggcagccaaagctgggttgcctgagtgttggaattgggtagcagggggtcgctcatctatacatagccggccgaagagaatgcgggggcacacgtacccaaactgttcagagaaaagcggtcgaggaaaagcgagcgcccaaagcagcggctagcgttcagctgttactgatgagccgaggcccgccccggcaggcaggcaatgagtactagcaccccacagtcactgagagtcactcatgccgcaggagtgcag

SEQ ID NO: 77903 - DNA, 3123 bp, Zea Mays
gggagttttgggcaatgtctcgtactctcgttcctgtacggtcgaagcccacggcattgtttccaaacaagcgaaaccgagcgtgtcgatgcagcctccccgtttcgccgtcgccctgccgccgctcgtctcccgcctcccctctgcgcctctccaaccttctcctcgccgtcgcgtccgttccggtgccgccgagcacgcggacgcgtcttcgcgcgcctcccggagcccgccgcccgcgaccagaagcaagggcaaatgggcgccacaccggtgcggtggccgcgggtgctgaccccggcgcagctagccggagccatacgccagcagaaggacccgctcgaagccgcccacctgtactgggacgcacctcgccgctacccacactcctaccgccacaacgacgacgtccgcttcaccctccttggcaccgccgccggctcccccgtcctcccgtccctcctccgccgggttctcccatcctccccatccgccgactccctccttgccgcttcgatacccaaactctctcctccagacgccgtgtccatcttccgctcgtcgctcccctcctccccgtccccgtcttggtccctctccttcaccgccctcctccggcacctcgtctcccaagcactactccccgaggctgcccgcctcttcgctgacttcgccaggcggccggaagtgtcaatagcatccgcggatctgactcttctcataattggtctctgccgcgtgcgccgccctgaccttgcgctgcaggtgctcgacgaaatgcccaacctatgcctcgctccggaaagggacgcgtaccgcgcgattgtgcctgctctctgtgatgctggcatgcttgatgaggccacacacgtcgtctattccatgatgtggcgggtgtcgcagaggggctgtgatgcagatgttatggtgtaccggacattgctggccgcactctgtgcggctggccggggtgaacaggctgagctggttctggataaggtgctcaggaagggtctgagatcaccaagtagtcgtcggtctcttcgtgtgccaatgcttgctgtgcttagtgtcgaggatgctcgggaagccattgaccaggcgttggctgttcgaactggacgtactgtatgcagctttgagtccatgatttttgagctctatgaagagggtcggtttgatcaggctgacagattgttccaggacatggccaagaaggggttcaggccaaccatctgcatgtatgaggcaaagatcggtgctttatgcagggaacggaatgtggatgatgctgtggaagtgctggaagaggagctgccaaagaatgaccttgttccaacagtgacaacatataacttgctcatgaagggtctatgtgacacgatgcaatcaatgagggcactagaatacctcaaaaagatggataagcagctcggttgtgttgctcaaaaggacactttctcaatcttggttcacggtttgtgctcagaaacgaagtttgttgatgcatcaaagttaatggagagaatggtgaagggacatcatcggcctgacaaaagtgcattcaacagagttatcgaaggtttatgttctgctggcagaatatatgatgcattgctatggctagaggagatgatcaaccatggagaaacaccaaacgccggtgtttggtcatccttagtctcagcagtatgtttgccccagtttgaagctttaggagctggactgctggagacagcataggttgtaactgcagaagaagactcgttcgacctaggaaactcttgaaaccacaatacaccaataatgagtgcccaagatacaatgatacctcaaatccatttacctttctgcctgatccaaatgacctagagaaccatggcacacttggtcatgatgacgacaaattttcagagaaaaatatgggctgaaatgaattcagaatgggagcaggagcagcactacagcagagaagctgcggggatatcttgtagaggtcctcgtccacagctcccttgggcttccacttctgttgctcgttcacgcggcgcctccttcctcccttcctcgccgccggaggcacagcagttcctttctcccccttcactcgaacaacgcactgcacatgcaagcatcgaccacagaattgctgtagggcgtggcagggaactggggcaccttgaagagatcctcgtcgtcgtccttctctgtcgtcggcgcggcgaagaagaaggtccctgcctgaaagtactgggtgacgggcatgtcgtcccacaggttccagtcgccgaacgccgggacttggcgccacttgcagtcgtcttgcgcctatcagaaaaaacgaaacggaacaaagcttactcctctggactctggtgaaagcttggaagccagtcttggaagcaagaaagacagtgtgtgaatgtatgacacatacgtgcttgtttgaaaagaaaataaacactgttaagagcatagtatgtctcttagattaacagtagataactactactatctctattcttttttgtttgtcacgttttagtttaaaattaaactagcggcgacaaatatttaagaacagaggtagtagagcatgtcccaactgccatggtatatttctctgttagcaaggacatgctgcatagtttagtttccttattgcatgaggatgcagatccccatataccatgcatgaagaggctggtattcatctgccgaaaaaaaaaaacaagagaagaaaacaaacaaagacagacgcattcttggctcacctccatctcggtcgcagttgatgccgaagcaggcgccgaggtgcgaaaagaggaggaggaggaacagggggcaaagaactgagcagcaagcaagggcagccaaagctgggttgcctgagtgttggaattgggtagcagggggtcgctcatctatacatagccggccgaagagaatgcgggggcacacgtacccaaactgttcagagaaaagcggtcgaggaaaagcgagcgcccaaagcagcggctagcgttcagctgttactgatgagccgaggcccgccccggcaggcaggcaatgagtactagcaccccacagtcactgagagtcactcatgccgcaggagtgcag

SEQ ID NO: 77904 - DNA, 1707 bp, Zea Mays
cggagataaaaataaattttgttccctcgtgttttcctacgaaaagaatagggcgttgggcgaggccacgcggggcagcagcgcggaggccacaggacaaggtcgagcgcgcaaacgagaggcagtggcgcaccgcggccttatccgcagcgtccaatccccgcgcgtcttcacgccgcgccacgccgtccgggccatgggccaccaatggcgacccccaccgccaccgcactcacctgctcctgccgcccttcgtcgccctcctcatcatccgccgccttccgccggctgaacatcttcgcccccgtctcgggcgcccattctcctcctcgacgccgcctccgtctcgcgccattgcacgtcgtcgacgactccaagaacccccccgaggagaggtctgagacggataagatggtggacggcatggacttcggggagctctgcagcgacttcgagtgcataagcagcccctacgtggagtcgacggcgaggcaggtcgcgcgggacatcctggagctccgcgaggacaaccgcgcattcaactgctacgccgtctccgtcaagtacaaggacccactcaggacatttgttgggcgtgagaagtacaggaggccgttgtggatcaccaaggcgttggaaaaccctgtagtgtccaggaaatgtcaatgcagtcgacgagcaacctgaccatcagatgggcgttgagagggaagcctaagaacccgttgttcgcgagcgtcggaggagacgtcatcgtccgcgtcgagtcacggttcgtcctgaaccagataagcgggcaggtgctggagcaggccgagtcctgggacctctccgcctcgtccctccctgcccaggcctacttctggctgtcccgaagggtctactccgccgtggagtccgggaaggacgcgatcgaagccgccaagagcgcggcgtcgtctgggctgacgaccaagggagaccagaatctcgaggcctatccggatccttctgctgatcctacaaagttctttcagaggccggatgatgggttcagccaagacgtgtaccagatcggccttctcctggccgtgatctacttcattgtacagtttctgaaggcgaccctgtgaccggctgcagcctgtcgaagaatgtagcctgtgtgcagtatacatgtatgtaactatgcctagcaacattataaaatacgggcatatatcatcctgccatctgacctgcgacagatttgtgacctttcaccactgctgtcggtgatattagtttggcacgcaagttgccaatttacaggtgttaaacttgacatcggccgccggtcgtgcttatctttgcgtagcaagctcgagcacttggcgtctgcatccgccgcgctttatgttgaactccaggtagatgggcaggcaggctcatgctttatgttgaactccccgaaaacgaccattcgcaaccgaacttccgggctgggctgcccttgaaatacgatgggccgggggttgtggtctgcggcccaatttcgactcatcagtgaactcacttttgagttattgctgctctcttgttttcttttctacctatgcttttaggaggtgtgtgtttgtgcgtgagctgagagttcgccggcgacgcttttcttggctagacatatcaggatccgcagcgaagagggggcaccggtcaccatccgccgtggcgaatcatgaactctgt

SEQ ID NO: 77905 - DNA, 2210 bp, Zea Mays
acgcgccaccgctcgcctccgcgcgacgcgccaccgcctgccccgctcgacgcgccaccgctcgcctccgcgcgacgcgccaccgctcgtctccgcgcgacgcgccaccgctcgcctccgcgcgacgcgccaccgcctgccccgcccccacctgccccgcgccgtcgtggagagaagcgccgtcgtggtgatgacgggcgacggagagggagtcgagagctctgccgccggcgaacggcagggcgtgcccttcgctctaggcggcccgctgttcgtccccttcatggtgggccccatcaccaccataccagagttcatgtcctcagccctccacgagctccaggccttggaagacgaattaggagacaccagagacgaattcagcaatgagctttgtgtcgatgagctcaaggtgctctctgaggaggagctggtggagcgcgccctgcaggaggctatggaggtgtcctctactgataagcatctcaatttaatcactttgttttggattgcattttcgtttgaagctttgatgatttttgtgtctaggactcggattctggcactcaaccacaaccagaggatcaaacacttgatggaggcatgtcagcgaatccaacacctacaattcaggcccccacattaagcccattggctgaaagagagagctctggattgcaagatatggcggacgtattaaatgaaccacaaagcagcaatggcaagcctagaggcaaagaggcaaacagcagatgcaggaagggggaaactggaaccttcacactagattctccggttgtaggagagagccatggatcagctattgacatgtcaattgtaccatttgaaccggaaggaagggcaaaaagagaggcaggcattttgatagagaggttcgagcagagattttacagggaagctatcttactaaagcagataagtgggtacaaatcaaggccaagcaagacgaagacaaatttgcagcaaggctgcattctttcagtggcaattctgtgaagcccaaaggttcaaagtcatcatgtgagaaaattgaaatggcgagatctcttaatctaatcggtgcaccttggaagaacaaagctttaagatctgatgagcacagacctgtggtccgtccagaagtaattctctgtgttgaaatttatcagaagacatatgcctctgttaagtcccaggaacttcttttgctgggaagccaattccttactgatctgagggacaacatttattgtttgactgataaggtgatgaaggtggctgggcaacacgatcattctgggtattttcttattgaggacacgttctacaatgatacgagacatcgttctgccactgattacagtaagcctatactggattggcttgagaattccagtgatgaggtaacagagaagtgggatgccataacatctggtgttctgaagaagcgacaaaaggacttgctgcgcggtctgagtatttctaacgtgcctgaatttaaatctgaaaagatgcaaacgactcgtatctctgacctgcacttccggcccggtgctgggtacctctactgccaccaggggaactgcaagcacacgatcgtgataagggacatgaggttgattcacccagatgacacacagaaccaagcggagtaccctctccagacgttccagctgcagaggcgcttgcagaagtgctcggtgtgccagatctatcttgcgacgaaggtaacggtcgacgataagtgggctctgaacaacccctgctacttctgcatcaaatgctactacctcctccactacaaggaggacagcacactgctatatcctcacactgtatatgatttcatccaagagtgatgtttctctgtttttttttcttcgtagaaaagtagtctgtagtttatcctacactgtacattcttcactgcaagaaatccatgcgggcttcgtgcattttgctgagttattaaatggctatatggacctgggtcagacgtcagacttccaagttccaaaggcctaggcctcgacgctctgtcgagctctgacgaactgaagacgagactgaagaaatgtatgatgtttgagatgtacgcgtctaggttgtggatggtctggcggatccatgctttcaaccggcttttaaatacgatggaaccgaactaaaagtacagccaccataaaaatttcatcataattaggccaaag

SEQ ID NO: 77906 - DNA, 2293 bp, Zea Mays
cgcccccgcccccgctcgacgcgcccccgctcgcctccgcgcgacgcgccaccgcctgccccgctcgacgcgccaccgctcgcctccgcgcgacgcgccaccgctcgcctccgcgcgacgcgccaccgcctgccccgctcgacgcgccaccgctcgcctccgcgcgacgcgccaccgcctgccccgctcgacgcgccaccgctcgcctccgcgcgacgcgccaccgctcgtctccgcgcgacgcgccaccgctcgcctccgcgcgacgcgccaccgcctgccccgcccccacctgccccgcgccgtcgtggagagaagcgccgtcgtggtgatgacgggcgacggagagggagtcgagagctctgccgccggcgaacggcagggcgtgcccttcgctctaggcggcccgctgttcgtccccttcatggtgggccccatcaccaccataccagagttcatgtcctcagccctccacgagctccaggccttggaagacgaattaggagacaccagagacgaattcagcaatgagctttgtgtcgatgagctcaaggtgctctctgaggaggagctggtggagcgcgccctgcaggaggctatggaggactcggattctggcactcaaccacaaccagaggatcaaacacttgatggaggcatgtcagcgaatccaacacctacaattcaggcccccacattaagcccattggctgaaagagagagctctggattgcaagatatggcggacgtattaaatgaaccacaaagcagcaatggcaagcctagaggcaaagaggcaaacagcagatgcaggaagggggaaactggaaccttcacactagattctccggttgtaggagagagccatggatcagctattgacatgtcaattgtaccatttgaaccggaagagggaattaatggacaaacaacatgtaggaagggcaaaaagagaggcaggcattttgatagagaggttcgagcagagattttacagggaagctatcttactaaagcagataagtgggtacaaatcaaggccaagcaagacgaagacaaatttgcagcaaggctgcattctttcagtggcaattctgtgaagcccaaaggttcaaagtcatcatgtgagaaaattgaaatggcgagatctcttaatctaatcggtgcaccttggaagaacaaagctttaagatctgatgagcacagacctgtggtccgtccagaagtaattctctgtgttgaaatttatcagaagacatatgcctctgttaagtcccaggaacttcttttgctgggaagccaattccttactgatctgagggacaacatttattgtttgactgataaggtgatgaaggtggctgggcaacacgatcattctgggtattttcttattgaggacacgttctacaatgatacgagacatcgttctgccactgattacagtaagcctatactggattggcttgagaattccagtgatgaggtaacagagaagtgggatgccataacatctggtgttctgaagaagcgacaaaaggacttgctgcgcggtctgagtatttctaacgtgcctgaatttaaatctgaaaagatgcaaacgactcgtatctctgacctgcacttccggcccggtgctgggtacctctactgccaccaggggaactgcaagcacacgatcgtgataagggacatgaggttgattcacccagatgacacacagaaccaagcggagtaccctctccagacgttccagctgcagaggcgcttgcagaagtgctcggtgtgccagatctatcttgcgacgaaggtaacggtcgacgataagtgggctctgaacaacccctgctacttctgcatcaaatgctactacctcctccactacaaggaggacagcacactgctatatcctcacactgtatatgatttcatccaagagtgatgtttctctgtttttttttcttcgtagaaaagtagtctgtagtttatcctacactgtacattcttcactgcaagaaatccatgcgggcttcgtgcattttgctgagttattaaatggctatatggacctgggtcagacgtcagacttccaagttccaaaggcctaggcctcgacgctctgtcgagctctgacgaactgaagacgagactgaagaaatgtatgatgtttgagatgtacgcgtctaggttgtggatggtctggcggatccatgctttcaaccggcttttaaatacgatggaaccgaactaaaagtacagccaccataaaaatttcatcataattaggccaaag

SEQ ID NO: 77907 - DNA, 2371 bp, Zea Mays
cgcccccgcccccgctcgacgcgcccccgctcgcctccgcgcgacgcgccaccgcctgccccgctcgacgcgccaccgctcgcctccgcgcgacgcgccaccgctcgcctccgcgcgacgcgccaccgcctgccccgctcgacgcgccaccgctcgcctccgcgcgacgcgccaccgcctgccccgctcgacgcgccaccgctcgcctccgcgcgacgcgccaccgctcgtctccgcgcgacgcgccaccgctcgcctccgcgcgacgcgccaccgcctgccccgcccccacctgccccgcgccgtcgtggagagaagcgccgtcgtggtgatgacgggcgacggagagggagtcgagagctctgccgccggcgaacggcagggcgtgcccttcgctctaggcggcccgctgttcgtccccttcatggtgggccccatcaccaccataccagagttcatgtcctcagccctccacgagctccaggccttggaagacgaattaggagacaccagagacgaattcagcaatgagctttgtgtcgatgagctcaaggtgctctctgaggaggagctggtggagcgcgccctgcaggaggctatggaggtgtcctctactgataagcatctcaatttaatcactttgttttggattgcattttcgtttgaagctttgatgatttttgtgtctaggactcggattctggcactcaaccacaaccagaggatcaaacacttgatggaggcatgtcagcgaatccaacacctacaattcaggcccccacattaagcccattggctgaaagagagagctctggattgcaagatatggcggacgtattaaatgaaccacaaagcagcaatggcaagcctagaggcaaagaggcaaacagcagatgcaggaagggggaaactggaaccttcacactagattctccggttgtaggagagagccatggatcagctattgacatgtcaattgtaccatttgaaccggaaggtagtgagggaaatggaacgatgccttcaaatccatcagctgaaaatggtgcatctgaatcacctgttgatggtatgtcaattgttccacatgatccagagggaattaatggacaaacaacatgtaggaagggcaaaaagagaggcaggcattttgatagagaggttcgagcagagattttacagggaagctatcttactaaagcagataagtgggtacaaatcaaggccaagcaagacgaagacaaatttgcagcaaggctgcattctttcagtggcaattctgtgaagcccaaaggttcaaagtcatcatgtgagaaaattgaaatggcgagatctcttaatctaatcggtgcaccttggaagaacaaagctttaagatctgatgagcacagacctgtggtccgtccagaagtaattctctgtgttgaaatttatcagaagacatatgcctctgttaagtcccaggaacttcttttgctgggaagccaattccttactgatctgagggacaacatttattgtttgactgataaggtgatgaaggtggctgggcaacacgatcattctgggtattttcttattgaggacacgttctacaatgatacgagacatcgttctgccactgattacagtaagcctatactggattggcttgagaattccagtgatgaggtaacagagaagtgggatgccataacatctggtgttctgaagaagcgacaaaaggacttgctgcgcggggaactgcaagcacacgatcgtgataagggacatgaggttgattcacccagatgacacacagaaccaagcggagtaccctctccagacgttccagctgcagaggcgcttgcagaagtgctcggtgtgccagatctatcttgcgacgaaggtaacggtcgacgataagtgggctctgaacaacccctgctacttctgcatcaaatgctactacctcctccactacaaggaggacagcacactgctatatcctcacactgtatatgatttcatccaagagtgatgtttctctgtttttttttcttcgtagaaaagtagtctgtagtttatcctacactgtacattcttcactgcaagaaatccatgcgggcttcgtgcattttgctgagttattaaatggctatatggacctgggtcagacgtcagacttccaagttccaaaggcctaggcctcgacgctctgtcgagctctgacgaactgaagacgagactgaagaaatgtatgatgtttgagatgtacgcgtctaggttgtggatggtctggcggatccatgctttcaaccggcttttaaatacgatggaaccgaactaaaagtacagccaccataaaaatttcatcataattaggccaaag

SEQ ID NO: 77908 - DNA, 2403 bp, Zea Mays
cgcccccgcccccgctcgacgcgcccccgctcgcctccgcgcgacgcgccaccgcctgccccgctcgacgcgccaccgctcgcctccgcgcgacgcgccaccgctcgcctccgcgcgacgcgccaccgcctgccccgctcgacgcgccaccgctcgcctccgcgcgacgcgccaccgcctgccccgctcgacgcgccaccgctcgcctccgcgcgacgcgccaccgctcgtctccgcgcgacgcgccaccgctcgcctccgcgcgacgcgccaccgcctgccccgcccccacctgccccgcgccgtcgtggagagaagcgccgtcgtggtgatgacgggcgacggagagggagtcgagagctctgccgccggcgaacggcagggcgtgcccttcgctctaggcggcccgctgttcgtccccttcatggtgggccccatcaccaccataccagagttcatgtcctcagccctccacgagctccaggccttggaagacgaattaggagacaccagagacgaattcagcaatgagctttgtgtcgatgagctcaaggtgctctctgaggaggagctggtggagcgcgccctgcaggaggctatggaggtgtcctctactgataagcatctcaatttaatcactttgttttggattgcattttcgtttgaagctttgatgatttttgtgtctaggactcggattctggcactcaaccacaaccagaggatcaaacacttgatggaggcatgtcagcgaatccaacacctacaattcaggcccccacattaagcccattggctgaaagagagagctctggattgcaagatatggcggacgtattaaatgaaccacaaagcagcaatggcaagcctagaggcaaagaggcaaacagcagatgcaggaagggggaaactggaaccttcacactagattctccggttgtaggagagagccatggatcagctattgacatgtcaattgtaccatttgaaccggaaggtagtgagggaaatggaacgatgccttcaaatccatcagctgaaaatggtgcatctgaatcacctgttgatggtatgtcaattgttccacatgatccagagggaattaatggacaaacaacatgtaggaagggcaaaaagagaggcaggcattttgatagagaggttcgagcagagattttacagggaagctatcttactaaagcagataagtgggtacaaatcaaggccaagcaagacgaagacaaatttgcagcaaggctgcattctttcagtggcaattctgtgaagcccaaaggttcaaagtcatcatgtgagaaaattgaaatggcgagatctcttaatctaatcggtgcaccttggaagaacaaagctttaagatctgatgagcacagacctgtggtccgtccagaagtaattctctgtgttgaaatttatcagaagacatatgcctctgttaaggtgatgaaggtggctgggcaacacgatcattctgggtattttcttattgaggacacgttctacaatgatacgagacatcgttctgccactgattacagtaagcctatactggattggcttgagaattccagtgatgaggtaacagagaagtgggatgccataacatctggtgttctgaagaagcgacaaaaggacttgctgcgcggtctgagtatttctaacgtgcctgaatttaaatctgaaaagatgcaaacgactcgtatctctgacctgcacttccggcccggtgctgggtacctctactgccaccaggggaactgcaagcacacgatcgtgataagggacatgaggttgattcacccagatgacacacagaaccaagcggagtaccctctccagacgttccagctgcagaggcgcttgcagaagtgctcggtgtgccagatctatcttgcgacgaaggtaacggtcgacgataagtgggctctgaacaacccctgctacttctgcatcaaatgctactacctcctccactacaaggaggacagcacactgctatatcctcacactgtatatgatttcatccaagagtgatgtttctctgtttttttttcttcgtagaaaagtagtctgtagtttatcctacactgtacattcttcactgcaagaaatccatgcgggcttcgtgcattttgctgagttattaaatggctatatggacctgggtcagacgtcagacttccaagttccaaaggcctaggcctcgacgctctgtcgagctctgacgaactgaagacgagactgaagaaatgtatgatgtttgagatgtacgcgtctaggttgtggatggtctggcggatccatgctttcaaccggcttttaaatacgatggaaccgaactaaaagtacagccaccataaaaatttcatcataattaggccaaag

SEQ ID NO: 77909 - DNA, 1357 bp, Zea Mays
gatatgtgaaatggatcctaacgaagcgcaaagtttctagtctagaaaaggagcgtcagcatcttcaatctactgtcaaagctcttcaagaagaaaagaagctattgaggaacattcccgtgaatgagaaggcaacaactactgtagagaaaccttgggttgataaaagagacgcatcaactgcgacagaagatttagatattggggaaaacagctcttcagaaacgctaaccagcactgttgacacattggaagatgctggaatatctgttttgcgttccaacattatgtctgatttttcttccttagaagaggtctcatctagcattccagatgatcagcttagaatgattgacaacatcaattctttgatgtcagagttagtagtggagagagaagcgctgctgcgagcactgagaattgagtcatccaactgctccaagctgaaggagttgaataaggacctaacacaaaagctggagattcagacacagaggcttgaactattgacttctcaaaggatggctaacgagaatgccctggcaaaaccaattgacacacgctccatcaatgatgcaacaatgtatgcagatgaaggagatgaggttgttgaacgggtgcttggctggataatgaagctcttcccaggagggccaaagcggcgaaccagcaaacttctgtaatgaaaatagagctcctagtataccagatgtttctttcatttaaggcttgtttaggtgaaaggggttgttctaggagcaccaccaagtgtttagttcaaatttgaactaaatgttgaggaatttgttccaaatccccagcatccgaacatgcctttatatatatatatatatatttctttgcccggttttgctgatagcatggtgagaagctgtatattggagccattcaatgtaaccattatttatttttgacagaagataatgtaattccctggagtatggtgcgggcggcagcctgttttggcaaggaaaagaatagtcgcaaagaatagacccttttgtatccattgaagcagtacggattgaaacaaagcagacaaagagactgcaactgttacatacctaaaaaatttctacggaattgctcaaggcgaggcggttttgtgaaattacaaaattcgtttgaatctatcactctgtaaagttagtgctcagtaggaaaaaccgaaggaacttctctaatttggttttccgataaccaaaagagtatagccaccgcacaaccaaagtcagacatgtttttctttttatctgactggttgactggtgagttttttttccccgaatgtctagttatagcgcgcctttcaactgttcgcttggtttaattcgta

SEQ ID NO: 77910 - DNA, 2896 bp, Zea Mays
cccgacagaatccaaatgcacgaaattcgccacgttacttcagctcgagcagttccgcaagaagaaagcggcgaagaaggccactgcagctagtgcagagcaggcaaaagcgcctgcgcctgatgtagtggagaacccacctccaattgtcaatgctggtagcttgggagatggactggtgtctgatgtagacccaaaccaagcgagcacgtcttcggtaccattgtccgtatatgagaatggcccagccagtgcatccaggggtgcagaattcatgtcaaatggtcatcagcaagatgctgttagtgatggaggacgtaagttctatgggaacttgagcttctctgaccttgttaatggtcatcatgagaattggagaggcgacggagcccgtaaaaaggacgagcacagcccttacaaggatgtggaatcaaaatcaaaattaagtgcctttgggaatggcagcagtttaaatttaccttctactgaaaacatgccgagttggggaagaaattctttatcaagtcaagtacatgatactgaacaatctagttcatattcatccagcaccctttttggaaagtccaaaaatgcctatgctcaggattactccacaaacagtgatatctttggtcgtttgagagctacctccgaagactcttccaaagtggagcaatctatgtatgccagcactcgagattatggcaatgccttcaatagttcaatgattgccggtactgtagatcatgatacaaatgttggaataactcggacatctgcagattccacacctgttaattctgaaagacaggatccttttctgtcatctggttatccaactacatacactcgatcaaggccatcatttcttgatatgattggagtgcaaagagcccccctaacaactgaagcctcatatagggagcctgcaaaggctaatcaactatccagctattcaaattatcagagttcatttttgcagcaatcaaatcaacaatccactggaagtaatgctgcagatattccttttgcatcagaaagtcaggaatatagtcatgaaaaggggtcatatggcagctccactcctcctgatttcttacttcccaaagaagaaagaagtaaacaccatggtaatcaaacattccaaaacttcacaactcatgggaaggatgatgattttgcagcactagagcagctcattgaagatttgacaaaagagaagttttctttgcaacaaagtcttcagaaatctcaagaactagccgaaactttggcgacagataactctgcattaactgataagttcaaccaacaggcacatgtaatcagccagttgacatctgacatggagagattgcaggaagagattcaagctcaactgctggcgctggagtctatcaggaccgaatatgctaatgcacaactagaatgcagtgctgcagatgagagggcaaaagtacttgcagctgaagtcattctactagaagataagggtttgaggctgaggtcaagtgagctaaaacttgaaaaggaagttgaaggtttacattctgagatttcttcttacaggcgcaaagtttctagtctagaaaaggagcgtcagcatcttcaatctactgtcaaagctcttcaagaagaagctattgaggaacattcccgtgaatgagaaggcaacaactactgtagagaaaccttgggttgataaaagagacgcatcaactgcgacagaagatttagatattggggaaaacagctcttcagaaacgctaaccagcactgttgacacattggaagatgctggaatatctgttttgcgttccaacattatgtctgatttttcttccttagaagaggtctcatctagcattccagatgatcagcttagaatgattgacaacatcaattctttgatgtcagagttagtagtggagagagaagcgctgctgcgagcactgagaattgagtcatccaactgctccaagctgaaggagttgaataaggacctaacacaaaagctggagattcagacacagaggcttgaactattgacttctcaaaggatggctaacgagaatgccctggcaaaaccaattgacacacgctccatcaatgatgcaacaatgtatgcagatgaaggagatgaggttgttgaacgggtgcttggctggataatgaagctcttcccaggagggccaaagcggcgaaccagcaaacttctgtaatgaaaatagagctcctagtataccagatgtttctttcatttaaggcttgtttaggtgaaaggggttgttctaggagcaccaccaagtgtttagttcaaatttgaactaaatgttgaggaatttgttccaaatccccagcatccgaacatgcctttatatatatatatatatatttctttgcccggttttgctgatagcatggtgagaagctgtatattggagccattcaatgtaaccattatttatttttgacagaagataatgtaattccctggagtatggtgcgggcggcagcctgttttggcaaggaaaagaatagtcgcaaagaatagacccttttgtatccattgaagcagtacggattgaaacaaagcagacaaagagactgcaactgttacatacctaaaaaatttctacggaattgctcaaggcgaggcggttttgtgaaattacaaaattcgtttgaatctatcactctgtaaagttagtgctcagtaggaaaaaccgaaggaacttctctaatttggttttccgataaccaaaagagtatagccaccgcacaaccaaagtcagacatgtttttctttttatctgactggttgactggtgagttttttttccccgaatgtctagttatagcgcgcctttcaactgttcgcttggtttaattcgta

SEQ ID NO: 77911 - DNA, 2993 bp, Zea Mays
gagaagccaaatgctgttaaacttgcctgaggtcgttttgcgtgtgatagataagccaagtgataccaagtttgtatcgattgtgccgcttgcccgacagaatccaaatgcacgaaattcgccacgttacttcagctcgagcagttccgcaagaagaaagcggcgaagaaggccactgcagctagtgcagagcaggcaaaagcgcctgcgcctgatgtagtggagaacccacctccaattgtcaatgctggtagcttgggagatggactggtgtctgatgtagacccaaaccaagcgagcacgtcttcggtaccattgtccgtatatgagaatggcccagccagtgcatccaggggtgcagaattcatgtcaaatggtcatcagcaagatgctgttagtgatggaggacgtaagttctatgggaacttgagcttctctgaccttgttaatggtcatcatgagaattggagaggcgacggagcccgtaaaaaggacgagcacagcccttacaaggatgtggaatcaaaatcaaaattaagtgcctttgggaatggcagcagtttaaatttaccttctactgaaaacatgccgagttggggaagaaattctttatcaagtcaagtacatgatactgaacaatctagttcatattcatccagcaccctttttggaaagtccaaaaatgcctatgctcaggattactccacaaacagtgatatctttggtcgtttgagagctacctccgaagactcttccaaagtggagcaatctatgtatgccagcactcgagattatggcaatgccttcaatagttcaatgattgccggtactgtagatcatgatacaaatgttggaataactcggacatctgcagattccacacctgttaattctgaaagacaggatccttttctgtcatctggttatccaactacatacactcgatcaaggccatcatttcttgatatgattggagtgcaaagagcccccctaacaactgaagcctcatatagggagcctgcaaaggctaatcaactatccagctattcaaattatcagagttcatttttgcagcaatcaaatcaacaatccactggaagtaatgctgcagatattccttttgcatcagaaagtcaggaatatagtcatgaaaaggggtcatatggcagctccactcctcctgatttcttacttcccaaagaagaaagaagtaaacaccatggtaatcaaacattccaaaacttcacaactcatgggaaggatgatgattttgcagcactagagcagctcattgaagatttgacaaaagagaagttttctttgcaacaaagtcttcagaaatctcaagaactagccgaaactttggcgacagataactctgcattaactgataagttcaaccaacaggcacatgtaatcagccagttgacatctgacatggagagattgcaggaagagattcaagctcaactgctggcgctggagtctatcaggaccgaatatgctaatgcacaactagaatgcagtgctgcagatgagagggcaaaagtacttgcagctgaagtcattctactagaagataagggtttgaggctgaggtcaagtgagctaaaacttgaaaaggaagttgaaggtttacattctgagatttcttcttacaggcgcaaagtttctagtctagaaaaggagcgtcagcatcttcaatctactgtcaaagctcttcaagaagaaaagaagctattgaggaacattcccgtgaatgagaaggcaacaactactgtagagaaaccttgggttgataaaagagacgcatcaactgcgacagaagatttagatattggggaaaacagctcttcagaaacgctaaccagcactgttgacacattggaagatgctggaatatctgttttgcgttccaacattatgtctgatttttcttccttagaagaggtctcatctagcattccagatgatcagcttagaatgattgacaacatcaattctttgatgtcagagttagtagtggagagagaagcgctgctgcgagcactgagaattgagtcatccaactgctccaagctgaaggagttgaataaggacctaacacaaaagctggagattcagacacagaggcttgaactattgacttctcaaaggatggctaacgagaatgccctggcaaaaccaattgacacacgctccatcaatgatgcaacaatgtatgcagatgaaggagatgaggttgttgaacgggtgcttggctggataatgaagctcttcccaggagggccaaagcggcgaaccagcaaacttctgtaatgaaaatagagctcctagtataccagatgtttctttcatttaaggcttgtttaggtgaaaggggttgttctaggagcaccaccaagtgtttagttcaaatttgaactaaatgttgaggaatttgttccaaatccccagcatccgaacatgcctttatatatatatatatatatttctttgcccggttttgctgatagcatggtgagaagctgtatattggagccattcaatgtaaccattatttatttttgacagaagataatgtaattccctggagtatggtgcgggcggcagcctgttttggcaaggaaaagaatagtcgcaaagaatagacccttttgtatccattgaagcagtacggattgaaacaaagcagacaaagagactgcaactgttacatacctaaaaaatttctacggaattgctcaaggcgaggcggttttgtgaaattacaaaattcgtttgaatctatcactctgtaaagttagtgctcagtaggaaaaaccgaaggaacttctctaatttggttttccgataaccaaaagagtatagccaccgcacaaccaaagtcagacatgtttttctttttatctgactggttgactggtgagttttttttccccgaatgtctagttatagcgcgcctttcaactgttcgcttggtttaattcgta

SEQ ID NO: 77912 - DNA, 2795 bp, Zea Mays
gggacatcgtgttgcttagcgtgacgactgccgtgccgttcgatcggttttgcacagggcagagaagccaaatgctgttaaacttgcctgaggtcgttttgcgtgtgatagataagccaagtgataccaagtttgtatcgattgtgccgcttgcccgacagaatccaaatgcacgaaattcgccacgttacttcagctcgagcagttccgcaagaagaaagcggcgaagaaggccactgcagctagtgcagagcaggcaaaagcgcctgcgcctgatgtagtggagaacccacctccaattgtcaatgctggtagcttgggagatggactggtgtctgatgtagacccaaaccaagcgagcacgtcttcggtaccattgtccgtatatgagaatggcccagccagtgcatccaggggtgcagaattcatgtcaaatggtcatcagcaagatgctgttagtgatggaggacgtaagttctatgggaacttgagcttctctgaccttgttaatggtcatcatgagaattggagaggcgacggagcccgtaaaaaggacgagcacagcccttacaaggatgtggaatcaaaatcaaaattaagtgcctttgggaatggcagcagtttaaatttaccttctactgaaaacatgccgagttggggaagaaattctttatcaagtcaagtacatgatactgaacaatctagttcatattcatccagcaccctttttggaaagtccaaaaatgcctatgctcaggattactccacaaacagtgatatctttggtcgtttgagagctacctccgaagactcttccaaagtggagcaatctatgtatgccagcactcgagattatggcaatgccttcaatagttcaatgattgccggtactgtagatcatgatacaaatgttggaataactcggacatctgcagattccacacctgttaattctgaaagacaggatccttttctgtcatctggttatccaactacatacactcgatcaaggccatcatttcttgatatgattggagtgcaaagagcccccctaacaactgaagcctcatatagggagcctgcaaaggctaatcaactatccagctattcaaattatcagagttcatttttgcagcaatcaaatcaacaatccactggaagtaatgctgcagatattccttttgcatcagaaagtcaggaatatagtcatgaaaaggggtcatatggcagctccactcctcctgatttcttacttcccaaagaagaaagaagtaaacaccatggtaatcaaacattccaaaacttcacaactcatgggaaggatgatgattttgcagcactagagcagctcattgaagatttgacaaaagagaagttttctttgcaacaaagtcttcagaaatctcaagaactagccgaaactttggcgacagataactctgcattaactgataagttcaaccaacaggcacatgtaatcagccagttgacatctgacatggagagattgcaggaagagattcaagctcaactgctggcgctggagtctatcaggaccgaatatgctaatgcacaactagaatgcagtgctgcagatgagagggcaaaagtacttgcagctgaagtcattctactagaagataagggtttgaggctgaggtcaagtgagctaaaacttgaaaaggaagttgaaggtttacattctgagatttcttcttacaggcgcaaagtttctagtctagaaaaggagcgtcagcatcttcaatctactgtcaaagctcttcaagaagaaaagaagctattgaggaacattcccgtgaatgagaaggcaacaactactgtagagaaaccttgggttgataaaagagacgcatcaactgcgacagaagatttagatattggggaaaacagctcttcagaaacgctaaccagcactgttgacacattggaagatgctggaatatctgttttgcgttccaacattatgtctgatttttcttccttagaagaggtctcatctagcattccagatgatcagcttagaatgattgacaacatcaattctttgatgtcagagttagtagtggagagagaagcgctgctgcgagcactgagaattgagtcatccaactgctccaagctgaaggagttgaataaggacctaacacaaaagctggagattcagacacagaggcttgaactattgacttctcaaaggatggctaacgagaatgccctggcaaaaccaattgacacacgctccatcaatgatgcaacaatgtatgcagatgaaggagatgaggttgttgaacgggtgcttggctggataatgaagctcttcccaggagggccaaagcggcgaaccagcaaacttctaagataatgtaattccctggagtatggtgcgggcggcagcctgttttggcaaggaaaagaatagtcgcaaagaatagacccttttgtatccattgaagcagtacggattgaaacaaagcagacaaagagactgcaactgttacatacctaaaaaatttctacggaattgctcaaggcgaggcggttttgtgaaattacaaaattcgtttgaatctatcactctgtaaagttagtgctcagtaggaaaaaccgaaggaacttctctaatttggttttccgataaccaaaagagtatagccaccgcacaaccaaagtcagacatgtttttctttttatctgactggttgactggtgagttttttttccccgaatgtctagttatagcgcgcctttcaactgttcgcttggtttaattcgta

SEQ ID NO: 77913 - DNA, 1294 bp, Zea Mays
cttggatcaatatctcgtacatgcaactggttgctatgaggctataaaacaattgtcactagctggcgctggagtctatcaggaccgaatatgctaatgcacaactagaatgcagtgctgcagatgagagggcaaaagtacttgcagctgaagtcattctactagaagataagggtttgaggctgaggtcaagtgagctaaaacttgaaaaggaagttgaaggtttacattctgagatttcttcttacaggcgcaaagtttctagtctagaaaaggagcgtcagcatcttcaatctactgtcaaagctcttcaagaagaaaagaagctattgaggaacattcccgtgaatgagaaggcaacaactactgtagagaaaccttgggttgataaaagagacgcatcaactgcgacagaagatttagatattggggaaaacagctcttcagaaacgctaaccagcactgttgacacattggaagatgctggaatatctgttttgcgttccaacattatgtctgatttttcttccttagaagaggtctcatctagcattccagatgatcagcttagaatgattgacaacatcaattctttgatgtcagagttagtagtggagagagaagcgctgctgcgagcactgagaattgagtcatccaactgctccaagctgaaggagttgaataaggacctaacacaaaagctggagattcagacacagaggcttgaactattgacttctcaaaggatggctaacgagaatgccctggcaaaaccaattgacacacgctccatcaatgatgcaacaatgtatgcagatgaaggagatgaggttgttgaacgggtgcttggctggataatgaagctcttcccaggagggccaaagcggcgaaccagcaaacttctgtaatgaaaatagagctcctagtataccagatgtttctttcatttaaggcttgtttaggtgaaaggggttgttctaggagcaccaccaagtgtttagttcaaatttgaactaaatgttgaggaatttgttccaaatccccagcatccgaacatgcctttatatatatatatatatatttctttgcccggttttgctgatagcatggtgagaagctgtatattggagccattcaatgtaaccattatttatttttgacagaagataatgtaattccctggagtatggtgcgggcggcagcctgttttggcaaggaaaagaatagtcgcaaagaatagacccttttgtatccattgaagtatggaacaatttctttcattatacgagtcgaa

SEQ ID NO: 77914 - DNA, 3103 bp, Zea Mays
gccgagttgccgacgcaccgaaaaaagacagctgacgcgaatgcccaaacgttcggggggcgagcgggatttggaagctgcgcaacgcgcttcccaaatcccccaatcccgacgcccacccgaccccgtcgccagatctcgcgcctcgtccccggggctcgatcggataagcggcggtcggcgattcggggacggggtcatctcgcctaggcttgggcggggctgggctggtgggagccgccgagccggggagccatggcgtcggcgcaggcgccgtcctccgccgctgcgccgtcgcgcaaggaccatctcgaggccgggaagaagcggctcgagcagttccgcaagaagaaagcggcgaagaaggccactgcagctagtgcagagcaggcaaaagcgcctgcgcctgatgtagtggagaacccacctccaattgtcaatgctggtagcttgggagatggactggtgtctgatgtagacccaaaccaagcgagcacgtcttcggtaccattgtccgtatatgagaatggcccagccagtgcatccaggggtgcagaattcatgtcaaatggtcatcagcaagatgctgttagtgatggaggacgtaagttctatgggaacttgagcttctctgaccttgttaatggtcatcatgagaattggagaggcgacggagcccgtaaaaaggacgagcacagcccttacaaggatgtggaatcaaaatcaaaattaagtgcctttgggaatggcagcagtttaaatttaccttctactgaaaacatgccgagttggggaagaaattctttatcaagtcaagtacatgatactgaacaatctagttcatattcatccagcaccctttttggaaagtccaaaaatgcctatgctcaggattactccacaaacagtgatatctttggtcgtttgagagctacctccgaagactcttccaaagtggagcaatctatgtatgccagcactcgagattatggcaatgccttcaatagttcaatgattgccggtactgtagatcatgatacaaatgttggaataactcggacatctgcagattccacacctgttaattctgaaagacaggatccttttctgtcatctggttatccaactacatacactcgatcaaggccatcatttcttgatatgattggagtgcaaagagcccccctaacaactgaagcctcatatagggagcctgcaaaggctaatcaactatccagctattcaaattatcagagttcatttttgcagcaatcaaatcaacaatccactggaagtaatgctgcagatattccttttgcatcagaaagtcaggaatatagtcatgaaaaggggtcatatggcagctccactcctcctgatttcttacttcccaaagaagaaagaagtaaacaccatggtaatcaaacattccaaaacttcacaactcatgggaaggatgatgattttgcagcactagagcagctcattgaagatttgacaaaagagaagttttctttgcaacaaagtcttcagaaatctcaagaactagccgaaactttggcgacagataactctgcattaactgataagttcaaccaacaggcacatgtaatcagccagttgacatctgacatggagagattgcaggaagagattcaagctcaactgctggcgctggagtctatcaggaccgaatatgctaatgcacaactagaatgcagtgctgcagatgagagggcaaaagtacttgcagctgaagtcattctactagaagataagggtttgaggctgaggtcaagtgagctaaaacttgaaaaggaagttgaaggtttacattctgagatttcttcttacaggcgcaaagtttctagtctagaaaaggagcgtcagcatcttcaatctactgtcaaagctcttcaagaagaaaagaagctattgaggaacattcccgtgaatgagaaggcaacaactactgtagagaaaccttgggttgataaaagagacgcatcaactgcgacagaagatttagatattggggaaaacagctcttcagaaacgctaaccagcactgttgacacattggaagatgctggaatatctgttttgcgttccaacattatgtctgatttttcttccttagaagaggtctcatctagcattccagatgatcagcttagaatgattgacaacatcaattctttgatgtcagagttagtagtggagagagaagcgctgctgcgagcactgagaattgagtcatccaactgctccaagctgaaggagttgaataaggacctaacacaaaagctggagattcagacacagaggcttgaactattgacttctcaaaggatggctaacgagaatgccctggcaaaaccaattgacacacgctccatcaatgatgcaacaatgtatgcagatgaaggagatgaggtaagtatccctcatcaagtatatagtggaaatttgatagttgatcctaccacataattgttgatggaaattcacattggttccagtgttttagcttgaataagagttagagctaaaggaatccaaactttacatatgcacgttaaagttcacatcaccctgaaaacgttatctgtagacgtttgacatggaatatggctcaggttgttgaacgggtgcttggctggataatgaagctcttcccaggagggccaaagcggcgaaccagcaaacttctgtaatgaaaatagagctcctagtataccagatgtttctttcatttaaggcttgtttaggtgaaaggggttgttctaggagcaccaccaagtgtttagttcaaatttgaactaaatgttgaggaatttgttccaaatccccagcatccgaacatgcctttatatatatatatatatatttctttgcccggttttgctgatagcatggtgagaagctgtatattggagccattcaatgtaaccattatttatttttgacagaagataatgtaattccctggagtatggtgcgggcggcagcctgttttggcaaggaaaagaatagtcgcaaagaatagacccttttgtatccattgaagtatggaacaatttctttcattatacgagtcgaa

SEQ ID NO: 77915 - DNA, 2888 bp, Zea Mays
gccgagttgccgacgcaccgaaaaaagacagctgacgcgaatgcccaaacgttcggggggcgagcgggatttggaagctgcgcaacgcgcttcccaaatcccccaatcccgacgcccacccgaccccgtcgccagatctcgcgcctcgtccccggggctcgatcggataagcggcggtcggcgattcggggacggggtcatctcgcctaggcttgggcggggctgggctggtgggagccgccgagccggggagccatggcgtcggcgcaggcgccgtcctccgccgctgcgccgtcgcgcaaggaccatctcgaggccgggaagaagcggctcgagcagttccgcaagaagaaagcggcgaagaaggccactgcagctagtgcagagcaggcaaaagcgcctgcgcctgatgtagtggagaacccacctccaattgtcaatgctggtagcttgggagatggactggtgtctgatgtagacccaaaccaagcgagcacgtcttcggtaccattgtccgtatatgagaatggcccagccagtgcatccaggggtgcagaattcatgtcaaatggtcatcagcaagatgctgttagtgatggaggacgtaagttctatgggaacttgagcttctctgaccttgttaatggtcatcatgagaattggagaggcgacggagcccgtaaaaaggacgagcacagcccttacaaggatgtggaatcaaaatcaaaattaagtgcctttgggaatggcagcagtttaaatttaccttctactgaaaacatgccgagttggggaagaaattctttatcaagtcaagtacatgatactgaacaatctagttcatattcatccagcaccctttttggaaagtccaaaaatgcctatgctcaggattactccacaaacagtgatatctttggtcgtttgagagactcttccaaagtggagcaatctatgtatgccagcactcgagattatggcaatgccttcaatagttcaatgattgccggtactgtagatcatgatacaaatgttggaataactcggacatctgcagattccacacctgttaattctgaaagacaggatccttttctgtcatctggttatccaactacatacactcgatcaaggccatcatttcttgatatgattggagtgcaaagagcccccctaacaactgaagcctcatatagggagcctgcaaaggctaatcaactatccagctattcaaattatcagagttcatttttgcagcaatcaaatcaacaatccactggaagtaatgctgcagatattccttttgcatcagaaagtcaggaatatagtcatgaaaaggggtcatatggcagctccactcctcctgatttcttacttcccaaagaagaaagaagtaaacaccatggtaatcaaacattccaaaacttcacaactcatgggaaggatgatgattttgcagcactagagcagctcattgaagatttgacaaaagagaagttttctttgcaacaaagtcttcagaaatctcaagaactagccgaaactttggcgacagataactctgcattaactgataagttcaaccaacaggcacatgtaatcagccagttgacatctgacatggagagattgcaggaagagattcaagctcaactgctggcgctggagtctatcaggaccgaatatgctaatgcacaactagaatgcagtgctgcagatgagagggcaaaagtacttgcagctgaagtcattctactagaagataagggtttgaggctgaggtcaagtgagctaaaacttgaaaaggaagttgaaggtttacattctgagatttcttcttacaggcgcaaagtttctagtctagaaaaggagcgtcagcatcttcaatctactgtcaaagctcttcaagaagaaaagaagctattgaggaacattcccgtgaatgagaaggcaacaactactgtagagaaaccttgggttgataaaagagacgcatcaactgcgacagaagatttagatattggggaaaacagctcttcagaaacgctaaccagcactgttgacacattggaagatgctggaatatctgttttgcgttccaacattatgtctgatttttcttccttagaagaggtctcatctagcattccagatgatcagcttagaatgattgacaacatcaattctttgatgtcagagttagtagtggagagagaagcgctgctgcgagcactgagaattgagtcatccaactgctccaagctgaaggagttgaataaggacctaacacaaaagctggagattcagacacagaggcttgaactattgacttctcaaaggatggctaacgagaatgccctggcaaaaccaattgacacacgctccatcaatgatgcaacaatgtatgcagatgaaggagatgaggttgttgaacgggtgcttggctggataatgaagctcttcccaggagggccaaagcggcgaaccagcaaacttctgtaatgaaaatagagctcctagtataccagatgtttctttcatttaaggcttgtttaggtgaaaggggttgttctaggagcaccaccaagtgtttagttcaaatttgaactaaatgttgaggaatttgttccaaatccccagcatccgaacatgcctttatatatatatatatatatttctttgcccggttttgctgatagcatggtgagaagctgtatattggagccattcaatgtaaccattatttatttttgacagaagataatgtaattccctggagtatggtgcgggcggcagcctgttttggcaaggaaaagaatagtcgcaaagaatagacccttttgtatccattgaagtatggaacaatttctttcattatacgagtcgaa

SEQ ID NO: 77916 - DNA, 2895 bp, Zea Mays
gccgagttgccgacgcaccgaaaaaagacagctgacgcgaatgcccaaacgttcggggggcgagcgggatttggaagctgcgcaacgcgcttcccaaatcccccaatcccgacgcccacccgaccccgtcgccagatctcgcgcctcgtccccggggctcgatcggataagcggcggtcggcgattcggggacggggtcatctcgcctaggcttgggcggggctgggctggtgggagccgccgagccggggagccatggcgtcggcgcaggcgccgtcctccgccgctgcgccgtcgcgcaaggaccatctcgaggccgggaagaagcggctcgagcagttccgcaagaagaaagcggcgaagaaggccactgcagctagtgcagagcaggcaaaagcgcctgcgcctgatgtagtggagaacccacctccaattgtcaatgctggtagcttgggagatggactggtgtctgatgtagacccaaaccaagcgagcacgtcttcggtaccattgtccgtatatgagaatggcccagccagtgcatccaggggtgcagaattcatgtcaaatggtcatcagcaagatgctgttagtgatggaggacgtaagttctatgggaacttgagcttctctgaccttgttaatggtcatcatgagaattggagaggcgacggagcccgtaaaaaggacgagcacagcccttacaaggatgtggaatcaaaatcaaaattaagtgcctttgggaatggcagcagtttaaatttaccttctactgaaaacatgccgagttggggaagaaattctttatcaagtcaagtacatgatactgaacaatctagttcatattcatccagcaccctttttggaaagtccaaaaatgcctatgctcaggattactccacaaacagtgatatctttggtcgtttgagagctacctccgaagactcttccaaagtggagcaatctatgtatgccagcactcgagattatggcaatgccttcaatagttcaatgattgccggtactgtagatcatgatacaaatgttggaataactcggacatctgcagattccacacctgttaattctgaaagacaggatccttttctgtcatctggttatccaactacatacactcgatcaaggccatcatttcttgatatgattggagtgcaaagagcccccctaacaactgaagcctcatatagggagcctgcaaaggctaatcaactatccagctattcaaattatcagagttcatttttgcagcaatcaaatcaacaatccactggaagtaatgctgcagatattccttttgcatcagaaagtcaggaatatagtcatgaaaaggggtcatatggcagctccactcctcctgatttcttacttcccaaagaagaaagaagtaaacaccatggtaatcaaacattccaaaacttcacaactcatgggaaggatgatgattttgcagcactagagcagctcattgaagatttgacaaaagagaagttttctttgcaacaaagtcttcagaaatctcaagaactagccgaaactttggcgacagataactctgcattaactgataagttcaaccaacaggcacatgtaatcagccagttgacatctgacatggagagattgcaggaagagattcaagctcaactgctggcgctggagtctatcaggaccgaatatgctaatgcacaactagaatgcagtgctgcagatgagagggcaaaagtacttgcagctgaagtcattctactagaagataagggtttgaggctgaggtcaagtgagctaaaacttgaaaaggaagttgaaggtttacattctgagatttcttcttacaggcgcaaagtttctagtctagaaaaggagcgtcagcatcttcaatctactgtcaaagctcttcaagaagaagctattgaggaacattcccgtgaatgagaaggcaacaactactgtagagaaaccttgggttgataaaagagacgcatcaactgcgacagaagatttagatattggggaaaacagctcttcagaaacgctaaccagcactgttgacacattggaagatgctggaatatctgttttgcgttccaacattatgtctgatttttcttccttagaagaggtctcatctagcattccagatgatcagcttagaatgattgacaacatcaattctttgatgtcagagttagtagtggagagagaagcgctgctgcgagcactgagaattgagtcatccaactgctccaagctgaaggagttgaataaggacctaacacaaaagctggagattcagacacagaggcttgaactattgacttctcaaaggatggctaacgagaatgccctggcaaaaccaattgacacacgctccatcaatgatgcaacaatgtatgcagatgaaggagatgaggttgttgaacgggtgcttggctggataatgaagctcttcccaggagggccaaagcggcgaaccagcaaacttctgtaatgaaaatagagctcctagtataccagatgtttctttcatttaaggcttgtttaggtgaaaggggttgttctaggagcaccaccaagtgtttagttcaaatttgaactaaatgttgaggaatttgttccaaatccccagcatccgaacatgcctttatatatatatatatatatttctttgcccggttttgctgatagcatggtgagaagctgtatattggagccattcaatgtaaccattatttatttttgacagaagataatgtaattccctggagtatggtgcgggcggcagcctgttttggcaaggaaaagaatagtcgcaaagaatagacccttttgtatccattgaagtatggaacaatttctttcattatacgagtcgaa

SEQ ID NO: 77917 - DNA, 1748 bp, Zea Mays
gccgagttgccgacgcaccgaaaaaagacagctgacgcgaatgcccaaacgttcggggggcgagcgggatttggaagctgcgcaacgcgcttcccaaatcccccaatcccgacgcccacccgaccccgtcgccagatctcgcgcctcgtccccggggctcgatcggataagcggcggtcggcgattcggggacggggtcatctcgcctaggcttgggcggggctgggctggtgggagccgccgagccggggagccatggcgtcggcgcaggcgccgtcctccgccgctgcgccgtcgcgcaaggaccatctcgaggccgggaagaagcggctcattgaagatttgacaaaagagaagttttctttgcaacaaagtcttcagaaatctcaagaactagccgaaactttggcgacagataactctgcattaactgataagttcaaccaacaggcacatgtaatcagccagttgacatctgacatggagagattgcaggaagagattcaagctcaactgctggcgctggagtctatcaggaccgaatatgctaatgcacaactagaatgcagtgctgcagatgagagggcaaaagtacttgcagctgaagtcattctactagaagataagggtttgaggctgaggtcaagtgagctaaaacttgaaaaggaagttgaaggtttacattctgagatttcttcttacaggcgcaaagtttctagtctagaaaaggagcgtcagcatcttcaatctactgtcaaagctcttcaagaagaaaagaagctattgaggaacattcccgtgaatgagaaggcaacaactactgtagagaaaccttgggttgataaaagagacgcatcaactgcgacagaagatttagatattggggaaaacagctcttcagaaacgctaaccagcactgttgacacattggaagatgctggaatatctgttttgcgttccaacattatgtctgatttttcttccttagaagaggtctcatctagcattccagatgatcagcttagaatgattgacaacatcaattctttgatgtcagagttagtagtggagagagaagcgctgctgcgagcactgagaattgagtcatccaactgctccaagctgaaggagttgaataaggacctaacacaaaagctggagattcagacacagaggcttgaactattgacttctcaaaggatggctaacgagaatgccctggcaaaaccaattgacacacgctccatcaatgatgcaacaatgtatgcagatgaaggagatgaggttgttgaacgggtgcttggctggataatgaagctcttcccaggagggccaaagcggcgaaccagcaaacttctgtaatgaaaatagagctcctagtataccagatgtttctttcatttaaggcttgtttaggtgaaaggggttgttctaggagcaccaccaagtgtttagttcaaatttgaactaaatgttgaggaatttgttccaaatccccagcatccgaacatgcctttatatatatatatatatatttctttgcccggttttgctgatagcatggtgagaagctgtatattggagccattcaatgtaaccattatttatttttgacagaagataatgtaattccctggagtatggtgcgggcggcagcctgttttggcaaggaaaagaatagtcgcaaagaatagacccttttgtatccattgaagtatggaacaatttctttcattatacgagtcgaa

SEQ ID NO: 77918 - DNA, 1792 bp, Zea Mays
cttgtgttgggtgctttgtttcccttttgcttctaagaatctatggtagtggttagaaatgacatcgttaagctgtttgacaccatcaagagttacgatgatgggaccttctactttgatgaaaagcatgttgatgctaccgaatacaagggtcctataatgacttctgcttcggtggtacgtggtgtcacctcttttgcagctgttgcttctggaaaattggatatccctggtgacaagatacttggcttggcaaaattcttccttggtattgggctcccaggtagctcaaaggattgctttaatcagattgactctttgtcagtcctggaggacaatagggtcttcgttcctttgatactctcacttcctaccaaagtattctcattgtctttgaaagatcagcttaaggttgaagttaccacagtgtttggatctgcagcacctttactcaaagtgaatcttgtgcaagtgttgggaactgactctaaagtcatcaccaatgggaacagggagcttcaatatgaccttgacaaaaatgtccattacttggacattgctccattggaaatagatgttgggaaatactcggtagtttttgaggactgatcaaagttgataaggcagaaataggaatatccgacaatgatgctgggaccgtggagtctgtccaaaagttagatcttctgaaagatacaaaggtgtctctttctgcaaaccacctacagaagctgcgtttatcttttcaattaactactccgcttgggctcacatttaaacctcaccaggtgttcttgaagttgaagcatgagagtaaggttgaacacttatttgtggtacctggctctgcaaggcaattcaaaattgttctcgacttcctagggttggtggagaaattttactacctctctggaagatatgaccttgagcttgccgttggtgatgctgcaatggaaaattcatttctacgacctcttggccatttggagttggacctaccagaggccccagaaaaagccccacgtcctcctgcacaagctgttgacccattctcaaaatttgggccgaaggcagagatattgcatatattccgtgccccagagaagaggccacccaaggaactctcgctcgcattcacgggtctcacgcttctgccttttatcggattcttgattgggctcgtgcgtcttggagtgaacgtgaagaacttcccgtccttgccgggaccggccgcatttgcctcagttttccatgctggaataggagcagtcttgctgctctacgttctcttctggctcaagttggaccttttcacaactctgaagtaccttggcttcctcggcatcttcctcgtgtttgtgggccataggaccctgtcctacctttcctcggcgtcagcaaaacagaagacggcatgagtggacagtgcaagcagagctttcccgatcatcaattcgttttttgaggtggccattccaggccactgggtgtctttgcttggtactctgaccgcaccctagtttttctttagctaacatgcattttgagggaggactcggtttatttcagttgtctttgacgaatactgatactaggacaagtaacaggacctcacatcacagtttctgaatagaatggatgtttaatcatagcatttatatgatcattcgatatacatcatccttaatcgaactgaaacgttatatgtacacagaaatgatgcaaagttaaagaatttttgagcgtgtttggatgcacgccacagccggccggcacaaaaaataatggagat

SEQ ID NO: 77919 - DNA, 2586 bp, Zea Mays
cggacaagcggacacaccatcggcggtgctgcgagcctgcgactgctcccgctccacaatttcaacctccagatctggccactcccactctcacacgcccagtcttctcaatcctcacatcctattggccacggcaactgccatcgccatggccgggaggcgtccggcaccggcggccctcctcctcctcgccgtagccttcgctcccatctcctccgccgttcgcccagtctccgatgcgcacagatccgctgccgaggagctcttcgccccctccgccgacggatcctttggcgatttggagagtacgtatgaggcagtgaaaacattccagatactcgggctggagaaatataatagtttatctgggaaggcgtgcaagtttgccgcggagaacctggcttccaccgattccaccgcgaaagatctgttccacgcagtccggatcagtggcgcgctgggatgtggcgttgatgccggcgtgtatgatggtgttgtggcgagactcaaggcagtgattaaggataccaattccctgttggaattctactattctgtgggaggtttgcttagcattaaggaacaaggccataatgttgttctgcctgatgcagaaagtacatttcatgccattaaggcacttagccaaagtgacgggagatggcgttatggcactaacagcgctgaatctagcacatttgctgctggtatcgcactagaagcattggcgggcgttgtttcactggcagatgcagaggttgatccatccatgatggtagtggttagaaatgacatcgttaagctgtttgacaccatcaagagttacgatgatgggaccttctactttgatgaaaagcatgttgatgctaccgaatacaagggtcctataatgacttctgcttcggtggtacgtggtgtcacctcttttgcagctgttgcttctggaaaattggatatccctggtgacaagatacttggcttggcaaaattcttccttggtattgggctcccaggtagctcaaaggattgctttaatcagattgactctttgtcagtcctggaggacaatagggtcttcgttcctttgatactctcacttcctaccaaagtattctcattgtctttgaaagatcagcttaaggttgaagttaccacagtgtttggatctgcagcacctttactcaaagtgaatcttgtgcaagtgttgggaactgactctaaagtcatcaccaatgggaacagggagcttcaatatgaccttgacaaaaatgtccattacttggacattgctccattggaaatagatgttgggaaatactcggtagtttttgagatttcacttcaggaacaagagcgtgagactgtttatgctactggagggaggaacactgaaagtgtatttgtcacaggactgatcaaagttgataaggcagaaataggaatatccgacaatgatgctgggaccgtggagtctgtccaaaagttagatcttctgaaagatacaaaggtgtctctttctgcaaaccacctacagaagctgcgtttatcttttcaattaactactccgcttgggctcacatttaaacctcaccagttgaagcatgagagtaaggttgaacacttatttgtggtacctggctctgcaaggcaattcaaaattgttctcgacttcctagggttggtggagaaattttactacctctctggaagatatgaccttgagcttgccgttggtgatgctgcaatggaaaattcatttctacgacctcttggccatttggagttggacctaccagaggccccagaaaaagccccacgtcctcctgcacaagctgttgacccattctcaaaatttgggccgaaggcagagatattgcatatattccgtgccccagagaagaggccacccaaggaactctcgctcgcattcacgggtctcacgcttctgccttttatcggattcttgattgggctcgtgcgtcttggagtgaacgtgaagaacttcccgtccttgccgggaccggccgcatttgcctcagttttccatgctggaataggagcagtcttgctgctctacgttctcttctggctcaagttggaccttttcacaactctgaagtaccttggcttcctcggcatcttcctcgtgtttgtgggccataggaccctgtcctacctttcctcggcgtcagcaaaacagaagacggcatgagtggacagtgcaagcagagctttcccgatcatcaattcgttttttgaggtggccattccaggccactgggtgtctttgcttggtactctgaccgcaccctagtttttctttagctaacatgcattttgagggaggactcggtttatttcagttgtctttgacgaatactgatactaggacaagtaacaggacctcacatcacagtttctgaatagaatggatgtttaatcatagcatttatatgatcattcgatatacatcatccttaatcgaactgaaacgttatatgtacacagaaatgatgcaaagttaaagaatttttgagcgtgtttggatgcacgccacagccggccggcacaaaaaataatggagat

SEQ ID NO: 77920 - DNA, 2590 bp, Zea Mays
cggacaagcggacacaccatcggcggtgctgcgagcctgcgactgctcccgctccacaatttcaacctccagatctggccactcccactctcacacgcccagtcttctcaatcctcacatcctattggccacggcaactgccatcgccatggccgggaggcgtccggcaccggcggccctcctcctcctcgccgtagccttcgctcccatctcctccgccgttcgcccagtctccgatgcgcacagatccgctgccgaggagctcttcgccccctccgccgacggatcctttggcgatttggagagtacgtatgaggcagtgaaaacattccagatactcgggctggagaaatataatagtttatctgggaaggcgtgcaagtttgccgcggagaacctggcttccaccgattccaccgcgaaagatctgttccacgcagtccggatcagtggcgcgctgggatgtggcgttgatgccggcgtgtatgatggtgttgtggcgagactcaaggcagtgattaaggataccaattccctgttggaattctactattctgtgggaggtttgcttagcattaaggaacaaggccataatgttgttctgcctgatgcagaaagtacatttcatgccattaagccaaagtgacgggagatggcgttatggcactaacagcgctgaatctagcacatttgctgctggtatcgcactagaagcattggcgggcgttgtttcactggcagatgcagaggttgatccatccatgatggtagtggttagaaatgacatcgttaagctgtttgacaccatcaagagttacgatgatgggaccttctactttgatgaaaagcatgttgatgctaccgaatacaagggtcctataatgacttctgcttcggtggtacgtggtgtcacctcttttgcagctgttgcttctggaaaattggatatccctggtgacaagatacttggcttggcaaaattcttccttggtattgggctcccaggtagctcaaaggattgctttaatcagattgactctttgtcagtcctggaggacaatagggtcttcgttcctttgatactctcacttcctaccaaagtattctcattgtctttgaaagatcagcttaaggttgaagttaccacagtgtttggatctgcagcacctttactcaaagtgaatcttgtgcaagtgttgggaactgactctaaagtcatcaccaatgggaacagggagcttcaatatgaccttgacaaaaatgtccattacttggacattgctccattggaaatagatgttgggaaatactcggtagtttttgagatttcacttcaggaacaagagcgtgagactgtttatgctactggagggaggaacactgaaagtgtatttgtcacaggactgatcaaagttgataaggcagaaataggaatatccgacaatgatgctgggaccgtggagtctgtccaaaagttagatcttctgaaagatacaaaggtgtctctttctgcaaaccacctacagaagctgcgtttatcttttcaattaactactccgcttgggctcacatttaaacctcaccaggtgttcttgaagttgaagcatgagagtaaggttgaacacttatttgtggtacctggctctgcaaggcaattcaaaattgttctcgacttcctagggttggtggagaaattttactacctctctggaagatatgaccttgagcttgccgttggtgatgctgcaatggaaaattcatttctacgacctcttggccatttggagttggacctaccagaggccccagaaaaagccccacgtcctcctgcacaagctgttgacccattctcaaaatttgggccgaaggcagagatattgcatatattccgtgccccagagaagaggccacccaaggaactctcgctcgcattcacgggtctcacgcttctgccttttatcggattcttgattgggctcgtgcgtcttggagtgaacgtgaagaacttcccgtccttgccgggaccggccgcatttgcctcagttttccatgctggaataggagcagtcttgctgctctacgttctcttctggctcaagttggaccttttcacaactctgaagtaccttggcttcctcggcatcttcctcgtgtttgtgggccataggaccctgtcctacctttcctcggcgtcagcaaaacagaagacggcatgagtggacagtgcaagcagagctttcccgatcatcaattcgttttttgaggtggccattccaggccactgggtgtctttgcttggtactctgaccgcaccctagtttttctttagctaacatgcattttgagggaggactcggtttatttcagttgtctttgacgaatactgatactaggacaagtaacaggacctcacatcacagtttctgaatagaatggatgtttaatcatagcatttatatgatcattcgatatacatcatccttaatcgaactgaaacgttatatgtacacagaaatgatgcaaagttaaagaatttttgagcgtgtttggatgcacgccacagccggccggcacaaaaaataatggagat

SEQ ID NO: 77921 - DNA, 2449 bp, Zea Mays
cggacaagcggacacaccatcggcggtgctgcgagcctgcgactgctcccgctccacaatttcaacctccagatctggccactcccactctcacacgcccagtcttctcaatcctcacatcctattggccacggcaactgccatcgccatggccgggaggcgtccggcaccggcggccctcctcctcctcgccgtagccttcgctcccatctcctccgccgttcgcccagtctccgatgcgcacagatccgctgccgaggagctcttcgccccctccgccgacggatcctttggcgatttggagagtacgtatgaggcagtgaaaacattccagatactcgggctggagaaatataatagtttatctgggaaggcgtgcaagtttgccgcggagaacctggcttccaccgattccaccgcgaaagatctgttccacgcagtccggatcagtggcgcgctgggatgtggcgttgatgccggcgtgtatgatggtgttgtggcgagactcaaggcagtgattaaggataccaattccctgttggaattctactattctgtgggaggtttgcttagcattaaggaacaaggccataatgttgttctgcctgatgcagaaagtacatttcatgccattaaggcacttagccaaagtgacgggagatggcgttatggcactaacagcgctgaatctagcacatttgctgctggtatcgcactagaagcattggcgggcgttgtttcactggcagatgcagaggttgatccatccatgatggtagtggttagaaatgacatcgttaagctgtttgacaccatcaagagttacgatgatgggaccttctactttgatgaaaagcatgttgatgctaccgaatacaagggtcctataatgacttctgcttcggtggtacgtggtgtcacctcttttgcagctgttgcttctggaaaattggatatccctggtgacaagatacttggcttggcaaaattcttccttggtattgggctcccaggtagctcaaaggattgctttaatcagattgactctttgtcagtcctggaggacaatagggtcttcgttcctttgatactctcacttcctaccaaagtattctcattgtctttgaaagatcagcttaaggttgaagttaccacagtgtttggatctgcagcacctttactcaaagtgaatcttgtgcaagtgttgggaactgactctaaagtcatcaccaatgggaacagggagcttcaatatgaccttgacaaaaatgtccattacttggacattgctccattggaaatagatgttgggaaatactcggtagtttttgaggttagatcttctgaaagatacaaaggtgtctctttctgcaaaccacctacagaagctgcgtttatcttttcaattaactactccgcttgggctcacatttaaacctcaccaggtgttcttgaagttgaagcatgagagtaaggttgaacacttatttgtggtacctggctctgcaaggcaattcaaaattgttctcgacttcctagggttggtggagaaattttactacctctctggaagatatgaccttgagcttgccgttggtgatgctgcaatggaaaattcatttctacgacctcttggccatttggagttggacctaccagaggccccagaaaaagccccacgtcctcctgcacaagctgttgacccattctcaaaatttgggccgaaggcagagatattgcatatattccgtgccccagagaagaggccacccaaggaactctcgctcgcattcacgggtctcacgcttctgccttttatcggattcttgattgggctcgtgcgtcttggagtgaacgtgaagaacttcccgtccttgccgggaccggccgcatttgcctcagttttccatgctggaataggagcagtcttgctgctctacgttctcttctggctcaagttggaccttttcacaactctgaagtaccttggcttcctcggcatcttcctcgtgtttgtgggccataggaccctgtcctacctttcctcggcgtcagcaaaacagaagacggcatgagtggacagtgcaagcagagctttcccgatcatcaattcgttttttgaggtggccattccaggccactgggtgtctttgcttggtactctgaccgcaccctagtttttctttagctaacatgcattttgagggaggactcggtttatttcagttgtctttgacgaatactgatactaggacaagtaacaggacctcacatcacagtttctgaatagaatggatgtttaatcatagcatttatatgatcattcgatatacatcatccttaatcgaactgaaacgttatatgtacacagaaatgatgcaaagttaaagaatttttgagcgtgtttggatgcacgccacagccggccggcacaaaaaataatggagat

SEQ ID NO: 77922 - DNA, 3199 bp, Zea Mays
caacctttcccccttcaccgccggacgatggccgcctctcgccgcctcgcgcggaagctgccgtctctgatctcccggtatgagcgcctcatctccccggagactgacgcgcctgaactcaccgaagcccccaccacctccgcatccatcccgtttgacccctcactccctgtccttccgctcgccgtctcccacctctcgccgcctaacccgctcccggtgctcccctccgctcacgcttcctcccccgcctctctctttcgtctcctccgccgagcccgccaccacccccgactcgtggcgctcgacctccacatcctgctggccgccgcagacgcgtcctccgctttccgacccgaccacagcctcacgtccctcgtcgccgcccgcctcgcggcttcccgccgcctcccttcgctccagcgcctcctggagctcgtcctcacccgcccctgcccctgtgccgacgactccatctttgcatgccccgagctcctccccaccttccgcaaggccatcgtcgccttcgccgcctccggcgacatcccctccgcatcgcatgccctcgcctctctccggcgcgtcgctgactccccactacccgccgagttctacaacatcatcctccaagctctctcccgcctccgtcgccacgacgatgccattcgcttctacggcgaaatgacctccgtctaccgcgtcgctccggatgtccacaccttcaacatactcatcagtagctcatgccgggtggaaggcgtagacgccgccatgcggtggtttggtgagatgcagcgccggagctgtgcaccgacggtcgttagtttcaacacacttatgcgtgggttcatcagagaaggcaggtataaggagggaacaaaggtggcacgcgagatgcttgagcttggggttgggctgtccgttgcgtccatggagattttgatcggtggattgtgccgtggtagcaaggctctagaggcggctgagctgtttgttgagtttttgggggatggggtggtgccagaagggtttgattgctttgaagtcgttgaggctctttgccgtggtgggaaggtggacagagcagtggaagcagtagacatggtattagagaggaataccaaatgctgtatgagtgcacctgctggcgccacagttttggagtgcctgatggaggcagggaagctggatgaggtttaccggttgatgtggagaatgattgatcaagggattgttccggattcaatttcttgtaactgcatctttgaggcgctttgcgaagctgggaggacagctgatgctaaccagctaagggtgttcgctaaggagaagggttttgaggctgacggtgaaacttatcgtatgctggtgcaaggatttgggaggcaggggaaaagaaaggaagggaaggctgtgttggatgaaatgcttgatttaggatttataccaaatattgcctcttataataggcttcttggtggcttgcataagtgaagatctttgtggctacaagagcacttctcagggcatatgggagcactggactgagtatttcgctggatgaggctggatggagatgcctgatgagccagtggtgtacataactgcagagatataagatggaaagtttgaaatgaggattgcagaaagaggaactcaactgctacggtgggagtgggactgcttccaatgtagtcttgcagccgtcactgcgaaatgatctaggatgggggtgtttgtgaagtatttgagaaatgttctacacgaaaatgatttattggcctgcagactgcagtggacattggaagagaggcttcccaattttgtttggattgaaagatttcttggattgatcggtctaaggttggtgctttttgcctattttaaagctgggaatttaaagtgatgaatgtttcatgaaaattctgtcatatacattttattagcaaccatctgcccacagatcttttttccttgtctcggctctacaatggccatctttaccttcagatgaatttcatcagggtatcatgtcaacttagattgacgttcatgtgcttttttttgtctgtgtcttataaggcatatccaatggtttctctagcgatgtggcacccttgatgttgtcatcgtatttgtcatcaaccaatgtttggaagtaactaccatcgaacgaaaatctctttctaggctgaatagatgtgaatgactgaatgttacaccattttccttgttttacatatttgctgttatattatgtcatgctgagcccatttagtttgatgacagaggaggcagcggcatcacgggataattggattggtagaagtgccgtcgtacttcgcagaagtgccgtttgtgcgtggccttgacagcggaggcagggattggtatccgctgcccttccgggcgtcgtgactatttggttggacgaacaaatagagatgaaagggggcagccacgttacgttttctatgatgtttagatgagagtcacatagtagatcaattttttatggtgacatggtcccaaaaaaatcgagaatacggtgccaccttcgtctcttcctaatttgatcttaaaccaaagacatcataattatgccggtagctgggctcggcatggaccgtggacagtctgtgaggtttctacgacgggacttaaagtcacctgatgtcggttcttgccagagacagaggtgtcccagtgccaataggatggtattatgtcacaacatggttgtcggtcaaggctaatattgcaaggttttagtaaggagatgtgtgtttctggaggggcaagggaagtatctcttaggctggcaaaccgagagaggcaacgaatcaatatattttgcgagacatctccctggcgcgctgctcttttcatcaatcacaatgcaatgcattgcaggcgtagacaagtcccaaccgacagcacacgatcagtagtgtggattcacatgttcatagctcattaggtccaagcttgatttctaacatatatgtcactggctcgatatctgattccatttgactttttttacaataataataatagaactgcaagaatcccaatttccaaatgagtttcagccagaaaaaaagctactgtataaaccaaaaaaacacgggttgttcgactaataagcaaggcatgcgagcagcattgtttttgtttttgtttttttgcatagaat

SEQ ID NO: 77923 - DNA, 2781 bp, Zea Mays
gtcgatcccaacctttcccccttcaccgccggacgatggccgcctctcgccgcctcgcgcggaagctgccgtctctgatctcccggtatgagcgcctcatctccccggagactgacgcgcctgaactcaccgaagcccccaccacctccgcatccatcccgtttgacccctcactccctgtccttccgctcgccgtctcccacctctcgccgcctaacccgctcccggtgctcccctccgctcacgcttcctcccccgcctctctctttcgtctcctccgccgagcccgccaccacccccgactcgtggcgctcgacctccacatcctgctggccgccgcagacgcgtcctccgctttccgacccgaccacagcctcacgtccctcgtcgccgcccgcctcgcggcttcccgccgcctcccttcgctccagcgcctcctggagctcgtcctcacccgcccctgcccctgtgccgacgactccatctttgcatgccccgagctcctccccaccttccgcaaggccatcgtcgccttcgccgcctccggcgacatcccctccgcatcgcatgccctcgcctctctccggcgcgtcgctgactccccactacccgccgagttctacaacatcatcctccaagctctctcccgcctccgtcgccacgacgatgccattcgcttctacggcgaaatgacctccgtctaccgcgtcgctccggatgtccacaccttcaacatactcatcagtagctcatgccgggtggaaggcgtagacgccgccatgcggtggtttggtgagatgcagcgccggagctgtgcaccgacggtcgttagtttcaacacacttatgcgtgggttcatcagagaaggcaggtataaggagggaacaaaggtggcacgcgagatgcttgagcttggggttgggctgtccgttgcgtccatggagattttgatcggtggattgtgccgtggtagcaaggctctagaggcggctgagctgtttgttgagtttttgggggatggggtggtgccagaagggtttgattgctttgaagtcgttgaggctctttgccgtggtgggaaggtggacagagcagtggaagcagtagacatggtattagagaggaataccaaatgctgtatgagtgcacctgctggcgccacagttttggagtgcctgatggaggcagggaagctggatgaggtttaccggttgatgtggagaatgattgatcaagggattgttccggattcaatttcttgtaactgcatctttgaggcgctttgcgaagctgggaggacagctgatgctaaccagctaagggtgttcgctaaggagaagggttttgaggctgacggtgaaacttatcgtatgctggtgcaaggatttgggaggcaggggaaaagaaaggaagggaaggctgtgttggatgaaatgcttgatttaggatttataccaaatattgcctcttataataggcttcttggtggcttgcataagtgaagatctttgtggctacaagagcacttctcagggcatatgggagcactggactgagtatttcgctggatgaggctggatggagatgcctgatgagccagtggtgtacataactgcagagatataagatggaaagtttgaaatgaggattgcagaaagaggaactcaactgctacggtgggagtgggactgcttccaatgtagtcttgcagccgtcactgcgaaatgatctaggatgggggtgtttgtgaagtatttgagaaatgttctacacgaaaatgatttattggcctgcagactgcagtggacattggaagagaggcttcccaattttgtttggattgaaagatttcttggattgatcggtctaagaggaggcagcggcatcacgggataattggattggtagaagtgccgtcgtacttcgcagaagtgccgtttgtgcgtggccttgacagcggaggcagggattggtatccgctgcccttccgggcgtcgtgactatttggttggacgaacaaatagagatgaaagggggcagccacgttacgttttctatgatgtttagatgagagtcacatagtagatcaattttttatggtgacatggtcccaaaaaaatcgagaatacggtgccaccttcgtctcttcctaatttgatcttaaaccaaagacatcataattatgccggtagctgggctcggcatggaccgtggacagtctgtgaggtttctacgacgggacttaaagtcacctgatgtcggttcttgccagagacagaggtgtcccagtgccaataggatggtattatgtcacaacatggttgtcggtcaaggctaatattgcaaggttttagtaaggagatgtgtgtttctggaggggcaagggaagtatctcttaggctggcaaaccgagagaggcaacgaatcaatatattttgcgagacatctccctggcgcgctgctcttttcatcaatcacaatgcaatgcattgcaggcgtagacaagtcccaaccgacagcacacgatcagtagtgtggattcacatgttcatagctcattaggtccaagcttgatttctaacatatatgtcactggctcgatatctgattccatttgactttttttacaataataataatagaactgcaagaatcccaatttccaaatgagtttcagccagaaaaaaagctactgtataaaccaaaaaaacacgggttgttcgactaataagcaaggcatgcgagcagcattgtttttgtttttgtttttttgcatagaat

SEQ ID NO: 77924 - DNA, 2034 bp, Zea Mays
atgccccgccgcgcgctccgagctcaatcccccgcgcgtgaaaccccgagctcaatccgcccgccgacgtcgtcctcctcgacccgtaaggcttcctcgcccgctccgtccctgcccctgctacccgtttgcggaaatcctgagccgaccgactgcttgctttctctgactgagtgccgggtgcgcgtgtcattgagtgtctgtgcgtgcttccacgactcaggaaagtcccttcatacatgctatttaccctcttctgatgatgacaggaaagactacctggagatcccctgggctgagctgcgctccatggtcgaaccgtcctttgctgagagatcgttgatctaccacaaagattacctcagcgatgcgaccatcgtgacatcttctgcggtcaatatcactgaacacgttgtcctgactgttgacggccactctcttccatatgattatctcatcatagcgactggccatgctttggcttctcctgccagcagagctgaaaggataaatgaattccagagagataatgggaagatagagtcatcagaatctgtgctgataattgggggtggtccaactggtgttgaactggctggagagattgtggtagactacccagggaagagggtgacccttatccatagaggaccgcgtttactcgaattcattggagataaggcttcaaagaagtgccttgattggcttacttcgaagaaagtagacgtgctccttcagcaatcggttgacttgggctcattatcagacacagagaaggtgtacaagacatcagacggagaaacagtaacagctgattgccactttgtatgcattggaaagccactgagttcgtcgtggctacatgataccatcctaaaggaatccttggacagcaaggggagagtaatggtggaaaaggatttaagagtgaaaggttttaataacattttcgcgattggtgacatcacagatattcctactcctgcttctgcggcggaggccaagcaggagtcggtgttggagacggaggaaactaagcaggcggtggcagcagcagcagcagcggcaggaggtgtgcaggccatggcggtcaccgtagtgcgggacgttgagacgggtctggacacgagtaccaacgaccgggacggcgacaagccttcctggttcacacctaagagctgctcgggattaacttgagcttctggcgatgctcaagtgcggtgggatctgagcagaccagcgaagtctttagtacgaattcttctaggatttttgaacaaggcccgccctattttggggccatgggcagcaacactggtggtgccagtggtggcttctaccagcccttcaacagcaacttagctggtgcaggggctagcactggcatccaaaactttccaggtgtacggctgcgaggtctcccttttgattgcaatgacattgatatctgcaagttctttgtgggactggacatagtggactgcctcctggttaacaagaatggtcgcttcactggtgaggcttttgtggtcttcccaacagctatgcaaacagaatctggtctgcatcataacaggcagaacatgggccggaggtatgttgaggtgttcagatgtaagaagttggagtactaccgtgcaatagccaacgaggtgagccagggtggttactttgagtcggagtatcgccgctcctcacctcctctgaggccccctaagaagcctgctgaagacaagggcagcatggagtacactgaggtgctgaagctccatgggcttccctactctgcgaccactgaggacatcatcaagttcttcctggagtatgagctgacagaggagaatgtgcatattgcgatcagctcagatgggaaagctaccagtgaagcctttgttgagttcccaacagctgaagttgccaagacggcgatgtgcaaggataagatgactatcgggacgaggtatgtggagttgttcccgtctaccccagaggaggcgagcagggcgagaactcgaggcaagcattgaagaaacg

SEQ ID NO: 77925 - DNA, 2005 bp, Zea Mays
atgccccgccgcgcgctccgagctcaatcccccgcgcgtgaaaccccgagctcaatccgcccgccgacgtcgtcctcctcgacccgtaaggcttcctcgcccgctccgtccctgcccctgctacccgtttgcggaaatcctgagccgaccgactgcttgctttctctgactgagtgccgggtgcgcgtgtcattgagtgtctgtgcgtgcttccacgactcaggaaagtcccttcatacatgctatttaccctcttctgatgatgacaggaaagactacctggagatcccctgggctgagctgcgctccatggtcgaaccgtcctttgctgagagatcgttgatctaccacaaagattacctcagcgatgcgaccatcgtgacatcttctgcggtcaatatcactgaacacgttgtcctgactgttgacggccactctcttccatatgattatctcatcatagcgactggccatgctttggcttctcctgccagcagagctgaaaggataaatgaattccagagagataatgggaagatagagtcatcagaatctgtgctgataattgggggtggtccaactggtgttgaactggctggagagattgtggtagactacccagggaagagggtgacccttatccatagaggaccgcgtttactcgaattcattggagataaggcttcaaagaagtgccttgattggcttacttcgaagaaagtagacgtgctccttcagcaatcggttgacttgggctcattatcagacacagagaaggtgtacaagacatcagacggagaaacagtaacagctgattgccactttgtatgcattggaaagccactgagttcgtcgtggctacatgataccatcctaaaggaatccttggacagcaaggggagagtaatggtggaaaaggatttaagagtgaaaggttttaataacattttcgcgattggtgacatcacagatattcctactcctgcttctgcggcggaggccaagcaggagtcggtgttggagacggaggaaactaagcaggcggtggcagcagcagcagcagcggcaggaggtgtgcaggccatggcggtcaccgtagtgcgggacgttgagacgggtctggacacgagtaccaacgaccgggacggcgacaagccttcctggttcacacctaagagcctcacatgacttattgccacaatcaactgttatgtagtctttagtacgaattcttctaggatttttgaacaaggcccgccctattttggggccatgggcagcaacactggtggtgccagtggtggcttctaccagcccttcaacagcaacttagctggtgcaggggctagcactggcatccaaaactttccaggtgtacggctgcgaggtctcccttttgattgcaatgacattgatatctgcaagttctttgtgggactggacatagtggactgcctcctggttaacaagaatggtcgcttcactggtgaggcttttgtggtcttcccaacagctatgcaaacagaatctggtctgcatcataacaggcagaacatgggccggaggtatgttgaggtgttcagatgtaagaagttggagtactaccgtgcaatagccaacgaggtgagccagggtggttactttgagtcggagtatcgccgctcctcacctcctctgaggccccctaagaagcctgctgaagacaagggcagcatggagtacactgaggtgctgaagctccatgggcttccctactctgcgaccactgaggacatcatcaagttcttcctggagtatgagctgacagaggagaatgtgcatattgcgatcagctcagatgggaaagctaccagtgaagcctttgttgagttcccaacagctgaagttgccaagacggcgatgtgcaaggataagatgactatcgggacgaggtatgtggagttgttcccgtctaccccagaggaggcgagcagggcgagaactcgaggcaagcattgaagaaacg

SEQ ID NO: 77926 - DNA, 1252 bp, Zea Mays
ctctaattgggctagaataatgaacgatatgaagatcaggtagcattatatatgtcaataagaagcagaggagagaagcagcccacatcgcaggagacaaggacttcacttgtttggccagttcaggacttcaggatgttgtcgatgatgtccatgctatattccctcgcttcatgcttaacaatgagggagagactaagtgaggggctgaaggccgttggtgctgtcagaatgtttttttggagttttggtggatgatgctcagtgactgcaatgcaaaggatccttctgttttgtatattgaatgagattacatcactgtttttttcttagcgatatgttgagctcatgtgctcgtttatgttagtcgatctctggctcttgtagtaacttggaaagcttgctgctttttttaagggcatacatgcctgtgatgtgtggtcatgatcatttttttctcctgttattttagttgtcgtatcataaatgccatgtttgcattggtgttccaacatgtcaatattattgaataaatgtttgcattggcggcagcggggacgacgctaagtcgagcaatggcgaagcggcccgtggtggcagtaacggtggagagaagcagggggatgaatccaacggtggcgggatacttagcgctgtggcttccaggattggcgtggtcgtgtccagcgccaacggggaccgcagcggcagcgctgaggatggtgccaagacgagcgctggcgacgctggtcacggtagcaagggcgaggagaaggggcgtggtgtgaacggtggtagaatagtcgagcagatcatttccaatctgccctcagatgatcaggcgcctgatgccgatgaagcttccttgctcatcgccattatcgaagattagctccatgttccgaaggctctctaggtcgtcctcaacgccaggatcaaatcatcagctgagccggagactgaaaacaataaagaaaagcaagcagctggtcatagtaaacatcatgtagcgaggcttagcagattgcttttttttcccgttagaatcagtccacatgtcctcgacacgggctagatttgttctaggattatttttccagtagtaagccatgtatccatggacagtccacagcgcgacgtctaatgtaacatcatcaaggttcttttgactatcccataagaaaccattccttaagacaaccgatattgtgagttgataaccaacaactaatgttaccatgcgattgttccg

SEQ ID NO: 77927 - DNA, 1520 bp, Zea Mays
cgcgatctcgctcgtgatattccagccccgccgccgccgtccccgcccccatccgtgacaccccaccatcaccgccgcgccacgcgcgacaactccatcccccgtccgcacccctaccccgagcatcgcagcgcctcccgcacgaggtcgttgcgcttgtcgatctgatggcggcccatggcaaaggagcagaagacgaaatgaatcgcaaggggaaactaacatgcgagagaggaggagctagccacaaccaaagagcttggttcaatacttcaatggctagaataatgaacgatatgaagatcaggtagcattatatatgtcaataagaagcagaggagagaagcagcccacatcgcaggagacaaggacttcacttgtttggccagttcaggacttcaggatgttgtcgatgatgtccatgctatattccctcgcttcatgcttaacaatgagggagagactaagtgaggggctgaaggccgttggtgctgtcagaatgtttttttggagttttggtggatgatgctcagtgactgcaatgcaaaggatccttctgttttgtatattgaatgagattacatcactgtttttttcttagcgatatgttgagctcatgtgctcgtttatgttagtcgatctctggctcttgtagtaacttggaaagcttgctgctttttttaagggcatacatgcctgtgatgtgtggtcatgatcatttttttctcctgttattttagttgtcgtatcataaatgccatgtttgcattggtgttccaacatgtcaatattattgaataaatgtttgcattggcggcagcggggacgacgctaagtcgagcaatggcgaagcggcccgtggtggcagtaacggtggagagaagcagggggatgaatccaacggtggcgggatacttagcgctgtggcttccaggattggcgtggtcgtgtccagcgccaacggggaccgcagcggcagcgctgaggatggtgccaagacgagcgctggcgacgctggtcacggtagcaagggcgaggagaaggggcgtggtgtgaacggtggtagaatagtcgagcagatcatttccaatctgccctcagatgatcaggcgcctgatgccgatgaagcttccttgctcatcgccattatcgaagattagctccatgttccgaaggctctctaggtcgtcctcaacgccaggatcaaatcatcagctgagccggagactgaaaacaataaagaaaagcaagcagctggtcatagtaaacatcatgtagcgaggcttagcagattgcttttttttcccgttagaatcagtccacatgtcctcgacacgggctagatttgttctaggattatttttccagtagtaagccatgtatccatggacagtccacagcgcgacgtctaatgtaacatcatcaaggttcttttgactatcccataagaaaccattccttaagacaaccgatattgtgagttgataaccaacaactaatgttaccatgcgattgttccg

SEQ ID NO: 77928 - DNA, 2247 bp, Zea Mays
cgcgatctcgctcgtgatattccagccccgccgccgccgtccccgcccccatccgtgacaccccaccatcaccgccgcgccacgcgcgacaactccatcccccgtccgcacccctaccccgagcatcgcagcgcctcccgcacgaggtcgttgcgcttgtcgatctgatggcggcccatggcaaaggagcaggtagaaaatggccgatgccgaggatatccagcccctcgtctgcgacaacggaactggcatggtcaaggctgggttcgctggcgacgacgccccgagggccgtcttccccagcatcgtggggcgcccgcgccacattggtgtcatggtcgggatggggcagaaggacgcctacgtcggtgacgaggtgcagtccaagaggggtatcctgaccctcaagtacctcagcttacacatcacattattccccacattacagcaatcagtgcaacaatcagagcatttatttaggttctgcaaaccgatcatgacaaaaccaaaggtagctttgaagccgcagactctgtctccacaacctgaagcccaagcacctcatgatcctcaaacaccagagcaacaacaaagcgggactggtgtaggcgtgtagctggtgagccgggtagtgaaggaggtgtgtaccaggcctccagtgagcaaatgggcatggtgccggatgcatctgcggccggtggcaggaaggtcgagctggatggggacatgcgatggacatcacaggttggcccctccagtgatccatctcaaacactagccaggccataggaaaaacgttgaatcaaagcaaacttgatgcttaccgaaagcatgttcgatgagttactcagattcatggcccaggaattgaatctacacggtttaataactatttgcatggctctaaatgcttaattagaagacgaaatgaatcgcaaggggaaactaacatgcgagagaggaggagctagccacaaccaaagagcttggttcaatacttcaatggctagaataatgaacgatatgaagatcaggtagcattatatatgtcaataagaagcagaggagagaagcagcccacatcgcaggagacaaggacttcacttgtttggccagttcaggacttcaggatgttgtcgatgatgtccatgctatattccctcgcttcatgcttaacaatgagggagagactaagtgaggggctgaaggccgttggtgctgtcagaatgtttttttggagttttggtggatgatgctcagtgactgcaatgcaaaggatccttctgttttgtatattgaatgagattacatcactgtttttttcttagcgatatgttgagctcatgtgctcgtttatgttagtcgatctctggctcttgtagtaacttggaaagcttgctgctttttttaagggcatacatgcctgtgatgtgtggtcatgatcatttttttctcctgttattttagttgtcgtatcataaatgccatgtttgcattggtgttccaacatgtcaatattattgaataaatgtttgcattggcggcagcggggacgacgctaagtcgagcaatggcgaagcggcccgtggtggcagtaacggtggagagaagcagggggatgaatccaacggtggcgggatacttagcgctgtggcttccaggattggcgtggtcgtgtccagcgccaacggggaccgcagcggcagcgctgaggatggtgccaagacgagcgctggcgacgctggtcacggtagcaagggcgaggagaaggggcgtggtgtgaacggtggtagaatagtcgagcagatcatttccaatctgccctcagatgatcaggcgcctgatgccgatgaagcttccttgctcatcgccattatcgaagattagctccatgttccgaaggctctctaggtcgtcctcaacgccaggatcaaatcatcagctgagccggagactgaaaacaataaagaaaagcaagcagctggtcatagtaaacatcatgtagcgaggcttagcagattgcttttttttcccgttagaatcagtccacatgtcctcgacacgggctagatttgttctaggattatttttccagtagtaagccatgtatccatggacagtccacagcgcgacgtctaatgtaacatcatcaaggttcttttgactatcccataagaaaccattccttaagacaaccgatattgtgagttgataaccaacaactaatgttaccatgcgattgttccg

SEQ ID NO: 77929 - DNA, 2143 bp, Zea Mays
cgcgatctcgctcgtgatattccagccccgccgccgccgtccccgcccccatccgtgacaccccaccatcaccgccgcgccacgcgcgacaactccatcccccgtccgcacccctaccccgagcatcgcagcgcctcccgcacgaggtcgttgcgcttgtcgatctgatggcggcccatggcaaaggagcaggtagaaaatggccgatgccgaggatatccagcccctcgtctgcgacaacggaactggcatggtcaaggctgggttcgctggcgacgacgccccgagggccgtcttccccagcatcgtggggcgcccgcgccacattggtgtcatggtcgggatggggcagaaggacgcctacgtcggtgacgaggttctgcaaaccgatcatgacaaaaccaaaggtagctttgaagccgcagactctgtctccacaacctgaagcccaagcacctcatgatcctcaaacaccagagcaacaacaaagcgggactggtgtaggcgtgtagctggtgagccgggtagtgaaggaggtgtgtaccaggcctccagtgagcaaatgggcatggtgccggatgcatctgcggccggtggcaggaaggtcgagctggatggggacatgcgatggacatcacaggttggcccctccagtgatccatctcaaacactagccaggccataggaaaaacgttgaatcaaagcaaacttgatgcttaccgaaagcatgttcgatgagttactcagattcatggcccaggaattgaatctacacggtttaataactatttgcatggctctaaatgcttaattagaagacgaaatgaatcgcaaggggaaactaacatgcgagagaggaggagctagccacaaccaaagagcttggttcaatacttcaatggctagaataatgaacgatatgaagatcaggtagcattatatatgtcaataagaagcagaggagagaagcagcccacatcgcaggagacaaggacttcacttgtttggccagttcaggacttcaggatgttgtcgatgatgtccatgctatattccctcgcttcatgcttaacaatgagggagagactaagtgaggggctgaaggccgttggtgctgtcagaatgtttttttggagttttggtggatgatgctcagtgactgcaatgcaaaggatccttctgttttgtatattgaatgagattacatcactgtttttttcttagcgatatgttgagctcatgtgctcgtttatgttagtcgatctctggctcttgtagtaacttggaaagcttgctgctttttttaagggcatacatgcctgtgatgtgtggtcatgatcatttttttctcctgttattttagttgtcgtatcataaatgccatgtttgcattggtgttccaacatgtcaatattattgaataaatgtttgcattggcggcagcggggacgacgctaagtcgagcaatggcgaagcggcccgtggtggcagtaacggtggagagaagcagggggatgaatccaacggtggcgggatacttagcgctgtggcttccaggattggcgtggtcgtgtccagcgccaacggggaccgcagcggcagcgctgaggatggtgccaagacgagcgctggcgacgctggtcacggtagcaagggcgaggagaaggggcgtggtgtgaacggtggtagaatagtcgagcagatcatttccaatctgccctcagatgatcaggcgcctgatgccgatgaagcttccttgctcatcgccattatcgaagattagctccatgttccgaaggctctctaggtcgtcctcaacgccaggatcaaatcatcagctgagccggagactgaaaacaataaagaaaagcaagcagctggtcatagtaaacatcatgtagcgaggcttagcagattgcttttttttcccgttagaatcagtccacatgtcctcgacacgggctagatttgttctaggattatttttccagtagtaagccatgtatccatggacagtccacagcgcgacgtctaatgtaacatcatcaaggttcttttgactatcccataagaaaccattccttaagacaaccgatattgtgagttgataaccaacaactaatgttaccatgcgattgttccg

SEQ ID NO: 77930 - DNA, 2331 bp, Zea Mays
cgcgatctcgctcgtgatattccagccccgccgccgccgtccccgcccccatccgtgacaccccaccatcaccgccgcgccacgcgcgacaactccatcccccgtccgcacccctaccccgagcatcgcagcgcctcccgcacgaggtcgttgcgcttgtcgatctgatggcggcccatggcaaaggagcaggcggtgatggcagccacagcagaaagccgacgctcggcgtgattcccacccgtcgcgagccaagaggttcgaggtcatttttgagccaagaggttcgcggccacgggagcaaccctacagaaccatcaccaccaccgctctctcttcctctgctcttctctgcctgcctgagctcaccgcacctcgcctcctcaccgcggatcctccgttaatccggtagaaaatggccgatgccgaggatatccagcccctcgtctgcgacaacggaactggcatggtcaaggctgggttcgctggcgacgacgccccgagggccgtcttccccagcatcgtggggcgcccgcgccacattggtgtcatggtcgggatggggcagaaggacgcctacgtcggtgacgaggtgcagtccaagaggggtatcctgaccctcaagtacctcagcttacacatcacattattccccacattacagcaatcagtgcaacaatcagagcatttatttaggttctgcaaaccgatcatgacaaaaccaaaggtagctttgaagccgcagactctgtctccacaacctgaagcccaagcacctcatgatcctcaaacaccagagcaacaacaaagcgggactggtgtaggcgtgtagctggtgagccgggtagtgaaggaggtgtgtaccaggcctccagtgagcaaatgggcatggtgccggatgcatctgcggccggtggcaggaaggtcgagctggatggggacatgcgatggacatcacaggttggcccctccagtgatccatctcaaacactagccagaacagaagacgaaatgaatcgcaaggggaaactaacatgcgagagaggaggagctagccacaaccaaagagcttggttcaatacttcaatggctagaataatgaacgatatgaagatcaggtagcattatatatgtcaataagaagcagaggagagaagcagcccacatcgcaggagacaaggacttcacttgtttggccagttcaggacttcaggatgttgtcgatgatgtccatgctatattccctcgcttcatgcttaacaatgagggagagactaagtgaggggctgaaggccgttggtgctgtcagaatgtttttttggagttttggtggatgatgctcagtgactgcaatgcaaaggatccttctgttttgtatattgaatgagattacatcactgtttttttcttagcgatatgttgagctcatgtgctcgtttatgttagtcgatctctggctcttgtagtaacttggaaagcttgctgctttttttaagggcatacatgcctgtgatgtgtggtcatgatcatttttttctcctgttattttagttgtcgtatcataaatgccatgtttgcattggtgttccaacatgtcaatattattgaataaatgtttgcattggcggcagcggggacgacgctaagtcgagcaatggcgaagcggcccgtggtggcagtaacggtggagagaagcagggggatgaatccaacggtggcgggatacttagcgctgtggcttccaggattggcgtggtcgtgtccagcgccaacggggaccgcagcggcagcgctgaggatggtgccaagacgagcgctggcgacgctggtcacggtagcaagggcgaggagaaggggcgtggtgtgaacggtggtagaatagtcgagcagatcatttccaatctgccctcagatgatcaggcgcctgatgccgatgaagcttccttgctcatcgccattatcgaagattagctccatgttccgaaggctctctaggtcgtcctcaacgccaggatcaaatcatcagctgagccggagactgaaaacaataaagaaaagcaagcagctggtcatagtaaacatcatgtagcgaggcttagcagattgcttttttttcccgttagaatcagtccacatgtcctcgacacgggctagatttgttctaggattatttttccagtagtaagccatgtatccatggacagtccacagcgcgacgtctaatgtaacatcatcaaggttcttttgactatcccataagaaaccattccttaagacaaccgatattgtgagttgataaccaacaactaatgttaccatgcgattgttccg

SEQ ID NO: 77931 - DNA, 2227 bp, Zea Mays
cgcgatctcgctcgtgatattccagccccgccgccgccgtccccgcccccatccgtgacaccccaccatcaccgccgcgccacgcgcgacaactccatcccccgtccgcacccctaccccgagcatcgcagcgcctcccgcacgaggtcgttgcgcttgtcgatctgatggcggcccatggcaaaggagcaggcggtgatggcagccacagcagaaagccgacgctcggcgtgattcccacccgtcgcgagccaagaggttcgaggtcatttttgagccaagaggttcgcggccacgggagcaaccctacagaaccatcaccaccaccgctctctcttcctctgctcttctctgcctgcctgagctcaccgcacctcgcctcctcaccgcggatcctccgttaatccggtagaaaatggccgatgccgaggatatccagcccctcgtctgcgacaacggaactggcatggtcaaggctgggttcgctggcgacgacgccccgagggccgtcttccccagcatcgtggggcgcccgcgccacattggtgtcatggtcgggatggggcagaaggacgcctacgtcggtgacgaggttctgcaaaccgatcatgacaaaaccaaaggtagctttgaagccgcagactctgtctccacaacctgaagcccaagcacctcatgatcctcaaacaccagagcaacaacaaagcgggactggtgtaggcgtgtagctggtgagccgggtagtgaaggaggtgtgtaccaggcctccagtgagcaaatgggcatggtgccggatgcatctgcggccggtggcaggaaggtcgagctggatggggacatgcgatggacatcacaggttggcccctccagtgatccatctcaaacactagccagaacagaagacgaaatgaatcgcaaggggaaactaacatgcgagagaggaggagctagccacaaccaaagagcttggttcaatacttcaatggctagaataatgaacgatatgaagatcaggtagcattatatatgtcaataagaagcagaggagagaagcagcccacatcgcaggagacaaggacttcacttgtttggccagttcaggacttcaggatgttgtcgatgatgtccatgctatattccctcgcttcatgcttaacaatgagggagagactaagtgaggggctgaaggccgttggtgctgtcagaatgtttttttggagttttggtggatgatgctcagtgactgcaatgcaaaggatccttctgttttgtatattgaatgagattacatcactgtttttttcttagcgatatgttgagctcatgtgctcgtttatgttagtcgatctctggctcttgtagtaacttggaaagcttgctgctttttttaagggcatacatgcctgtgatgtgtggtcatgatcatttttttctcctgttattttagttgtcgtatcataaatgccatgtttgcattggtgttccaacatgtcaatattattgaataaatgtttgcattggcggcagcggggacgacgctaagtcgagcaatggcgaagcggcccgtggtggcagtaacggtggagagaagcagggggatgaatccaacggtggcgggatacttagcgctgtggcttccaggattggcgtggtcgtgtccagcgccaacggggaccgcagcggcagcgctgaggatggtgccaagacgagcgctggcgacgctggtcacggtagcaagggcgaggagaaggggcgtggtgtgaacggtggtagaatagtcgagcagatcatttccaatctgccctcagatgatcaggcgcctgatgccgatgaagcttccttgctcatcgccattatcgaagattagctccatgttccgaaggctctctaggtcgtcctcaacgccaggatcaaatcatcagctgagccggagactgaaaacaataaagaaaagcaagcagctggtcatagtaaacatcatgtagcgaggcttagcagattgcttttttttcccgttagaatcagtccacatgtcctcgacacgggctagatttgttctaggattatttttccagtagtaagccatgtatccatggacagtccacagcgcgacgtctaatgtaacatcatcaaggttcttttgactatcccataagaaaccattccttaagacaaccgatattgtgagttgataaccaacaactaatgttaccatgcgattgttccg

SEQ ID NO: 77932 - DNA, 2369 bp, Zea Mays
cgcgatctcgctcgtgatattccagccccgccgccgccgtccccgcccccatccgtgacaccccaccatcaccgccgcgccacgcgcgacaactccatcccccgtccgcacccctaccccgagcatcgcagcgcctcccgcacgaggtcgttgcgcttgtcgatctgatggcggcccatggcaaaggagcaggtagaaaatggccgatgccgaggatatccagcccctcgtctgcgacaacggaactggcatggtcaaggctgggttcgctggcgacgacgccccgagggccgtcttccccagcatcgtggggcgcccgcgccacattggtgtcatggtcgggatggggcagaaggacgcctacgtcggtgacgaggtgcagtccaagaggggtatcctgaccctcaagtacctcagcttacacatcacattattccccacattacagcaatcagtgcaacaatcagagcatttatttaggttctgcaaaccgatcatgacaaaaccaaaggtagctttgaagccgcagactctgtctccacaacctgaagcccaagcacctcatgatcctcaaacaccagagcaacaacaaagcgggactggtgtaggcgtgtagctggtgagccgggtagtgaaggaggtgtgtaccaggcctccagtgagcaaatgggcatggtgccggatgcatctgcggccggtggcaggaaggtcgagctggatggggacatgcgatggacatcacaggttggcccctccagtgatccatctcaaacactagccaggtttcctcctttgccaccctcctttggcagttctcttcctaacgtcgccgtaggttcccttccctgctgtttttgtctcccatagctcttaaaattttaagttccctgtttgcataaaggccataggaaaaacgttgaatcaaagcaaacttgatgcttaccgaaagcatgttcgatgagttactcagattcatggcccaggaattgaatctacacggtttaataactatttgcatggctctaaatgcttaattagaagacgaaatgaatcgcaaggggaaactaacatgcgagagaggaggagctagccacaaccaaagagcttggttcaatacttcaatggctagaataatgaacgatatgaagatcaggtagcattatatatgtcaataagaagcagaggagagaagcagcccacatcgcaggagacaaggacttcacttgtttggccagttcaggacttcaggatgttgtcgatgatgtccatgctatattccctcgcttcatgcttaacaatgagggagagactaagtgagcaggggctgaaggccgttggtgctgtcagaatgtttttttggagttttggtggatgatgctcagtgactgcaatgcaaaggatccttctgttttgtatattgaatgagattacatcactgtttttttcttagcgatatgttgagctcatgtgctcgtttatgttagtcgatctctggctcttgtagtaacttggaaagcttgctgctttttttaagggcatacatgcctgtgatgtgtggtcatgatcatttttttctcctgttattttagttgtcgtatcataaatgccatgtttgcattggtgttccaacatgtcaatattattgaataaatgtttgcattggcggcagcggggacgacgctaagtcgagcaatggcgaagcggcccgtggtggcagtaacggtggagagaagcagggggatgaatccaacggtggcgggatacttagcgctgtggcttccaggattggcgtggtcgtgtccagcgccaacggggaccgcagcggcagcgctgaggatggtgccaagacgagcgctggcgacgctggtcacggtagcaagggcgaggagaaggggcgtggtgtgaacggtggtagaatagtcgagcagatcatttccaatctgccctcagatgatcaggcgcctgatgccgatgaagcttccttgctcatcgccattatcgaagattagctccatgttccgaaggctctctaggtcgtcctcaacgccaggatcaaatcatcagctgagccggagactgaaaacaataaagaaaagcaagcagctggtcatagtaaacatcatgtagcgaggcttagcagattgcttttttttcccgttagaatcagtccacatgtcctcgacacgggctagatttgttctaggattatttttccagtagtaagccatgtatccatggacagtccacagcgcgacgtctaatgtaacatcatcaaggttcttttgactatcccataagaaaccattccttaagacaaccgatattgtgagttgataaccaacaactaatgttaccatgcgattgttccg

SEQ ID NO: 77933 - DNA, 2262 bp, Zea Mays
cgcgatctcgctcgtgatattccagccccgccgccgccgtccccgcccccatccgtgacaccccaccatcaccgccgcgccacgcgcgacaactccatcccccgtccgcacccctaccccgagcatcgcagcgcctcccgcacgaggtcgttgcgcttgtcgatctgatggcggcccatggcaaaggagcaggtagaaaatggccgatgccgaggatatccagcccctcgtctgcgacaacggaactggcatggtcaaggctgggttcgctggcgacgacgccccgagggccgtcttccccagcatcgtggggcgcccgcgccacattggtgtcatggtcgggatggggcagaaggacgcctacgtcggtgacgaggtgcagtccaagaggggtatcctgaccctcaagtacctcagcttacacatcacattattccccacattacagcaatcagtgcaacaatcagagcatttatttaggttctgcaaaccgatcatgacaaaaccaaaggtagctttgaagccgcagactctgtctccacaacctgaagcccaagcacctcatgatcctcaaacaccagagcaacaacaaagcgggactggtgtaggcgtgtagctggtgagccgggtagtgaaggaggtgtgtaccaggcctccagtgagcaaatgggcatggtgccggatgcatctgcggccggtggcaggaaggtcgagctggatggggacatgcgatggacatcacaggttggcccctccagtgatccatctcaaacactagccaggccataggaaaaacgttgaatcaaagcaaacttgatgcttaccgaaagcatgttcgatgagttactcagattcatggcccaggaattgaatctacacggtttaataactatttgcatggctctaaatgcttaattagaagacgaaatgaatcgcaaggggaaactaacatgcgagagaggaggagctagccacaaccaaagagcttggttcaatacttcaatggctagaataatgaacgatatgaagatcaggtagcattatatatgtcaataagaagcagaggagagaagcagcccacatcgcaggagacaaggacttcacttgtttggccagttcaggacttcaggatgttgtcgatgatgtccatgctatattccctcgcttcatgcttaacaatgagggagagactaagtgaggtggctgtttagcaggggctgaaggccgttggtgctgtcagaatgtttttttggagttttggtggatgatgctcagtgactgcaatgcaaaggatccttctgttttgtatattgaatgagattacatcactgtttttttcttagcgatatgttgagctcatgtgctcgtttatgttagtcgatctctggctcttgtagtaacttggaaagcttgctgctttttttaagggcatacatgcctgtgatgtgtggtcatgatcatttttttctcctgttattttagttgtcgtatcataaatgccatgtttgcattggtgttccaacatgtcaatattattgaataaatgtttgcattggcggcagcggggacgacgctaagtcgagcaatggcgaagcggcccgtggtggcagtaacggtggagagaagcagggggatgaatccaacggtggcgggatacttagcgctgtggcttccaggattggcgtggtcgtgtccagcgccaacggggaccgcagcggcagcgctgaggatggtgccaagacgagcgctggcgacgctggtcacggtagcaagggcgaggagaaggggcgtggtgtgaacggtggtagaatagtcgagcagatcatttccaatctgccctcagatgatcaggcgcctgatgccgatgaagcttccttgctcatcgccattatcgaagattagctccatgttccgaaggctctctaggtcgtcctcaacgccaggatcaaatcatcagctgagccggagactgaaaacaataaagaaaagcaagcagctggtcatagtaaacatcatgtagcgaggcttagcagattgcttttttttcccgttagaatcagtccacatgtcctcgacacgggctagatttgttctaggattatttttccagtagtaagccatgtatccatggacagtccacagcgcgacgtctaatgtaacatcatcaaggttcttttgactatcccataagaaaccattccttaagacaaccgatattgtgagttgataaccaacaactaatgttaccatgcgattgttccg

SEQ ID NO: 77934 - DNA, 2189 bp, Zea Mays
cgcgatctcgctcgtgatattccagccccgccgccgccgtccccgcccccatccgtgacaccccaccatcaccgccgcgccacgcgcgacaactccatcccccgtccgcacccctaccccgagcatcgcagcgcctcccgcacgaggtcgttgcgcttgtcgatctgatggcggcccatggcaaaggagcaggcggtgatggcagccacagcagaaagccgacgctcggcgtgattcccacccgtcgcgagccaagaggttcgaggtcatttttgagccaagaggttcgcggccacgggagcaaccctacagaaccatcaccaccaccgctctctcttcctctgctcttctctgcctgcctgagctcaccgcacctcgcctcctcaccgcggatcctccgttaatccggtagaaaatggccgatgccgaggatatccagcccctcgtctgcgacaacggaactggcatggtcaaggctgggttcgctggcgacgacgccccgagggccgtcttccccagcatcgtggggcgcccgcgccacattggtgtcatggtcgggatggggcagaaggacgcctacgtcggtgacgaggttctgcaaaccgatcatgacaaaaccaaaggtagctttgaagccgcagactctgtctccacaacctgaagcccaagcacctcatgatcctcaaacaccagagcaacaacaaagcgggactggtgtaggcgtgtagctggtgagccgggtagtgaaggaggtgtgtaccaggcctccagtgagcaaatgggcatggtgccggatgcatctgcggccggtggcaggaaggtcgagctggatggggacatgcgatggacatcacagaacagaagacgaaatgaatcgcaaggggaaactaacatgcgagagaggaggagctagccacaaccaaagagcttggttcaatacttcaatggctagaataatgaacgatatgaagatcaggtagcattatatatgtcaataagaagcagaggagagaagcagcccacatcgcaggagacaaggacttcacttgtttggccagttcaggacttcaggatgttgtcgatgatgtccatgctatattccctcgcttcatgcttaacaatgagggagagactaagtgaggggctgaaggccgttggtgctgtcagaatgtttttttggagttttggtggatgatgctcagtgactgcaatgcaaaggatccttctgttttgtatattgaatgagattacatcactgtttttttcttagcgatatgttgagctcatgtgctcgtttatgttagtcgatctctggctcttgtagtaacttggaaagcttgctgctttttttaagggcatacatgcctgtgatgtgtggtcatgatcatttttttctcctgttattttagttgtcgtatcataaatgccatgtttgcattggtgttccaacatgtcaatattattgaataaatgtttgcattggcggcagcggggacgacgctaagtcgagcaatggcgaagcggcccgtggtggcagtaacggtggagagaagcagggggatgaatccaacggtggcgggatacttagcgctgtggcttccaggattggcgtggtcgtgtccagcgccaacggggaccgcagcggcagcgctgaggatggtgccaagacgagcgctggcgacgctggtcacggtagcaagggcgaggagaaggggcgtggtgtgaacggtggtagaatagtcgagcagatcatttccaatctgccctcagatgatcaggcgcctgatgccgatgaagcttccttgctcatcgccattatcgaagattagctccatgttccgaaggctctctaggtcgtcctcaacgccaggatcaaatcatcagctgagccggagactgaaaacaataaagaaaagcaagcagctggtcatagtaaacatcatgtagcgaggcttagcagattgcttttttttcccgttagaatcagtccacatgtcctcgacacgggctagatttgttctaggattatttttccagtagtaagccatgtatccatggacagtccacagcgcgacgtctaatgtaacatcatcaaggttcttttgactatcccataagaaaccattccttaagacaaccgatattgtgagttgataaccaacaactaatgttaccatgcgattgttccg

SEQ ID NO: 77935 - DNA, 2154 bp, Zea Mays
gcctcccgcgatctcgctcgtgatattccagccccgccgccgccgtccccgcccccatccgtgacaccccaccatcaccgccgcgccacgcgcgacaactccatcccccgtccgcacccctaccccgagcatcgcagcgcctcccgcacgaggtcgttgcgcttgtcgatctgatggcggcccatggcaaaggagcaggtagaaaatggccgatgccgaggatatccagcccctcgtctgcgacaacggaactggcatggtcaaggctgggttcgctggcgacgacgccccgagggccgtcttccccagcatcgtggggcgcccgcgccacattggtgtcatggtcgggatggggcagaaggacgcctacgtcggtgacgaggttctgcaaaccgatcatgacaaaaccaaaggtagctttgaagccgcagactctgtctccacaacctgaagcccaagcacctcatgatcctcaaacaccagagcaacaacaaagcgggactggtgtaggcgtgtagctggtgagccgggtagtgaaggaggtgtgtaccaggcctccagtgagcaaatgggcatggtgccggatgcatctgcggccggtggcaggaaggtcgagctggatggggacatgcgatggacatcacaggttggcccctccagtgatccatctcaaacactagccaggccataggaaaaacgttgaatcaaagcaaacttgatgcttaccgaaagcatgttcgatgagttactcagattcatggcccaggaattgaatctacacggtttaataactatttgcatggctctaaatgcttaattagaacagaagacgaaatgaatcgcaaggggaaactaacatgcgagagaggaggagctagccacaaccaaagagcttggttcaatacttcaatggctagaataatgaacgatatgaagatcaggtagcattatatatgtcaataagaagcagaggagagaagcagcccacatcgcaggagacaaggacttcacttgtttggccagttcaggacttcaggatgttgtcgatgatgtccatgctatattccctcgcttcatgcttaacaatgagggagagactaagtgaggggctgaaggccgttggtgctgtcagaatgtttttttggagttttggtggatgatgctcagtgactgcaatgcaaaggatccttctgttttgtatattgaatgagattacatcactgtttttttcttagcgatatgttgagctcatgtgctcgtttatgttagtcgatctctggctcttgtagtaacttggaaagcttgctgctttttttaagggcatacatgcctgtgatgtgtggtcatgatcatttttttctcctgttattttagttgtcgtatcataaatgccatgtttgcattggtgttccaacatgtcaatattattgaataaatgtttgcattggcggcagcggggacgacgctaagtcgagcaatggcgaagcggcccgtggtggcagtaacggtggagagaagcagggggatgaatccaacggtggcgggatacttagcgctgtggcttccaggattggcgtggtcgtgtccagcgccaacggggaccgcagcggcagcgctgaggatggtgccaagacgagcgctggcgacgctggtcacggtagcaagggcgaggagaaggggcgtggtgtgaacggtggtagaatagtcgagcagatcatttccaatctgccctcagatgatcaggcgcctgatgccgatgaagcttccttgctcatcgccattatcgaagattagctccatgttccgaaggctctctaggtcgtcctcaacgccaggatcaaatcatcagctgagccggagactgaaaacaataaagaaaagcaagcagctggtcatagtaaacatcatgtagcgaggcttagcagattgcttttttttcccgttagaatcagtccacatgtcctcgacacgggctagatttgttctaggattatttttccagtagtaagccatgtatccatggacagtccacagcgcgacgtctaatgtaacatcatcaaggttcttttgactatcccataagaaaccattccttaagacaaccgatattgtgagttgataaccaacaactaatgttaccatgcgattgttccg

SEQ ID NO: 77936 - DNA, 2118 bp, Zea Mays
ctgcctcccgcgatctcgctcgtgatattccagccccgccgccgccgtccccgcccccatccgtgacaccccaccatcaccgccgcgccacgcgcgacaactccatcccccgtccgcacccctaccccgagcatcgcagcgcctcccgcacgaggtcgttgcgcttgtcgatctgatggcggcccatggcaaaggagcaggtagaaaatggccgatgccgaggatatccagcccctcgtctgcgacaacggaactggcatggtcaaggctgggttcgctggcgacgacgccccgagggccgtcttccccagcatcgtggggcgcccgcgccacattggtgtcatggtcgggatggggcagaaggacgcctacgtcggtgacgaggtgcagtccaagaggggtatcctgaccctcaagtacctcagcttacacatcacattattccccacattacagcaatcagtgcaacaatcagagcatttatttaggttctgcaaaccgatcatgacaaaaccaaaggtagctttgaagccgcagactctgtctccacaacctgaagcccaagcacctcatgatcctcaaacaccagagcaacaacaaagcgggactggtgtaggcgtgtagctggtgagccgggtagtgaaggaggtgtgtaccaggcctccagtgagcaaatgggcatggtgccggatgcatctgcggccggtggcaggaaggtcgagctggatggggacatgcgatggacatcacaggttggcccctccagtgatccatctcaaacactagccagaagacgaaatgaatcgcaaggggaaactaacatgcgagagaggaggagctagccacaaccaaagagcttggttcaatacttcaatggctagaataatgaacgatatgaagatcaggtagcattatatatgtcaataagaagcagaggagagaagcagcccacatcgcaggagacaaggacttcacttgtttggccagttcaggacttcaggatgttgtcgatgatgtccatgctatattccctcgcttcatgcttaacaatgagggagagactaagtgaggggctgaaggccgttggtgctgtcagaatgtttttttggagttttggtggatgatgctcagtgactgcaatgcaaaggatccttctgttttgtatattgaatgagattacatcactgtttttttcttagcgatatgttgagctcatgtgctcgtttatgttagtcgatctctggctcttgtagtaacttggaaagcttgctgctttttttaagggcatacatgcctgtgatgtgtggtcatgatcatttttttctcctgttattttagttgtcgtatcataaatgccatgtttgcattggtgttccaacatgtcaatattattgaataaatgtttgcattggcggcagcggggacgacgctaagtcgagcaatggcgaagcggcccgtggtggcagtaacggtggagagaagcagggggatgaatccaacggtggcgggatacttagcgctgtggcttccaggattggcgtggtcgtgtccagcgccaacggggaccgcagcggcagcgctgaggatggtgccaagacgagcgctggcgacgctggtcacggtagcaagggcgaggagaaggggcgtggtgtgaacggtggtagaatagtcgagcagatcatttccaatctgccctcagatgatcaggcgcctgatgccgatgaagcttccttgctcatcgccattatcgaagattagctccatgttccgaaggctctctaggtcgtcctcaacgccaggatcaaatcatcagctgagccggagactgaaaacaataaagaaaagcaagcagctggtcatagtaaacatcatgtagcgaggcttagcagattgcttttttttcccgttagaatcagtccacatgtcctcgacacgggctagatttgttctaggattatttttccagtagtaagccatgtatccatggacagtccacagcgcgacgtctaatgtaacatcatcaaggttcttttgactatcccataagaaaccattccttaagacaaccgatattgtgagttgataaccaacaactaatgttaccatgcgattgttccg

SEQ ID NO: 77937 - DNA, 2085 bp, Zea Mays
ctgcctcccgcgatctcgctcgtgatattccagccccgccgccgccgtccccgcccccatccgtgacaccccaccatcaccgccgcgccacgcgcgacaactccatcccccgtccgcacccctaccccgagcatcgcagcgcctcccgcacgaggtcgttgcgcttgtcgatctgatggcggcccatggcaaaggagcaggtagaaaatggccgatgccgaggatatccagcccctcgtctgcgacaacggaactggcatggtcaaggctgggttcgctggcgacgacgccccgagggccgtcttccccagcatcgtggggcgcccgcgccacattggtgtcatggtcgggatggggcagaaggacgcctacgtcggtgacgaggtgcagtccaagaggggtatcctgaccctcaagtacctcagcttacacatcacattattccccacattacagcaatcagtgcaacaatcagagcatttatttaggttctgcaaaccgatcatgacaaaaccaaaggtagctttgaagccgcagactctgtctccacaacctgaagcccaagcacctcatgatcctcaaacaccagagcaacaacaaagcgggactggtgtaggcgtgtagctggtgagccgggtagtgaaggaggtgtgtaccaggcctccagtgagcaaatgggcatggtgccggatgcatctgcggccggtggcaggaaggtcgagctggatggggacatgcgatggacatcacagaacagaagacgaaatgaatcgcaaggggaaactaacatgcgagagaggaggagctagccacaaccaaagagcttggttcaatacttcaatggctagaataatgaacgatatgaagatcaggtagcattatatatgtcaataagaagcagaggagagaagcagcccacatcgcaggagacaaggacttcacttgtttggccagttcaggacttcaggatgttgtcgatgatgtccatgctatattccctcgcttcatgcttaacaatgagggagagactaagtgaggggctgaaggccgttggtgctgtcagaatgtttttttggagttttggtggatgatgctcagtgactgcaatgcaaaggatccttctgttttgtatattgaatgagattacatcactgtttttttcttagcgatatgttgagctcatgtgctcgtttatgttagtcgatctctggctcttgtagtaacttggaaagcttgctgctttttttaagggcatacatgcctgtgatgtgtggtcatgatcatttttttctcctgttattttagttgtcgtatcataaatgccatgtttgcattggtgttccaacatgtcaatattattgaataaatgtttgcattggcggcagcggggacgacgctaagtcgagcaatggcgaagcggcccgtggtggcagtaacggtggagagaagcagggggatgaatccaacggtggcgggatacttagcgctgtggcttccaggattggcgtggtcgtgtccagcgccaacggggaccgcagcggcagcgctgaggatggtgccaagacgagcgctggcgacgctggtcacggtagcaagggcgaggagaaggggcgtggtgtgaacggtggtagaatagtcgagcagatcatttccaatctgccctcagatgatcaggcgcctgatgccgatgaagcttccttgctcatcgccattatcgaagattagctccatgttccgaaggctctctaggtcgtcctcaacgccaggatcaaatcatcagctgagccggagactgaaaacaataaagaaaagcaagcagctggtcatagtaaacatcatgtagcgaggcttagcagattgcttttttttcccgttagaatcagtccacatgtcctcgacacgggctagatttgttctaggattatttttccagtagtaagccatgtatccatggacagtccacagcgcgacgtctaatgtaacatcatcaaggttcttttgactatcccataagaaaccattccttaagacaaccgatattgtgagttgataaccaacaactaatgttaccatgcgattgttccg

SEQ ID NO: 77938 - DNA, 1981 bp, Zea Mays
ctgcctcccgcgatctcgctcgtgatattccagccccgccgccgccgtccccgcccccatccgtgacaccccaccatcaccgccgcgccacgcgcgacaactccatcccccgtccgcacccctaccccgagcatcgcagcgcctcccgcacgaggtcgttgcgcttgtcgatctgatggcggcccatggcaaaggagcaggtagaaaatggccgatgccgaggatatccagcccctcgtctgcgacaacggaactggcatggtcaaggctgggttcgctggcgacgacgccccgagggccgtcttccccagcatcgtggggcgcccgcgccacattggtgtcatggtcgggatggggcagaaggacgcctacgtcggtgacgaggttctgcaaaccgatcatgacaaaaccaaaggtagctttgaagccgcagactctgtctccacaacctgaagcccaagcacctcatgatcctcaaacaccagagcaacaacaaagcgggactggtgtaggcgtgtagctggtgagccgggtagtgaaggaggtgtgtaccaggcctccagtgagcaaatgggcatggtgccggatgcatctgcggccggtggcaggaaggtcgagctggatggggacatgcgatggacatcacagaacagaagacgaaatgaatcgcaaggggaaactaacatgcgagagaggaggagctagccacaaccaaagagcttggttcaatacttcaatggctagaataatgaacgatatgaagatcaggtagcattatatatgtcaataagaagcagaggagagaagcagcccacatcgcaggagacaaggacttcacttgtttggccagttcaggacttcaggatgttgtcgatgatgtccatgctatattccctcgcttcatgcttaacaatgagggagagactaagtgaggggctgaaggccgttggtgctgtcagaatgtttttttggagttttggtggatgatgctcagtgactgcaatgcaaaggatccttctgttttgtatattgaatgagattacatcactgtttttttcttagcgatatgttgagctcatgtgctcgtttatgttagtcgatctctggctcttgtagtaacttggaaagcttgctgctttttttaagggcatacatgcctgtgatgtgtggtcatgatcatttttttctcctgttattttagttgtcgtatcataaatgccatgtttgcattggtgttccaacatgtcaatattattgaataaatgtttgcattggcggcagcggggacgacgctaagtcgagcaatggcgaagcggcccgtggtggcagtaacggtggagagaagcagggggatgaatccaacggtggcgggatacttagcgctgtggcttccaggattggcgtggtcgtgtccagcgccaacggggaccgcagcggcagcgctgaggatggtgccaagacgagcgctggcgacgctggtcacggtagcaagggcgaggagaaggggcgtggtgtgaacggtggtagaatagtcgagcagatcatttccaatctgccctcagatgatcaggcgcctgatgccgatgaagcttccttgctcatcgccattatcgaagattagctccatgttccgaaggctctctaggtcgtcctcaacgccaggatcaaatcatcagctgagccggagactgaaaacaataaagaaaagcaagcagctggtcatagtaaacatcatgtagcgaggcttagcagattgcttttttttcccgttagaatcagtccacatgtcctcgacacgggctagatttgttctaggattatttttccagtagtaagccatgtatccatggacagtccacagcgcgacgtctaatgtaacatcatcaaggttcttttgactatcccataagaaaccattccttaagacaaccgatattgtgagttgataaccaacaactaatgttaccatgcgattgttccg

SEQ ID NO: 77939 - DNA, 2033 bp, Zea Mays
ctgcctcccgcgatctcgctcgtgatattccagccccgccgccgccgtccccgcccccatccgtgacaccccaccatcaccgccgcgccacgcgcgacaactccatcccccgtccgcacccctaccccgagcatcgcagcgcctcccgcacgaggtcgttgcgcttgtcgatctgatggcggcccatggcaaaggagcaggtagaaaatggccgatgccgaggatatccagcccctcgtctgcgacaacggaactggcatggtcaaggctgggttcgctggcgacgacgccccgagggccgtcttccccagcatcgtggggcgcccgcgccacattggtgtcatggtcgggatggggcagaaggacgcctacgtcggtgacgaggttctgcaaaccgatcatgacaaaaccaaaggtagctttgaagccgcagactctgtctccacaacctgaagcccaagcacctcatgatcctcaaacaccagagcaacaacaaagcgggactggtgtaggcgtgtagctggtgagccgggtagtgaaggaggtgtgtaccaggcctccagtgagcaaatgggcatggtgccggatgcatctgcggccggtggcaggaaggtcgagctggatggggacatgcgatggacatcacaggttggcccctccagtgatccatctcaaacactagccaggtttcctcctttgccaccctcctttggcagttctcttcctaacgtcgccgtaggttcccttccctgctgtttttgtctcccatagctcttaaaattttaagttccctgtttgcataaaggccataggaaaaacgttgaatcaaagcaaacttgatgcttaccgaaagcatgttcgatgagttactcagattcatggcccaggaattgaatctacacggtttaataactatttgcatggctctaaatgcttaattaggtttgctcatcgttcctcagtgctacttcatcttgattttctgctgagtatacaagggatgaatgaggctgctcatggtggacagaacagaagacgaaatgaatcgcaaggggaaactaacatgcgagagaggaggagctagccacaaccaaagagcttggttcaatacttcaatggctagaataatgaacgatatgaagatcaggtagcattatatatgtcaataagaagcagaggagagaagcagcccacatcgcaggagacaaggacttcacttgtttggccagttcaggacttcaggggctgaaggccgttggtgctgtcagaatgtttttttggagttttggtggatgatgctcagtgactgcaatgcaaaggatccttctgttttcggggacgacgctaagtcgagcaatggcgaagcggcccgtggtggcagtaacggtggagagaagcagggggatgaatccaacggtggcgggatacttagcgctgtggcttccaggattggcgtggtcgtgtccagcgccaacggggaccgcagcggcagcgctgaggatggtgccaagacgagcgctggcgacgctggtcacggtagcaagggcgaggagaaggggcgtggtgtgaacggtggtagaatagtcgagcagatcatttccaatctgccctcagatgatcaggcgcctgatgccgatgaagcttccttgctcatcgccattatcgaagattagctccatgttccgaaggctctctaggtcgtcctcaacgccaggatcaaatcatcagctgagccggagactgaaaacaataaagaaaagcaagcagctggtcatagtaaacatcatgtagcgaggcttagcagattgcttttttttcccgttagaatcagtccacatgtcctcgacacgggctagatttgttctaggattatttttccagtagtaagccatgtatccatggacagtccacagcgcgacgtctaatgtaacatcatcaaggttcttttgactatcccataagaaaccattccttaagacaaccgatattgtgagttgataaccaacaactaatgttaccatgcgattgttccg

SEQ ID NO: 77940 - DNA, 2191 bp, Zea Mays
gttctgcctcccgcgatctcgctcgtgatattccagccccgccgccgccgtccccgcccccatccgtgacaccccaccatcaccgccgcgccacgcgcgacaactccatcccccgtccgcacccctaccccgagcatcgcagcgcctcccgcacgaggtcgttgcgcttgtcgatctgatggcggcccatggcaaaggagcaggtagaaaatggccgatgccgaggatatccagcccctcgtctgcgacaacggaactggcatggtcaaggctgggttcgctggcgacgacgccccgagggccgtcttccccagcatcgtggggcgcccgcgccacattggtgtcatggtcgggatggggcagaaggacgcctacgtcggtgacgaggtgcagtccaagaggggtatcctgaccctcaagttctgcaaaccgatcatgacaaaaccaaaggtagctttgaagccgcagactctgtctccacaacctgaagcccaagcacctcatgatcctcaaacaccagagcaacaacaaagcgggactggtgtaggcgtgtagctggtgagccgggtagtgaaggaggtgtgtaccaggcctccagtgagcaaatgggcatggtgccggatgcatctgcggccggtggcaggaaggtcgagctggatggggacatgcgatggacatcacaggttggcccctccagtgatccatctcaaacactagccaggccataggaaaaacgttgaatcaaagcaaacttgatgcttaccgaaagcatgttcgatgagttactcagattcatggcccaggaattgaatctacacggtttaataactatttgcatggctctaaatgcttaattagaacagaagacgaaatgaatcgcaaggggaaactaacatgcgagagaggaggagctagccacaaccaaagagcttggttcaatacttcaatggctagaataatgaacgatatgaagatcaggtagcattatatatgtcaataagaagcagaggagagaagcagcccacatcgcaggagacaaggacttcacttgtttggccagttcaggacttcaggatgttgtcgatgatgtccatgctatattccctcgcttcatgcttaacaatgagggagagactaagtgaggggctgaaggccgttggtgctgtcagaatgtttttttggagttttggtggatgatgctcagtgactgcaatgcaaaggatccttctgttttgtatattgaatgagattacatcactgtttttttcttagcgatatgttgagctcatgtgctcgtttatgttagtcgatctctggctcttgtagtaacttggaaagcttgctgctttttttaagggcatacatgcctgtgatgtgtggtcatgatcatttttttctcctgttattttagttgtcgtatcataaatgccatgtttgcattggtgttccaacatgtcaatattattgaataaatgtttgcattggcggcagcggggacgacgctaagtcgagcaatggcgaagcggcccgtggtggcagtaacggtggagagaagcagggggatgaatccaacggtggcgggatacttagcgctgtggcttccaggattggcgtggtcgtgtccagcgccaacggggaccgcagcggcagcgctgaggatggtgccaagacgagcgctggcgacgctggtcacggtagcaagggcgaggagaaggggcgtggtgtgaacggtggtagaatagtcgagcagatcatttccaatctgccctcagatgatcaggcgcctgatgccgatgaagcttccttgctcatcgccattatcgaagattagctccatgttccgaaggctctctaggtcgtcctcaacgccaggatcaaatcatcagctgagccggagactgaaaacaataaagaaaagcaagcagctggtcatagtaaacatcatgtagcgaggcttagcagattgcttttttttcccgttagaatcagtccacatgtcctcgacacgggctagatttgttctaggattatttttccagtagtaagccatgtatccatggacagtccacagcgcgacgtctaatgtaacatcatcaaggttcttttgactatcccataagaaaccattccttaagacaaccgatattgtgagttgataaccaacaactaatgttaccatgcgattgttccg

SEQ ID NO: 77941 - DNA, 2126 bp, Zea Mays
gttctgcctcccgcgatctcgctcgtgatattccagccccgccgccgccgtccccgcccccatccgtgacaccccaccatcaccgccgcgccacgcgcgacaactccatcccccgtccgcacccctaccccgagcatcgcagcgcctcccgcacgaggtcgttgcgcttgtcgatctgatggcggcccatggcaaaggagcaggtagaaaatggccgatgccgaggatatccagcccctcgtctgcgacaacggaactggcatggtcaaggctgggttcgctggcgacgacgccccgagggccgtcttccccagcatcgtggggcgcccgcgccacattggtgtcatggtcgggatggggcagaaggacgcctacgtcggtgacgaggtgcagtccaagaggggtatcctgaccctcaagtacctcagcttacacatcacattattccccacattacagcaatcagtgcaacaatcagagcatttatttaggttctgcaaaccgatcatgacaaaaccaaaggtagctttgaagccgcagactctgtctccacaacctgaagcccaagcacctcatgatcctcaaacaccagagcaacaacaaagcgggactggtgtaggcgtgtagctggtgagccgggtagtgaaggaggtgtgtaccaggcctccagtgagcaaatgggcatggtgccggatgcatctgcggccggtggcaggaaggtcgagctggatggggacatgcgatggacatcacaggttggcccctccagtgatccatctcaaacactagccagaacagaagacgaaatgaatcgcaaggggaaactaacatgcgagagaggaggagctagccacaaccaaagagcttggttcaatacttcaatggctagaataatgaacgatatgaagatcaggtagcattatatatgtcaataagaagcagaggagagaagcagcccacatcgcaggagacaaggacttcacttgtttggccagttcaggacttcaggatgttgtcgatgatgtccatgctatattccctcgcttcatgcttaacaatgagggagagactaagtgaggggctgaaggccgttggtgctgtcagaatgtttttttggagttttggtggatgatgctcagtgactgcaatgcaaaggatccttctgttttgtatattgaatgagattacatcactgtttttttcttagcgatatgttgagctcatgtgctcgtttatgttagtcgatctctggctcttgtagtaacttggaaagcttgctgctttttttaagggcatacatgcctgtgatgtgtggtcatgatcatttttttctcctgttattttagttgtcgtatcataaatgccatgtttgcattggtgttccaacatgtcaatattattgaataaatgtttgcattggcggcagcggggacgacgctaagtcgagcaatggcgaagcggcccgtggtggcagtaacggtggagagaagcagggggatgaatccaacggtggcgggatacttagcgctgtggcttccaggattggcgtggtcgtgtccagcgccaacggggaccgcagcggcagcgctgaggatggtgccaagacgagcgctggcgacgctggtcacggtagcaagggcgaggagaaggggcgtggtgtgaacggtggtagaatagtcgagcagatcatttccaatctgccctcagatgatcaggcgcctgatgccgatgaagcttccttgctcatcgccattatcgaagattagctccatgttccgaaggctctctaggtcgtcctcaacgccaggatcaaatcatcagctgagccggagactgaaaacaataaagaaaagcaagcagctggtcatagtaaacatcatgtagcgaggcttagcagattgcttttttttcccgttagaatcagtccacatgtcctcgacacgggctagatttgttctaggattatttttccagtagtaagccatgtatccatggacagtccacagcgcgacgtctaatgtaacatcatcaaggttcttttgactatcccataagaaaccattccttaagacaaccgatattgtgagttgataaccaacaactaatgttaccatgcgattgttccg

SEQ ID NO: 77942 - DNA, 2336 bp, Zea Mays
gcgtgttctgcctcccgcgatctcgctcgtgatattccagccccgccgccgccgtccccgcccccatccgtgacaccccaccatcaccgccgcgccacgcgcgacaactccatcccccgtccgcacccctaccccgagcatcgcagcgcctcccgcacgaggtcgttgcgcttgtcgatctgatggcggcccatggcaaaggagcaggcggtgatggcagccacagcagaaagccgacgctcggcgtgattcccacccgtcgcgagccaagaggttcgaggtcatttttgagccaagaggttcgcggccacgggagcaaccctacagaaccatcaccaccaccgctctctcttcctctgctcttctctgcctgcctgagctcaccgcacctcgcctcctcaccgcggatcctccgttaatccggtagaaaatggccgatgccgaggatatccagcccctcgtctgcgacaacggaactggcatggtcaaggctgggttcgctggcgacgacgccccgagggccgtcttccccagcatcgtggggcgcccgcgccacattggtgtcatggtcgggatggggcagaaggacgcctacgtcggtgacgaggttctgcaaaccgatcatgacaaaaccaaaggtagctttgaagccgcagactctgtctccacaacctgaagcccaagcacctcatgatcctcaaacaccagagcaacaacaaagcgggactggtgtaggcgtgtagctggtgagccgggtagtgaaggaggtgtgtaccaggcctccagtgagcaaatgggcatggtgccggatgcatctgcggccggtggcaggaaggtcgagctggatggggacatgcgatggacatcacaggccataggaaaaacgttgaatcaaagcaaacttgatgcttaccgaaagcatgttcgatgagttactcagattcatggcccaggaattgaatctacacggtttaataactatttgcatggctctaaatgcttaattagaagacgaaatgaatcgcaaggggaaactaacatgcgagagaggaggagctagccacaaccaaagagcttggttcaatacttcaatggctagaataatgaacgatatgaagatcaggtagcattatatatgtcaataagaagcagaggagagaagcagcccacatcgcaggagacaaggacttcacttgtttggccagttcaggacttcaggatgttgtcgatgatgtccatgctatattccctcgcttcatgcttaacaatgagggagagactaagtgaggggctgaaggccgttggtgctgtcagaatgtttttttggagttttggtggatgatgctcagtgactgcaatgcaaaggatccttctgttttgtatattgaatgagattacatcactgtttttttcttagcgatatgttgagctcatgtgctcgtttatgttagtcgatctctggctcttgtagtaacttggaaagcttgctgctttttttaagggcatacatgcctgtgatgtgtggtcatgatcatttttttctcctgttattttagttgtcgtatcataaatgccatgtttgcattggtgttccaacatgtcaatattattgaataaatgtttgcattggcggcagcggggacgacgctaagtcgagcaatggcgaagcggcccgtggtggcagtaacggtggagagaagcagggggatgaatccaacggtggcgggatacttagcgctgtggcttccaggattggcgtggtcgtgtccagcgccaacggggaccgcagcggcagcgctgaggatggtgccaagacgagcgctggcgacgctggtcacggtagcaagggcgaggagaaggggcgtggtgtgaacggtggtagaatagtcgagcagatcatttccaatctgccctcagatgatcaggcgcctgatgccgatgaagcttccttgctcatcgccattatcgaagattagctccatgttccgaaggctctctaggtcgtcctcaacgccaggatcaaatcatcagctgagccggagactgaaaacaataaagaaaagcaagcagctggtcatagtaaacatcatgtagcgaggcttagcagattgcttttttttcccgttagaatcagtccacatgtcctcgacacgggctagatttgttctaggattatttttccagtagtaagccatgtatccatggacagtccacagcgcgacgtctaatgtaacatcatcaaggttcttttgactatcccataagaaaccattccttaagacaaccgatattgtgagttgataaccaacaactaatgttaccatgcgattgttccg

SEQ ID NO: 77943 - DNA, 2032 bp, Zea Mays
tgcacatgtgcgcgtgttctgcctcccgcgatctcgctcgtgatattccagccccgccgccgccgtccccgcccccatccgtgacaccccaccatcaccgccgcgccacgcgcgacaactccatcccccgtccgcacccctaccccgagcatcgcagcgcctcccgcacgaggtcgttgcgcttgtcgatctgatggcggcccatggcaaaggagcaggtagaaaatggccgatgccgaggatatccagcccctcgtctgcgacaacggaactggcatggtcaaggctgggttcgctggcgacgacgccccgagggccgtcttccccagcatcgtggggcgcccgcgccacattggtgtcatggtcgggatggggcagaaggacgcctacgtcggtgacgaggttctgcaaaccgatcatgacaaaaccaaaggtagctttgaagccgcagactctgtctccacaacctgaagcccaagcacctcatgatcctcaaacaccagagcaacaacaaagcgggactggtgtaggcgtgtagctggtgagccgggtagtgaaggaggtgtgtaccaggcctccagtgagcaaatgggcatggtgccggatgcatctgcggccggtggcaggaaggtcgagctggatggggacatgcgatggacatcacaggttggcccctccagtgatccatctcaaacactagccagaagacgaaatgaatcgcaaggggaaactaacatgcgagagaggaggagctagccacaaccaaagagcttggttcaatacttcaatggctagaataatgaacgatatgaagatcaggtagcattatatatgtcaataagaagcagaggagagaagcagcccacatcgcaggagacaaggacttcacttgtttggccagttcaggacttcaggatgttgtcgatgatgtccatgctatattccctcgcttcatgcttaacaatgagggagagactaagtgaggggctgaaggccgttggtgctgtcagaatgtttttttggagttttggtggatgatgctcagtgactgcaatgcaaaggatccttctgttttgtatattgaatgagattacatcactgtttttttcttagcgatatgttgagctcatgtgctcgtttatgttagtcgatctctggctcttgtagtaacttggaaagcttgctgctttttttaagggcatacatgcctgtgatgtgtggtcatgatcatttttttctcctgttattttagttgtcgtatcataaatgccatgtttgcattggtgttccaacatgtcaatattattgaataaatgtttgcattggcggcagcggggacgacgctaagtcgagcaatggcgaagcggcccgtggtggcagtaacggtggagagaagcagggggatgaatccaacggtggcgggatacttagcgctgtggcttccaggattggcgtggtcgtgtccagcgccaacggggaccgcagcggcagcgctgaggatggtgccaagacgagcgctggcgacgctggtcacggtagcaagggcgaggagaaggggcgtggtgtgaacggtggtagaatagtcgagcagatcatttccaatctgccctcagatgatcaggcgcctgatgccgatgaagcttccttgctcatcgccattatcgaagattagctccatgttccgaaggctctctaggtcgtcctcaacgccaggatcaaatcatcagctgagccggagactgaaaacaataaagaaaagcaagcagctggtcatagtaaacatcatgtagcgaggcttagcagattgcttttttttcccgttagaatcagtccacatgtcctcgacacgggctagatttgttctaggattatttttccagtagtaagccatgtatccatggacagtccacagcgcgacgtctaatgtaacatcatcaaggttcttttgactatcccataagaaaccattccttaagacaaccgatattgtgagttgataaccaacaactaatgttaccatgcgattgttccg

SEQ ID NO: 77944 - DNA, 2286 bp, Zea Mays
tgtaggcgtgcacatgtgcgcgtgttctgcctcccgcgatctcgctcgtgatattccagccccgccgccgccgtccccgcccccatccgtgacaccccaccatcaccgccgcgccacgcgcgacaactccatcccccgtccgcacccctaccccgagcatcgcagcgcctcccgcacgaggtcgttgcgcttgtcgatctgatggcggcccatggcaaaggagcaggtagaaaatggccgatgccgaggatatccagcccctcgtctgcgacaacggaactggcatggtcaaggctgggttcgctggcgacgacgccccgagggccgtcttccccagcatcgtggggcgcccgcgccacattggtgtcatggtcgggatggggcagaaggacgcctacgtcggtgacgaggtgcagtccaagaggggtatcctgaccctcaagtacctcagcttacacatcacattattccccacattacagcaatcagtgcaacaatcagagcatttatttaggttctgcaaaccgatcatgacaaaaccaaaggtagctttgaagccgcagactctgtctccacaacctgaagcccaagcacctcatgatcctcaaacaccagagcaacaacaaagcgggactggtgtaggcgtgtagctggtgagccgggtagtgaaggaggtgtgtaccaggcctccagtgagcaaatgggcatggtgccggatgcatctgcggccggtggcaggaaggtcgagctggatggggacatgcgatggacatcacaggttggcccctccagtgatccatctcaaacactagccaggccataggaaaaacgttgaatcaaagcaaacttgatgcttaccgaaagcatgttcgatgagttactcagattcatggcccaggaattgaatctacacggtttaataactatttgcatggctctaaatgcttaattagaacagaagacgaaatgaatcgcaaggggaaactaacatgcgagagaggaggagctagccacaaccaaagagcttggttcaatacttcaatggctagaataatgaacgatatgaagatcaggtagcattatatatgtcaataagaagcagaggagagaagcagcccacatcgcaggagacaaggacttcacttgtttggccagttcaggacttcaggatgttgtcgatgatgtccatgctatattccctcgcttcatgcttaacaatgagggagagactaagtgaggggctgaaggccgttggtgctgtcagaatgtttttttggagttttggtggatgatgctcagtgactgcaatgcaaaggatccttctgttttgtatattgaatgagattacatcactgtttttttcttagcgatatgttgagctcatgtgctcgtttatgttagtcgatctctggctcttgtagtaacttggaaagcttgctgctttttttaagggcatacatgcctgtgatgtgtggtcatgatcatttttttctcctgttattttagttgtcgtatcataaatgccatgtttgcattggtgttccaacatgtcaatattattgaataaatgtttgcattggcggcagcggggacgacgctaagtcgagcaatggcgaagcggcccgtggtggcagtaacggtggagagaagcagggggatgaatccaacggtggcgggatacttagcgctgtggcttccaggattggcgtggtcgtgtccagcgccaacggggaccgcagcggcagcgctgaggatggtgccaagacgagcgctggcgacgctggtcacggtagcaagggcgaggagaaggggcgtggtgtgaacggtggtagaatagtcgagcagatcatttccaatctgccctcagatgatcaggcgcctgatgccgatgaagcttccttgctcatcgccattatcgaagattagctccatgttccgaaggctctctaggtcgtcctcaacgccaggatcaaatcatcagctgagccggagactgaaaacaataaagaaaagcaagcagctggtcatagtaaacatcatgtagcgaggcttagcagattgcttttttttcccgttagaatcagtccacatgtcctcgacacgggctagatttgttctaggattatttttccagtagtaagccatgtatccatggacagtccacagcgcgacgtctaatgtaacatcatcaaggttcttttgactatcccataagaaaccattccttaagacaaccgatattgtgagttgataaccaacaactaatgttaccatgcgattgttccg

SEQ ID NO: 77945 - DNA, 1277 bp, Zea Mays
attctaaccaacatttatgtttggaaaatttcaaccactgagaagtttcatcattgttatgcaatccttgttcgatgggatttgcaactggtgggaagactttcttcttgtggggtggctgtatgatgatgcatgctgatgattttaggcaagaccggtacggcattgtcagtggattaagagatggcggttactcagatgatatgacactcgctgcaatagcaggacagcacaaaaggctcatattttcaccacctgttgctgtgtttccacacccccttgccagtgatcttagcttctccagatactggaattacctcaggaaacaaacttttgttctcgagtcatatgtatcgaatgtaaactggatgatgaaccgtgcattatttacaagccattgctatctgtcatgggggtttgtctggccatacattatggctttggtccatgttttagctgctcttcgggcaccgtacagcaaagttgtaaaggaagcatccgattcatcttggggtttgttcctggtgggcctcttgttcacatgcactctgatcgagctcgtttcaatgtggaatttgactaaggtggaaattcaactgtgcaatatgctgtctcctgaaggaccgaaagtatctcttgattcatacaactgggggctcgtgttcatcgctgtgttggtagacaacttcctctatccagtatccgcaatccggtcgcatttctcccaatcaatcaactggtctggcatccggtactacttgagggacgggaaaataagcaagatcgagagagagaacagttcgaagtacactgatcttggagggaagcatctatacggcaagaggacataccctcctaacaaatcgttgctcggttacctgtcaagaactctagtgcaatggcatcagccaaagaaatatgacgtataggaaggtcgaccgggggagattcagccctcgattgtgtggggggcttcttgttgtacacctcttttggtttcaactttctttcatgcctctctctctctctctctcctctctgattgtttagtggttattaggttcattcatattaaattttgtggtgttcaatcggcgccaccactttgaaagggttgcattgcacctcatagttctttgtaacactagagatatgtaacgatttggctgaagaagtgaaatgttccatgttggtgagacggtctctttggttcatttgctgattcatcgactctttaagagttgacatctactcactattgtatcataggatcacat

SEQ ID NO: 77946 - DNA, 1414 bp, Zea Mays
gtttccatcctcgatgtctatttcatgatcggtgttgaaaagatgcacaaggataccaagtatgtattgtttcttgatgatgatgtgaggctgcatcctgggactatcggagctctcacaaaagaaatggagaagaatcctgagatatttatacaaactggatatccccttgacttaccttctggcagtttgggcagctattgcatatatgaataccacatgccttgttcgatgggatttgcaactggtgggaagactttcttcttgtggggtggctgtatgatggcaagaccggtacggcattgtcagtggattaagagatggcggttactcagatgatatgacactcgctgcaatagcaggacagcacaaaaggctcatattttcaccacctgttgctgtgtttccacacccccttgccagtgatcttagcttctccagatactggaattacctcaggaaacaaacttttgttctcgagtcatatgtatcgaatgtaaactggatgatgaaccgtgcattatttacaagccattgctatctgtcatgggggtttgtctggccatacattatggctttggtccatgttttagctgctcttcgggcaccgtacagcaaagttgtaaaggaagcatccgattcatcttggggtttgttcctggtgggcctcttgttcacatgcactctgatcgagctcgtttcaatgtggaatttgactaaggtggaaattcaactgtgcaatatgctgtctcctgaaggaccgaaagtatctcttgattcatacaactgggggctcgtgttcatcgctgtgttggtagacaacttcctctatccagtatccgcaatccggtcgcatttctcccaatcaatcaactggtctggcatccggtactacttgagggacgggaaaataagcaagatcgagagagagaacagttcgaagtacactgatcttggagggaagcatctatacggcaagaggacataccctcctaacaaatcgttgctcggttacctgtcaagaactctagtgcaatggcatcagccaaagaaatatgacgtataggaaggtcgaccgggggagattcagccctcgattgtgtggggggcttcttgttgtacacctcttttggtttcaactttctttcatgcctctctctctctctctctcctctctgattgtttagtggttattaggttcattcatattaaattttgtggtgttcaatcggcgccaccactttgaaagggttgcattgcacctcatagttctttgtaacactagagatatgtaacgatttggctgaagaagtgaaatgttccatgttggtgagacggtctctttggttcatttgctgattcatcgactctttaagagttgacatctactcactattgtatcataggatcacat

SEQ ID NO: 77947 - DNA, 1945 bp, Zea Mays
aaacccgtaacagctgttggtgcatatgcttggagatttgtcggtttcttcccgacaagtgttgtcgatctcagcttgtcccactccatgtgttacctgctactgcctactgctaagtgctccaattccaattgggtgcatgatctgtttagtccttgctctcgggtgggcggctgcttcaattgtcagaaaaggggttataaagaacatgaggcgcaacattgtagatggaaatagttttgcatttctttgtgacaacatagatgagcttgagcactctgttcaggagaatttacctagagtctctgtagtcatgcctttgaagggctttggcgaacataatttgcaaaattggcgaactcagattacatcactttatggtgggccactggaattcttgtttatcgtcgagagcaaagatgatcctgcttatcatgctgtttcccgtttgatcacagagtacaaggacaatctggaggcaaaggtggtcgttgctgggttgtcaacaacctgtagccagaaaattcacaatcaattgatcggtgttgaaaagatgcacaaggataccaagtatgtattgtttcttgatgatgatgtgaggctgcatcctgggactatcggagctctcacaaaagaaatggagaagaatcctgagatatttatacaaactggatatccccttgacttaccttctggcagtttgggcagctattgcatatatgaataccacatgccttgttcgatgggatttgcaactggtgggaagactttcttcttgtggggtggctgtatgatgatgcatgctgatgattttaggcaagaccggtacggcattgtcagtggattaagagatggcggttactcagatgatatgacactcgctgcaatagcaggacagcacaaaaggctcatattttcaccacctgttgctgtgtttccacacccccttgccagtgatcttagcttctccagatactggaattacctcaggaaacaaacttttgttctcgagtcatatgtatcgaatgtaaactggatgatgaaccgtgcattatttacaagccattgctatctgtcatgggggtttgtctggccatacattatggctttggtccatgttttagctgctcttcgggcaccgtacagcaaagttgtaaaggaagcatccgattcatcttggggtttgttcctggtgggcctcttgttcacatgcactctgatcgagctcgtttcaatgtggaatttgactaaggtggaaattcaactgtgcaatatgctgtctcctgaaggaccgaaagtatctcttgattcatacaactgggggctcgtgttcatcgctgtgttggtagacaacttcctctatccagtatccgcaatccggtcgcatttctcccaatcaatcaactggtctggcatccggtactacttgagggacgggaaaataagcaagatcgagagagagaacagttcgaagtacactgatcttggagggaagcatctatacggcaagaggacataccctcctaacaaatcgttgctcggttacctgtcaagaactctagtgcaatggcatcagccaaagaaatatgacgtataggaaggtcgaccgggggagattcagccctcgattgtgtggggggcttcttgttgtacacctcttttggtttcaactttctttcatgcctctctctctctctctctcctctctgattgtttagtggttattaggttcattcatattaaattttgtggtgttcaatcggcgccaccactttgaaagggttgcattgcacctcatagttctttgtaacactagagatatgtaacgatttggctgaagaagtgaaatgttccatgttggtgagacggtctctttggttcatttgctgattcatcgactctttaagagttgacatctactcactattgtatcataggatcacat

SEQ ID NO: 77948 - DNA, 2546 bp, Zea Mays
aaaggccaccgaggcagcccaaatcaacccgttcgttcctcccttctcccccctctccccacatcgggcagcctcccccctctctctcaccgctcaggtcaggccaggcccggcgggagagagatccggcgagagacgcggcctcttgctcccctcaacccccttaaagaagcgcatagaagcttcggaaggtgcccctccgcggctcgaaggaggggaggggacgccgcggacaatgacggcgatggaagccgccgtcgacgctatgctcgccgccgcgagccgtgccttcacgagcacctttgccatcgccatccagatccaggggtgcatgatctgtttagtccttgctctcgggtgggcggctgcttcaattgtcagaaaaggggttataaagaacatgaggcgcaacattgtagatggaaatagttttgcatttctttgtgacaacatagatgagcttgagcactctgttcaggagaatttacctagagtctctgtagtcatgcctttgaagggctttggcgaacataatttgcaaaattggcgaactcagattacatcactttatggtgggccactggaattcttgtttatcgtcgagagcaaagatgatcctgcttatcatgctgtttcccgtttgatcacagagtacaaggacaatctggaggcaaaggtggtcgttgctgggttgtcaacaacctgtagccagaaaattcacaatcaattggtttgtaaatgactttgtttccatcctcgatgtctatttcatggtctgttcatgacactgaatgctcattttggcttatgcttgtagatgttcctagtgtgtggaatggagatgttgaatgtgcatgcattcaaatattccatcctatttccaatatattttttttgccgtttgcatatcattcatcttccccttttatagaaactaaagtgtcttgaacggtggtaagttgtaagtgctacatttgttaccttgcaagcatgaggatagtcacattggatatgaaaaaatgccacaaattttgactgttactgtggttactatatgttcatctcttggccttgttttattttttaccaaagaaggccagtaaattgactcgttactcatgtttatcaaactgaaacagatcggtgttgaaaagatgcacaaggataccaagtatgtattgtttcttgatgatgatgtgaggctgcatcctgggactatcggagctctcacaaaagaaatggagaagaatcctgagatatttatacaaactggatatccccttgacttaccttctggcagtttgggcagctattgcatatatgaataccacatgccttgttcgatgggatttgcaactggtgggaagactttcttcttgtggggtggctgtatgatgatgcatgctgatgattttaggcaagaccggtacggcattgtcagtggattaagagatggcggttactcagatgatatgacactcgctgcaatagcaggacagcacaaaaggctcatattttcaccacctgttgctgtgtttccacacccccttgccagtgatcttagcttctccagatactggaattacctcaggaaacaaacttttgttctcgagtcatatgtatcgaatgtaaactggatgatgaaccgtgcattatttacaagccattgctatctgtcatgggggtttgtctggccatacattatggctttggtccatgttttagctgctcttcgggcaccgtacagcaaagttgtaaaggaagcatccgattcatcttggggtttgttcctggtgggcctcttgttcacatgcactctgatcgagctcgtttcaatgtggaatttgactaaggtggaaattcaactgtgcaatatgctgtctcctgaaggaccgaaagtatctcttgattcatacaactgggggctcgtgttcatcgctgtgttggtagacaacttcctctatccagtatccgcaatccggtcgcatttctcccaatcaatcaactggtctggcatccggtactacttgagggacgggaaaataagcaagatcgagagagagaacagttcgaagtacactgatcttggagggaagcatctatacggcaagaggacataccctcctaacaaatcgttgctcggttacctgtcaagaactctagtgcaatggcatcagccaaagaaatatgacgtataggaaggtcgaccgggggagattcagccctcgattgtgtggggggcttcttgttgtacacctcttttggtttcaactttctttcatgcctctctctctctctctctcctctctgattgtttagtggttattaggttcattcatattaaattttgtggtgttcaatcggcgccaccactttgaaagggttgcattgcacctcatagttctttgtaacactagagatatgtaacgatttggctgaagaagtgaaatgttccatgttggtgagacggtctctttggttcatttgctgattcatcgactctttaagagttgacatctactcactattgtatcataggatcacat

SEQ ID NO: 77949 - DNA, 2132 bp, Zea Mays
aaaggccaccgaggcagcccaaatcaacccgttcgttcctcccttctcccccctctccccacatcgggcagcctcccccctctctctcaccgctcaggtcaggccaggcccggcgggagagagatccggcgagagacgcggcctcttgctcccctcaacccccttaaagaagcgcatagaagcttcggaaggtgcccctccgcggctcgaaggaggggaggggacgccgcggacaatgacggcgatggaagccgccgtcgacgctatgctcgccgccgcgagccgtgccttcacgagcacctttgccatcgccatccagatccaggggtgcatgatctgtttagtccttgctctcgggtgggcggctgcttcaattgtcagaaaaggggttataaagaacatgaggcgcaacattgtagatggaaatagttttgcatttctttgtgacaacatagatgagcttgagcactctgttcaggagaatttacctagagtctctgtagtcatgcctttgaagggctttggcgaacataatttgcaaaattggcgaactcagattacatcactttatggtgggccactggaattcttgtttatcgtcgagagcaaagatgatcctgcttatcatgctgtttcccgtttgatcacagagtacaaggacaatctggaggcaaaggtggtcgttgctgggttgtcaacaacctgtagccagaaaattcacaatcaattgatcggtgttgaaaagatgcacaaggataccaagtatgtattgtttcttgatgatgatgtgaggctgcatcctgggactatcggagctctcacaaaagaaatggagaagaatcctgagatatttatacaaactggatatccccttgacttaccttctggcagtttgggcagctattgcatatatgaataccacatgccttgttcgatgggatttgcaactggtgggaagactttcttcttgtggggtggctgtatgatgatgcatgctgatgattttaggcaagaccggtacggcattgtcagtggattaagagatggcggttactcagatgatatgacactcgctgcaatagcagcacaaaaggctcatattttcaccacctgttgctgtgtttccacacccccttgccagtgatcttagcttctccagatactggaattacctcaggaaacaaacttttgttctcgagtcatatgtatcgaatgtaaactggatgatgaaccgtgcattatttacaagccattgctatctgtcatgggggtttgtctggccatacattatggctttggtccatgttttagctgctcttcgggcaccgtacagcaaagttgtaaaggaagcatccgattcatcttggggtttgttcctggtgggcctcttgttcacatgcactctgatcgagctcgtttcaatgtggaatttgactaaggtggaaattcaactgtgcaatatgctgtctcctgaaggaccgaaagtatctcttgattcatacaactgggggctcgtgttcatcgctgtgttggtagacaacttcctctatccagtatccgcaatccggtcgcatttctcccaatcaatcaactggtctggcatccggtactacttgagggacgggaaaataagcaagatcgagagagagaacagttcgaagtacactgatcttggagggaagcatctatacggcaagaggacataccctcctaacaaatcgttgctcggttacctgtcaagaactctagtgcaatggcatcagccaaagaaatatgacgtataggaaggtcgaccgggggagattcagccctcgattgtgtggggggcttcttgttgtacacctcttttggtttcaactttctttcatgcctctctctctctctctctcctctctgattgtttagtggttattaggttcattcatattaaattttgtggtgttcaatcggcgccaccactttgaaagggttgcattgcacctcatagttctttgtaacactagagatatgtaacgatttggctgaagaagtgaaatgttccatgttggtgagacggtctctttggttcatttgctgattcatcgactctttaagagttgacatctactcactattgtatcataggatcacat

SEQ ID NO: 77950 - DNA, 1660 bp, Zea Mays
gtgaaagatgaactatgcgaaccgggtcctacgttagcacgaaaagtcagcggacgatctggacggtggattattacaggggccgcaagtcgacggttcagagattcggatgcatatctggccaacctgcacgtttctgaagcgacaaccacacgtccacacggacgggtgcatcccgacgcccaaatccatggcgagctcgccgcgatctcctccgccggcgcctacgccggaattcgagatctctcggcagtcccgcctctttgtggcgaaggtgatagatctcgatgaactgaggatgctggcggctcagggagtcccagacgcggcgggcgtccgagcaactgtatggaagctgctactgggctatctgcccaatgaccgctcgctgtgggagcaggagctggcaaagaagagagggcagtacgctgctttcaaagatgagttccttacaaaccctgtagaaagagcgcaacaggtgccaacagaaggccaccacaacgtaagtgcagagcatgttgacaatggcttcctgcacaggtcagaggtaacccgagaggagcaccctttaagccttgggaagaccagtgcttggaatcagttttttgagtactcagagattatggagcagattgaccgcgatgtaaagcgcacccaccctgacatgcagttcttctgcggcgactcgtcttttgcaaagtccaatcaggaatctttgaaaaatgtactgttaatctttgccaagctgaatgctggaataagatatgtacaagggatgaatgaagttttggcacccctcttctttgtatttcggagtgatccggatgataaaaatgctgaattcgcggaagcggattcattcttttgcttcgtcgagttgcttagtgggttcagagacaacttctgccagaaactggacaacagtgctgttggcattcgaggtacactagccaagttatcacagcttgtagcaaagtatgatggagaactccagcaacatctggaaataactacggaagttaatccccagttctacgcattcagatggataaccttactgctgacccaggaattcaacttcgccgacaccattcacatctgggacacactattaagtgatcctggtggcccccaggaaaccttgctcagaatatgctgcgcgatgctgatccttgtccggaagcgcctcctggccggcgacttcacctccaacctcaagctcctgcagaattacccaccgacgaacatcagccacctcctctacgtcgccaacaagctgcactgaaccggtctcttctgcgctgctgcgtttgttcagccaaaactgtggcccgagtcccggcattgcaacagaaacacaccgttgcggccatggcttgtgtatcatgtccattaatctgactccctgcattttgtaacttgtattgtatgttcacctgacaaggagttctagtatcccagttaatcaatgtggcatgattatagtgtctaagcatgtctgctgagcgctgaacattctccacttttttaaaatactagtgtatgaagcgcgcatatgcgcgcatggcgatccgtttagtgttatcatataatgtatgatgattatatgattaacaaagagtaaattaggatataagagtaaagacaatgcagaggtgac

SEQ ID NO: 77951 - DNA, 1661 bp, Zea Mays
gtgaaagatgaactatgcgaaccgggtcctacgttagcacgaaaagtcagcggacgatctggacggtggattattacaggggccgcaagtcgacggttcagagattcggatgcatatctggccaacctgcacgtttctgaagcgacaaccacacgtccacacggacgggtgcatcccgacgcccaaatccatggcgagctcgccgcgatctcctccgccggcgcctacgccggaattcgagatctctcggcagtcccgcctctttgtggcggtgatagatctcgatgaactgaggatgctggcggctcagggagtcccagacgcggcgggcgtccgagcaactgtatggaagctgctactgggctatctgcccaatgaccgctcgctgtgggagcaggagctggcaaagaagagagggcagtacgctgctttcaaagatgagttccttacaaaccctgtaggtagaaagagcgcaacaggtgccaacagaaggccaccacaacgtaagtgcagagcatgttgacaatggcttcctgcacaggtcagaggtaacccgagaggagcaccctttaagccttgggaagaccagtgcttggaatcagttttttgagtactcagagattatggagcagattgaccgcgatgtaaagcgcacccaccctgacatgcagttcttctgcggcgactcgtcttttgcaaagtccaatcaggaatctttgaaaaatgtactgttaatctttgccaagctgaatgctggaataagatatgtacaagggatgaatgaagttttggcacccctcttctttgtatttcggagtgatccggatgataaaaatgctgaattcgcggaagcggattcattcttttgcttcgtcgagttgcttagtgggttcagagacaacttctgccagaaactggacaacagtgctgttggcattcgaggtacactagccaagttatcacagcttgtagcaaagtatgatggagaactccagcaacatctggaaataactacggaagttaatccccagttctacgcattcagatggataaccttactgctgacccaggaattcaacttcgccgacaccattcacatctgggacacactattaagtgatcctggtggcccccaggaaaccttgctcagaatatgctgcgcgatgctgatccttgtccggaagcgcctcctggccggcgacttcacctccaacctcaagctcctgcagaattacccaccgacgaacatcagccacctcctctacgtcgccaacaagctgcactgaaccggtctcttctgcgctgctgcgtttgttcagccaaaactgtggcccgagtcccggcattgcaacagaaacacaccgttgcggccatggcttgtgtatcatgtccattaatctgactccctgcattttgtaacttgtattgtatgttcacctgacaaggagttctagtatcccagttaatcaatgtggcatgattatagtgtctaagcatgtctgctgagcgctgaacattctccacttttttaaaatactagtgtatgaagcgcgcatatgcgcgcatggcgatccgtttagtgttatcatataatgtatgatgattatatgattaacaaagagtaaattaggatataagagtaaagacaatgcagaggtgac

SEQ ID NO: 77952 - DNA, 1697 bp, Zea Mays
ctacgagacaaggaaacccgtcccgtgaaagatgaactatgcgaaccgggtcctacgttagcacgaaaagtcagcggacgatctggacggtggattattacaggggccgcaagtcgacggttcagagattcggatgcatatctggccaacctgcacgtttctgaagcgacaaccacacgtccacacggacgggtgcatcccgacgcccaaatccatggcgagctcgccgcgatctcctccgccggcgcctacgccggaattcgagatctctcggcagtcccgcctctttgtggcgctgtccaagaaggtgatagatctcgatgaactgaggatgctggcggctcagggagtcccagacgcggcgggcgtccgagcaactgtatggaagctgctactgggctatctgcccaatgaccgctcgctgtgggagcaggagctggcaaagaagagagggcagtacgctgctttcaaagatgagttccttacaaaccctgtaggtagaaagagcgcaacaggtgccaacagaaggccaccacaacgtaagtgcagagcatgttgacaatggcttcctgcacaggtcagaggtaacccgagaggagcaccctttaagccttgggaagaccagtgcttggaatcagttttttgagtactcagagattatggagcagattgaccgcgatgtaaagcgcacccaccctgacatgcagttcttctgcggcgactcgtcttttgcaaagtccaatcaggaatctttgaaaaatgtactgttaatctttgccaagctgaatgctggaataagatatgtacaagggatgaatgaagttttggcacccctcttctttgtatttcggagtgatccggatgataaaaatgctgaattcgcggaagcggattcattcttttgcttcgtcgagttgcttagtgggttcagagacaacttctgccagaaactggacaacagtgctgttggcattcgaggtacactagccaagttatcacagcttgtagcaaagtatgatggagaactccagcaacatctggaaataactacggaagttaatccccagttctacgcattcagatggataaccttactgctgacccaggaattcaacttcgccgacaccattcacatctgggacacactattaagtgatcctggtggcccccaggaaaccttgctcagaatatgctgcgcgatgctgatccttgtccggaagcgcctcctggccggcgacttcacctccaacctcaagctcctgcagaattacccaccgacgaacatcagccacctcctctacgtcgccaacaagctgcactgaaccggtctcttctgcgctgctgcgtttgttcagccaaaactgtggcccgagtcccggcattgcaacagaaacacaccgttgcggccatggcttgtgtatcatgtccattaatctgactccctgcattttgtaacttgtattgtatgttcacctgacaaggagttctagtatcccagttaatcaatgtggcatgattatagtgtctaagcatgtctgctgagcgctgaacattctccacttttttaaaatactagtgtatgaagcgcgcatatgcgcgcatggcgatccgtttagtgttatcatataatgtatgatgattatatgattaacaaagagtaaattaggatataagagtaaagacaatgcagaggtgac

SEQ ID NO: 77953 - DNA, 555 bp, Zea Mays
aggacgagaagaaaggatggaaagggagctggagataaagagaatgcaggcagagttactggcccaagctaaagagaatgaatcatgattgtcatttgtccaatggtttcaggcagttcctttatcgtatttcctctgctgtattttccatgcaatatcttgactgatgtatgctcatgctcagcacctccaataaagcgagacatgctatagcattgttgaatgcaagtgggtatgcagtttgcagtatgcttatgttgaattgatgtaacttagccgaactgaaagaggctgccccagcttgattggaacagaggaatttgctgctgtttttgttcttattacggaacaacacaagtcaactctaaaaaaaaattgtttatgagtctggttataaggtgttgttttgtactgagatttcattgttcacttgaagaaacctctgtcggaggagcagaatgcttggtgctgtttaagttggctcgtgttatattgctcatgttctaagtatacatatccaacatgtcagtcacttttctgttgtgccattctaag

SEQ ID NO: 77954 - DNA, 1968 bp, Zea Mays
ctctccctctccgctccccattgccgcattgctctccctcggctcggtccctctccggctctccctcacggcctcgcccactgcgccttcgaggagctccgaatcccgatcgcctcggtccccgcgagctcacatggtgggggcgcgcaccagaggctagggttcccagttcccatcattctcctgctgattaaaaccgtggggttttggagagcctgaggctgtggcggcggcaggaatgaacggggaggtggaatgcagcgtgtgccatgcgaaggtgccggtgccgccgccggtgtcgaaagcgtacgacagccaccggagcactgtgtcgtcgcggcaacgtgcgctaaacgtgctcctcgtctccggcgactgcgtccttgccggcctccagcctatattagtgtacatctcaaaagtggatgggaaattcaaatttagcccaatcagcgtgaatttcttgacagagattacaaaaattatgtttaccattgtaatgctattcatccaggctagacgtctaaaggtgggagacaagccactttttacagtttcaatatttatgcaggctgctcgcaataatgttcttctttcagtacctgcttttctctatgctatcaacaactatttgaagttcataatgcagttatattttaatcctgctagcgtgaaaatgctgagtaatctcaaggttctggtaatcgcagtgcttcttaagatgataatgaggaggcgattttccgtaatccagtgggaggcccttgcccttttgttaatcggaatatctgttaatcagctgaaatcattgccagaaggttctagtgtgctaggtcttcctgttgcagctggagcctacctatatacattgttttttgtaacagttcccgcattggcttcagtttacaacgaaaaggctcttaaaagccagtttgataccagtatttaccttcagaacttgtttctgtatggttatggtgcgatatttaactttattgggcttgttgtcactgctatcatccaagggcccagtagttttaacattctagaaggccactcaaaggccacgatgtttcttatctgcaacaatgctgcacagggcatattatcatcatttttcttcaagtatgcagatacaattttgaagaagtactcatcaacaattgcgactatcttcaccggagtagcctctgctgtgctgtttggccacacactgacgataaattttgttcttggaatttcaatagtaatcatatctatgcatcagtatctttctaaccaaattaaggacgaagtgcctagcagcaaagttgaaatggctgaagctcatgatcacagaaaagaacctagttatgtcaacgtgcctgattcaggggcaagtgagtctaaacaccgccatggatctgacgagaggcagccacttcttcccgtatgattttgtagaaggcgcactgtttcctcaacagagcagcatgtaaagagagtatttttagcgggtatttgacctaattgtctctgaagcaacattggtgccatgctgttggcggggtaaagtatatgcatattcggcggcagtgacgagcttcgtgaagtacactaatagagtaatggtctttggatgaatgagtcgatacctttagcctaatgggtggtaaaactagtgtgataagatcagcgaggaataaagtcaccaccattttttcctgtcttgtgagttggtgagttgatattgatacagccatcagccgtggttctactctctctctctctttctcgcggcaccatgtaaatagaaatatcagttcatttctgatggcgcgtgccacggtgccaaccagagattttattcttgtatgtgcgtgttgcatgagagatactacggcgtgtttactgatcactgagctttgcatgtcttctgaattacagcaaaacgcctaattggtactccattagtgttttgcatgtctt

SEQ ID NO: 77955 - DNA, 1797 bp, Zea Mays
ctctccctctccgctccccattgccgcattgctctccctcggctcggtccctctccggctctccctcacggcctcgcccactgcgccttcgaggagctccgaatcccgatcgcctcggtccccgcgagctcacatggtgggggcgcgcaccagaggctagggttcccagttcccatcattctcctggaatgaacggggaggtggaatgcagcgtgtgccatgcgaaggtgccggtgccgccgccggtgtcgaaagcgtacgacagccaccggagcactgtgtcgtcgcggcaacgtgcgctaaacgtgctcctcgtctccggcgactgcgtccttgccggcctccagcctatattagtgtacatctcaaaagtggatgggaaattcaaatttagcccaatcagcgtgaatttcttgacagagattacaaaaattatgtttaccattgtaatgctattcatccaggctagacgtctaaaggtgggagacaagccactttttacagtttcaatatttatgcaggctgctcgcaataatgttcttctttcagtacctgcttttctctatgctatcaacaactatttgaagttcataatgcagttatattttaatcctgctagcgtgaaaatgctgagtaatctcaaggttctggtaatcgcagtgcttcttaagatgataatgaggaggcgattttccgtaatccaggtaacagttcccgcattggcttcagtttacaacgaaaaggctcttaaaagccagtttgataccagtatttaccttcagaacttgtttctgtatggttatggtgcgatatttaactttattgggcttgttgtcactgctatcatccaagggcccagtagttttaacattctagaaggccactcaaaggccacgatgtttcttatctgcaacaatgctgcacagggcatattatcatcatttttcttcaagtatgcagatacaattttgaagaagtactcatcaacaattgcgactatcttcaccggagtagcctctgctgtgctgtttggccacacactgacgataaattttgttcttggaatttcaatagtaatcatatctatgcatcagtatctttctaaccaaattaaggacgaagtgcctagcagcaaagttgaaatggctgaagctcatgatcacagaaaagaacctagttatgtcaacgtgcctgattcaggggcaagtgagtctaaacaccgccatggatctgacgagaggcagccacttcttcccgtatgattttgtagaagaggcgcactgtttcctcaacagagcagcatgtaaagagagtatttttagcgggtatttgacctaattgtctctgaagcaacattggtgccatgctgttggcggggtaaagtatatgcatattcggcggcagtgacgagcttcgtgaagtacactaatagagtaatggtctttggatgaatgagtcgatacctttagcctaatgggtggtaaaactagtgtgataagatcagcgaggaataaagtcaccaccattttttcctgtcttgtgagttggtgagttgatattgatacagccatcagccgtggttctactctctctctctctttctcgcggcaccatgtaaatagaaatatcagttcatttctgatggcgcgtgccacggtgccaaccagagattttattcttgtatgtgcgtgttgcatgagagatactacggcgtgtttactgatcactgagctttgcatgtcttctgaattacagcaaaacgcctaattggtactccattagtgttttgcatgtctt

SEQ ID NO: 77956 - DNA, 1966 bp, Zea Mays
ctctccctctccgctccccattgccgcattgctctccctcggctcggtccctctccggctctccctcacggcctcgcccactgcgccttcgaggagctccgaatcccgatcgcctcggtccccgcgagctcacatggtgggggcgcgcaccagaggctagggttcccagttcccatcattctcctgctgattaaaaccgtggggttttggagagcctgaggctgtggcggcggcaggaatgaacggggaggtggaatgcagcgtgtgccatgcgaaggtgccggtgccgccgccggtgtcgaaagcgtacgacagccaccggagcactgtgtcgtcgcggcaacgtgcgctaaacgtgctcctcgtctccggcgactgcgtccttgccggcctccagcctatattagtgtacatctcaaaagtggatgggaaattcaaatttagcccaatcagcgtgaatttcttgacagagattacaaaaattatgtttaccattgtaatgctattcatccaggctagacgtctaaaggtgggagacaagccactttttacagtttcaatatttatgcaggctgctcgcaataatgttcttctttcagtacctgcttttctctatgctatcaacaactatttgaagttcataatgcagttatattttaatcctgctagcgtgaaaatgctgagtaatctcaaggttctggtaatcgcagtgcttcttaagatgataatgaggaggcgattttccgtaatccagtgggaggcccttgcccttttgttaatcggaatatctgttaatcagctgaaatcattgccagaaggttctagtgtgctaggtcttcctgttgcagctggagcctacctatatacattgttttttttcccgcattggcttcagtttacaacgaaaaggctcttaaaagccagtttgataccagtatttaccttcagaacttgtttctgtatggttatggtgcgatatttaactttattgggcttgttgtcactgctatcatccaagggcccagtagttttaacattctagaaggccactcaaaggccacgatgtttcttatctgcaacaatgctgcacagggcatattatcatcatttttcttcaagtatgcagatacaattttgaagaagtactcatcaacaattgcgactatcttcaccggagtagcctctgctgtgctgtttggccacacactgacgataaattttgttcttggaatttcaatagtaatcatatctatgcatcagtatctttctaaccaaattaaggacgaagtgcctagcagcaaagttgaaatggctgaagctcatgatcacagcagaaaagaacctagttatgtcaacgtgcctgattcaggggcaagtgagtctaaacaccgccatggatctgacgagaggcagccacttcttcccgtatgattttgtagaagaggcgcactgtttcctcaacagagcagcatgtaaagagagtatttttagcgggtatttgacctaattgtctctgaagcaacattggtgccatgctgttggcggggtaaagtatatgcatattcggcggcagtgacgagcttcgtgaagtacactaatagagtaatggtctttggatgaatgagtcgatacctttagcctaatgggtggtaaaactagtgtgataagatcagcgaggaataaagtcaccaccattttttcctgtcttgtgagttggtgagttgatattgatacagccatcagccgtggttctactctctctctctctttctcgcggcaccatgtaaatagaaatatcagttcatttctgatggcgcgtgccacggtgccaaccagagattttattcttgtatgtgcgtgttgcatgagagatactacggcgtgtttactgatcactgagctttgcatgtcttctgaattacagcaaaacgcctaattggtactccattagtgttttgcatgtctt

SEQ ID NO: 77957 - DNA, 1951 bp, Zea Mays
cctctccctctccgctccccattgccgcattgctctccctcggctcggtccctctccggctctccctcacggcctcgcccactgcgccttcgaggagctccgaatcccgatcgcctcggtccccgcgagctcacatggtgggggcgcgcaccagaggctagggttcccagttcccatcattctcctgctgattaaaaccgtggggttttggagagcctgaggctgtggcggcggcaggaatgaacggggaggtggaatgcagcgtgtgccatgcgaaggtgccggtgccgccgccggtgtcgaaagcgtacgacagccaccggagcactgtgtcgtcgcggcaacgtgcgctaaacgtgctcctcgtctccggcgactgcgtccttgccggcctccagcctatattagtgtacatctcaaaagtggatgggaaattcaaatttagcccaatcagcgtgaatttcttgacagagattacaaaaattatgtttaccattgtaatgctattcatccaggctagacgtctaaaggtgggagacaagccactttttacagtttcaatatttatgcaggctgctcgcaataatgttcttctttcagtacctgcttttctctatgctatcaacaactatttgaagttcataatgcagttatattttaatcctgctagcgtgaaaatgctgagtaatctcaaggttctggtaatcgcagtgcttcttaagatgataatgaggaggcgattttccgtaatccagtgggaggcccttgcccttttgttaatcggaatatctgttaatcagctgaaatcattgccagaaggttctagtgtgctaggtcttcctgttgcagctggagcctacctatatacattgttttttgtaacagttcccgcattggcttcagtttacaacgaaaaggctcttaaaagccagtttgataccagtatttaccttcagaacttgtttctgtatggttatggtgcgatatttaactttattgggcttgttgtcactgctatcatccaagggcccagtagttttaacattctagaaggccactcaaaggccacgatgtttcttatctgcaacaatgctgcacagggcatattatcatcatttttcttcaagtatgcagatacaattttgaagaagtactcatcaacaattgcgactatcttcaccggagtagcctctgctgtgctgtttggccacacactgacgataaattttgttcttggaatttcaatagtaatcatatctatgcatcagtatctttctaaccaaattaaggacgaagtgcctagcagcaaagttgaaatggctgaagctcatgatcacagaaaagaacctagttatgtcaacgtgcctgattcaggggcaagtgagtctaaacaccgccatggatctgacgagaggcagccacttcttcccgtatgattttgtagaagagagcagcatgtaaagagagtatttttagcgggtatttgacctaattgtctctgaagcaacattggtgccatgctgttggcggggtaaagtatatgcatattcggcggcagtgacgagcttcgtgaagtacactaatagagtaatggtctttggatgaatgagtcgatacctttagcctaatgggtggtaaaactagtgtgataagatcagcgaggaataaagtcaccaccattttttcctgtcttgtgagttggtgagttgatattgatacagccatcagccgtggttctactctctctctctctttctcgcggcaccatgtaaatagaaatatcagttcatttctgatggcgcgtgccacggtgccaaccagagattttattcttgtatgtgcgtgttgcatgagagatactacggcgtgtttactgatcactgagctttgcatgtcttctgaattacagcaaaacgcctaattggtactccattagtgttttgcatgtctt

SEQ ID NO: 77958 - DNA, 3921 bp, Zea Mays
acagcgactgcggtgaggcgaccgttgcggtgccgtgcattaaaccaccctgccccccctgtcccccgcccccctctgcccccgctcctcgccgtcggcacccgcacccgcgcggcacggcggcgtccggggtccggtgggctgggctgagtcgacgagcgcttgagctgagccgtcccagtgcgggggcgatcgcgtcgcctccggcctactccaggagcttcaactgatcgggcaatcggttgtcttcgtcccgcgttgaagtagattcggtcaaaaagtcaaaccgacgtgaggggaatttttctggtttggtttggtttggtttggtttggtctggatccgaaatgctgtgctggaaagcggttggtcagtaaatcgccgctgctaaagtttctgctccctgagctcagttggatcggagagttttagttcagtgtgcccatcctaaaacagggcgagttctgccgtgaatttgttggcttgtgttgtttgatcacaactgtattaaaaaaaaaggatcgatctttgcggctacaagagagtgacaacaaggaggcttggtcagctcgttcctttcacctgtttggcgagtgcttgaggaagaagacgacctgctcagctcctcctttggttgctcatcgaatcaaagaagactagggaaatgggggtaatgtcccggcgggttctgcccgcctgcagcagcctttgctacttctgcccatctctgcgggcgcgctctcggcagcctgtcaagcggtacaagaagatcatagcagatatctaccagctgcaaccggatggagagccaaatgatagaaggatcgggaaactctgtgattatgtctcgagaaatccaacacgcataccaaagatcacagagtatcttgaacagagattctataaagatctaaggcatgagaattttacgttggccaaagttgtgccatgcatctataggaaaattctatgttcatgcaaggagctcaggccattgctagccacaagctcattaagcaccattcgcactcttcttgatatgaaagcgcatgatgatctacaagttctgggttgtcttatgcttgttgacttcctgaatggccaggttgatagcacacatatgtttaatttggaaggcctcataccaaaactttgcaaaattggtcacgaattaagagaagatgatgaagggctccgtcttcgatctgcagctcttcaggctcttgcttctatggtccaatacatgggcgaccactcacacatttcaatggaacttgatgaagttgtctcagtgatcataagctgttacgaggctaatcaaacactctcaataaaagaggtagtcagatttcaagatgatgatgatttggtcattaatgggaacttggctgtgttaccagtgtctggacaaaatagtgccaaagtggcatctgatacaatgtctgcatctgaaaatccagcatactgggcaagggtttgcttgcgaaatatggctaatattgcaaaggaggccacaactgtgcggcgtattcttgaccctcttttccgcctttttgacagccacgactattggtctcctgaaagtgggattgccctttccgttctgcaagaaatgcagaaactgatggacaaatcaggtgcagcaattttcacccatggcaacatggtcatttgttgttatctttcactataaagcacatagaccataaaagtattgccaagaattctgtcaagcaaatcaatattgtaaaagttgcttcacatcttgcaaggcatgcaaagttgaaggcatcagtgacgatagcaagtgctatcagtgacttaataaagcacttgcgcaaatgtatgcattttgctattgaagcatctaatgcaaatgctgattgtgacaagtggtacagtgcactttatgtggccttggaggagtgcctagtgcagttgacagaaaaggttggggatgttggtcctattcttgatatggttggggtaatgcttgagaatctctctcatactgctaccatcgcaagaacaacaatttcatctgtttatcgcacatcacaaatagcagcatctgtctacaagtcatcataccatcagaaggcatttcctgaagctttatttcaccagcttctcttagcaatgttgcactcagacaataagacaaggattggttcacatcgtgttctatctaccattgtagcaccttcaatggcgtgtccatggtcggacatcagctttcctatcccaatgaagggtgatgattcacataacttgcatttgttggttctctcagctttctcttctgaggccataatcaatgaaacacggaccaaaaacaagatccaagaatccttgcaagaaaacaacaaatcagaagctatagtggatcctgagaatggatacacacagacagaaccagataaaaggaagtattcaggggggccatgtctaaatgagcattatcgtacagcttttaatgatgaaaacttaaagttcatgaagttgaacgaccaccagattgttctccttctttcatctatttggagtcaagcatctctggatgacaacttacctgcaaattttgaagcaatgggccttgtctacagcattgctttattatgttcaaaaccaaaaagctccagtcatgtgacacgtattcgttgtttccagttggcgttctctctcaggagaaactctcttagccctgaaagtgatttgaagccatctcgtagaaggtgtctgtatacgatggcatcagcgatgctcatcttttcagcaaaaattgctgatctccaccagataattcctcttgtgaaagccgcagcaccagagaaaatggttgatcctcatcttcgcttgatggatgactgccagcttgttaatacctctgcagagtcatctaacagcgagatggtttatggttccgaggaagatgaaagtgatgcactggcttttctttcagccatcaacaagcctgacacagagttaatagaaaccgtgatgtgccacttcagggagaagttcgaaaatttaccagagaaggttaacgggatagaagagcaacttcttcaagagttttccctggatgattcgtttcctcttggtgctccactattcatggagatgccacactcttgttcaatgtatgcagaaaaggatgaagaatgttttgacgaggacactgttccttctgagctagacgatgacgacatcatctttgagcatagtgggtctcaatctgaccggaaaacgtcaggttccatggcttcgtcagatgttctaactgtcaaccaactaatagaatctgttcatgagaccgcaaggcaagttgccaacgttccagttcccgccaaccctgtaccgtacgaccagatgaagagtcagtgcgaagccctggtcatggagaagcaacagaagatgtctgtcctcttgagcttgaagcattcgaggactgactcacatggttcagccggtgtggatgggcttgaaacgaatgagtcttctctgctgtctgagcctgagttacagtcaacaaggaaggggcgcatgcgccgctgcgattcagcgtccagcgaatctgactgttcgttcaggctgccacctgctagcccatatgacaagttcctgaaggcggctggacggtagcctgatgcggttgcggcagcttggcgcttcagttttcaactctctcaagtctgcatgagagttcagtacaagtgattcatcggcactctctcgttctcggagtccattctttcaagtgtatattatatttacatccctcgacacaaggtgtataaagttctgttactgtttccttcagaataaaccgaagtgtataggcactagcggatgatcatgttcaagacggtatttgttcatttgttgatcgtgaaaagaaaacattttacacaaatcatg

SEQ ID NO: 77959 - DNA, 3781 bp, Zea Mays
acagcgactgcggtgaggcgaccgttgcggtgccgtgcattaaaccaccctgccccccctgtcccccgcccccctctgcccccgctcctcgccgtcggcacccgcacccgcgcggcacggcggcgtccggggtccggtgggctgggctgagtcgacgagcgcttgagctgagccgtcccagtgcgggggcgatcgcgtcgcctccggcctactccaggagcttcaactgatcgggcaatcggttgtcttcgtcccgcgttgaagtagattcggtcaaaaagtcaaaccgacgtgaggggaatttttctggtttggtttggtttggtttggtttggtctggatccgaaatgctgtgctggaaagcggttggtcagtaaatcgccgctgctaaagtttctgctccctgagctcagttggatcggagagttttagttcagtgtgcccatcctaaaacagggcgagttctgccgtgaatttgttggcttgtgttgtttgatcacaactgtattaaaaaaaaaggatcgatctttgcggctacaagagagtgacaacaaggaggcttggtcagctcgttcctttcacctgtttggcgagtgcttgaggaagaagacgacctgctcagctcctcctttggttgctcatcgaatcaaagaagactagggaaatgggggtaatgtcccggcgggttctgcccgcctgcagcagcctttgctacttctgcccatctctgcgggcgcgctctcggcagcctgtcaagcggtacaagaagatcatagcagatatctaccagctgcaaccggatggagagccaaatgatagaaggatcgggaaactctgtgattatgtctcgagaaatccaacacgcataccaaagatcacagagtatcttgaacagagattctataaagatctaaggcatgagaattttacgttggccaaagttgtgccatgcatctataggaaaattctatgttcatgcaaggagctcaggccattgctagccacaagctcattaagcaccattcgcactcttcttgatatgaaagcgcatgatgatctacaagttctgggttgtcttatgcttgttgacttcctgaatggccaggttgatagcacacatatgtttaatttggaaggcctcataccaaaactttgcaaaattggtcacgaattaagagaagatgatgaagggctccgtcttcgatctgcagctcttcaggctcttgcttctatggtccaatacatgggcgaccactcacacatttcaatggaacttgatgaagttgtctcagtgatcataagctgttacgaggctaatcaaacactctcaataaaagaggtagtcagatttcaagatgatgatgatttggtcattaatgggaacttggctgtgttaccagtgtctggacaaaatagtgccaaagtggcatctgatacaatccacgactattggtctcctgaaagtgggattgccctttccgttctgcaagaaatgcagaaactgatggacaaatcagggcaacatggtcatttgttgttatctttcactataaagcacatagaccataaaagtattgccaagaattctgtcaagcaaatcaatattgtaaaagttgcttcacatcttgcaaggcatgcaaagttgaaggcatcagtgacgatagcaagtgctatcagtgacttaataaagcacttgcgcaaatgtatgcattttgctattgaagcatctaatgcaaatgctgattgtgacaagtggtacagtgcactttatgtggccttggaggagtgcctagtgcagttgacagaaaaggttggggatgttggtcctattcttgatatggttggggtaatgcttgagaatctctctcatactgctaccatcgcaagaacaacaatttcatctgtttatcgcacatcacaaatagcagcatctgtctacaagtcatcataccatcagaaggcatttcctgaagctttatttcaccagcttctcttagcaatgttgcactcagacaataagacaaggattggttcacatcgtgttctatctaccattgtagcaccttcaatggcgtgtccatggtcggacatcagctttcctatcccaatgaagggtgatgattcacataacttgcatttgttggttctctcagctttctcttctgaggccataatcaatgaaacacggaccaaaaacaagatccaagaatccttgcaagaaaacaacaaatcagaagctatagtggatcctgagaatggatacacacagacagaaccagataaaaggaagtattcaggggggccatgtctaaatgagcattatcgtacagcttttaatgatgaaaacttaaagttcatgaagttgaacgaccaccagattgttctccttctttcatctatttggagtcaagcatctctggatgacaacttacctgcaaattttgaagcaatgggccttgtctacagcattgctttattatgttcaaaaccaaaaagctccagtcatgtgacacgtattcgttgtttccagttggcgttctctctcaggagaaactctcttagccctgaaagtgatttgaagccatctcgtagaaggtgtctgtatacgatggcatcagcgatgctcatcttttcagcaaaaattgctgatctccaccagataattcctcttgtgaaagccgcagcaccagagaaaatggttgatcctcatcttcgcttgatggatgactgccagcttgttaatacctctgcagagtcatctaacagcgagatggtttatggttccgaggaagatgaaagtgatgcactggcttttctttcagccatcaacaagcctgacacagagttaatagaaaccgtgatgtgccacttcagggagaagttcgaaaatttaccagagaaggttaacgggatagaagagcaacttcttcaagagttttccctggatgattcgtttcctcttggtgctccactattcatggagatgccacactcttgttcaatgtatgcagaaaaggatgaagaatgttttgacgaggacactgttccttctgagctagacgatgacgacatcatctttgagcatagtgggtctcaatctgaccggaaaacgtcaggttccatggcttcgtcagatgttctaactgtcaaccaactaatagaatctgttcatgagaccgcaaggcaagttgccaacgttccagttcccgccaaccctgtaccgtacgaccagatgaagagtcagtgcgaagccctggtcatggagaagcaacagaagatgtctgtcctcttgagcttgaagcattcgaggactgactcacatggttcagccggtgtggatgggcttgaaacgaatgagtcttctctgctgtctgagcctgagttacagtcaacaaggaaggggcgcatgcgccgctgcgattcagcgtccagcgaatctgactgttcgttcaggctgccacctgctagcccatatgacaagttcctgaaggcggctggacggtagcctgatgcggttgcggcagcttggcgcttcagttttcaactctctcaagtctgcatgagagttcagtacaagtgattcatcggcactctctcgttctcggagtccattctttcaagtgtatattatatttacatccctcgacacaaggtgtataaagttctgttactgtttccttcagaataaaccgaagtgtataggcactagcggatgatcatgttcaagacggtatttgttcatttgttgatcgtgaaaagaaaacattttacacaaatcatg

SEQ ID NO: 77960 - DNA, 3863 bp, Zea Mays
ccggctacgagtatccagcagcaccagcagcgctccagcctccctccagggctccagcaagccgggccggtgaattaacagcgactgcggtgaggcgaccgttgcggtgccgtgcattaaaccaccctgccccccctgtcccccgcccccctctgcccccgctcctcgccgtcggcacccgcacccgcgcggcacggcggcgtccggggtccggtgggctgggctgagtcgacgagcgcttgagctgagccgtcccagtgcgggggcgatcgcgtcgcctccggcctactccaggagcttcaactgatcgggcaatcggttgtcttcgtcccgcgttgaagtagattcggtcaaaaagtcaaaccgacgtgaggggaatttttctggtttggtttggtttggtttggtttggtctggatccgaaatgctgtgctggaaagcggttggtcagtaaatcgccgctgctaaagtttctgctccctgagctcagttggatcggagagttttagttcagtgtgcccatcctaaaacagggcgagttctgccgtgaatttgttggcttgtgttgtttgatcacaactgtattaaaaaaaaaggatcgatctttgcggctacaagagagtgacaacaaggaggcttggtcagctcgttcctttcacctgtttggcgagtgcttgaggaagaagacgacctgctcagctcctcctttggttgctcatcgaatcaaagaagactagggaaatgggggtaatgtcccggcgggttctgcccgcctgcagcagcctttgctacttctgcccatctctgcgggcgcgctctcggcagcctgtcaagcggtacaagaagatcatagcagatatctaccagctgcaaccggatggagagccaaatgatagaaggatcgggaaactctgtgattatgtctcgagaaatccaacacgcataccaaagatcacagagtatcttgaacagagattctataaagatctaaggcatgagaattttacgttggccaaagttgtgccatgcatctataggaaaattctatgttcatgcaaggagctcaggccattgctagccacaagctcattaagcaccattcgcactcttcttgatatgaaagcgcatgatgatctacaagttctgggttgtcttatgcttgttgacttcctgaatggccaggttgatagcacacatatgtttaatttggaaggcctcataccaaaactttgcaaaattggtcacgaattaagagaagatgatgaagggctccgtcttcgatctgcagctcttcaggctcttgcttctatggtccaatacatgggcgaccactcacacatttcaatggaacttgatgaagttgtctcagtgatcataagctgttacgaggctaatcaaacactctcaataaaagaggtagtcagatttcaagatgatgatgatttggtcattaatgggaacttggctgtgttaccagtgtctggacaaaatagtgccaaagtggcatctgatacaatgtctgcatctgaaaatccagcatactgggcaagggtttgcttgcgaaatatggctaatattgcaaaggaggccacaactgtgcggcgtattcttgaccctcttttccgcctttttgacagccacgactattggtctcctgaaagtgggattgccctttccgttctgcaagaaatgcagaaactgatggacaaatcaggcatgcaaagttgaaggcatcagtgacgatagcaagtgctatcagtgacttaataaagcacttgcgcaaatgtatgcattttgctattgaagcatctaatgcaaatgctgattgtgacaagtggtacagtgcactttatgtggccttggaggagtgcctagtgcagttgacagaaaaggttggggatgttggtcctattcttgatatggttggggtaatgcttgagaatctctctcatactgctaccatcgcaagaacaacaatttcatctgtttatcgcacatcacaaatagcagcatctgtctacaagtcatcataccatcagaaggcatttcctgaagctttatttcaccagcttctcttagcaatgttgcactcagacaataagacaaggattggttcacatcgtgttctatctaccattgtagcaccttcaatggcgtgtccatggtcggacatcagctttcctatcccaatgaagggtgatgattcacataacttgcatttgttggttctctcagctttctcttctgaggccataatcaatgaaacacggaccaaaaacaagatccaagaatccttgcaagaaaacaacaaatcagaagctatagtggatcctgagaatggatacacacagacagaaccagataaaaggaagtattcaggggggccatgtctaaatgagcattatcgtacagcttttaatgatgaaaacttaaagttcatgaagttgaacgaccaccagattgttctccttctttcatctatttggagtcaagcatctctggatgacaacttacctgcaaattttgaagcaatgggccttgtctacagcattgctttattatgttcaaaaccaaaaagctccagtcatgtgacacgtattcgttgtttccagttggcgttctctctcaggagaaactctcttagccctgaaagtgatttgaagccatctcgtagaaggtgtctgtatacgatggcatcagcgatgctcatcttttcagcaaaaattgctgatctccaccagataattcctcttgtgaaagccgcagcaccagagaaaatggttgatcctcatcttcgcttgatggatgactgccagcttgttaatacctctgcagagtcatctaacagcgagatggtttatggttccgaggaagatgaaagtgatgcactggcttttctttcagccatcaacaagcctgacacagagttaatagaaaccgtgatgtgccacttcagggagaagttcgaaaatttaccagagaaggttaacgggatagaagagcaacttcttcaagagttttccctggatgattcgtttcctcttggtgctccactattcatggagatgccacactcttgttcaatgtatgcagaaaaggatgaagaatgttttgacgaggacactgttccttctgagctagacgatgacgacatcatctttgagcatagtgggtctcaatctgaccggaaaacgtcaggttccatggcttcgtcagatgttctaactgtcaaccaactaatagaatctgttcatgagaccgcaaggcaagttgccaacgttccagttcccgccaaccctgtaccgtacgaccagatgaagagtcagtgcgaagccctggtcatggagaagcaacagaagatgtctgtcctcttgagcttgaagcattcgaggactgactcacatggttcagccggtgtggatgggcttgaaacgaatgagtcttctctgctgtctgagcctgagttacagtcaacaaggaaggggcgcatgcgccgctgcgattcagcgtccagcgaatctgactgttcgttcaggctgccacctgctagcccatatgacaagttcctgaaggcggctggacggtagcctgatgcggttgcggcagcttggcgcttcagttttcaactctctcaagtctgcatgagagttcagtacaagtgattcatcggcactctctcgttctcggagtccattctttcaagtgtatattatatttacatccctcgacacaaggtgtataaagttctgttactgtttccttcagaataaaccgaagtgtataggcactagcggatgatcatgttcaagacggtatttgttcatttgttgatcgtgaaaagaaaacattttacacaaatcatg

SEQ ID NO: 77961 - DNA, 1867 bp, Zea Mays
ctgagtttcgaattggtgtgtggattccactgtttgatcgagggagcgagaagagagggaggcaaaggagacaacatatgggatgtatttacagatgacaaagaacgtgtcttagacagaagcaatgcagaaattgcagttgaccactaccatcgatacaaggaagacattgagctcatggcaagtctaggttttagcgcatacagattttctatatcttgggcacgtatatttcctgatggcttgggggaaaaggtcaatgagcaaggagtcgccttctataatgacctcatcaactttatgatttcgaaaggtattgagccttacgcaacactgtatcattgggatcttccaaacaatcttcaaaaaactctggggggctggatttctgacaagattgtgtaagccactgcaggcatcttaagcgtgtagtatgaatgtatgattaccgaagttttcttaacacgcaaatgaatggttacatatgagattcttctcgactcaacctttttgtttcaaaagtgtttgcagcttgatttgctgtttttacgagtttctcaccataaaaatatcctagggagtactttgcattgtatgcagaagcttgctttgcaaatttcggagatagagtaaagcgttggataacaatcaatgaacctctccaaaccgcaatcaacggttatgggattggaatttttgcgcctggaggatgccaaggtgaaactgcaagatgttacttggccgcccatcaccaaatcttggctcatgctgctgctgttgatgtttatagaagaaaattcaaggctgcacaaagtggtgaagtaggcttggttgttgactgtgaatgggcagagccattttctgaaaaactcgaagaccaaattgctgcgcaacggaggattgactttcaacttggatggtacctagatccaatatattttggtgattacccagaaagcatgcgtcagcgactgggcagtgatcttccaaccttctcagagaaagataaaaaattcatcaagaacaaaattgattttattggactaaatcattatacttcgaggctcattgctcatcaccaaaatcctgatgatgtttatttctacaaagtgcaacaaatggagagagtagaaaaatggagtagtggtgaaagcattggtgaaagggctgcatctgaatggcttgtcatagttccttggggccttcacaaattgcttaactatatagtgaagaaatacaacaacccagtaatttatgttactgagaatggcatggatgatgaagacgatcagtccgcgacgattgaccaggtcctaaacgacacgaagagagtcggctacttcaaaggatacctcaattcggttgcacaggcgatcaaggacggggctgatgtccgtgggtacttcgcgtggtcattcctggacaacttcgagtgggctatgggctacaccaagaggttcggcatagtctacgtcgattacaaggacgggctctccaggcaccccaaggcatcggccctctggttctcgcgcctcctcaagggcgaggctgccgaaaacagctatagctagagctgccacagactgagggaacagtccgcggcaagtacagaaacattacacacatttctcctgttgttgtgtcttgttgttgtgtcttaaaggtgagtgcacctatgtatgtatgtatgtatgtatgtatgtatgtatgtatgtatgtatgtatatatgtattcatcctaataatctcaggatgtgctagtctgtcgttgatgcgacgctggctgagatgtgttctccaagaacaagaacaaccagaacctcagcaccaaataagctttgaatccatgtgttggacaccaaaatga

SEQ ID NO: 77962 - DNA, 1844 bp, Zea Mays
gcgaatatctctgcggcaagcccacgcttcggagtggacgtcaggcgcgctcgccagccccccacaccaccaccaccaccacaaccccaccaagctcacgtttccgaattcaccaactcctgcacgccgcgtcgagatcgttcacgccttagcttcgggaactccaccaataagcccaccggctggagcaatggggagcacggggcgcgagccggaggtgacccgcgccaacttccccgacggcttcgtcttcggcgtcgccacctccgcgtaccagatcgagggagcgagaagagagggaggcaaaggagacaacatatgggatgtatttacagatgacaaagaacgtgtcttagacagaagcaatgcagaaattgcagttgaccactaccatcgatacaaggaagacattgagctcatggcaagtctaggttttagcgcatacagattttctatatcttgggcacgtatatttcctgatggcttgggggaaaaggtcaatgagcaaggagtcgccttctataatgacctcatcaactttatgatttcgaaagggagtactttgcattgtatgcagaagcttgctttgcaaatttcggagatagagtaaagcgttggataacaatcaatgaacctctccaaaccgcaatcaacggttatgggattggaatttttgcgcctggaggatgccaaggtgaaactgcaagatgttacttggccgcccatcaccaaatcttggctcatgctgctgctgttgatgtttatagaagaaaattcaaggctgcacaaagtggtgaagtaggcttggttgttgactgtgaatgggcagagccattttctgaaaaactcgaagaccaaattgctgcgcaacggaggattgactttcaacttggatggtacctagatccaatatattttggtgattacccagaaagcatgcgtcagcgactgggcagtgatcttccaaccttctcagagaaagataaaaaattcatcaagaacaaaattgattttattggactaaatcattatacttcgaggctcattgctcatcaccaaaatcctgatgatgtttatttctacaaagtgcaacaaatggagagagtagaaaaatggagtagtggtgaaagcattggtgaaagggctgcatctgaatggcttgtcatagttccttggggccttcacaaattgcttaactatatagtgaagaaatacaacaacccagtaatttatgttactgagaatggcatggatgatgaagacgatcagtccgcgacgattgaccaggtcctaaacgacacgaagagagtcggctacttcaaaggatacctcaattcggttgcacaggcgatcaaggacggggctgatgtccgtgggtacttcgcgtggtcattcctggacaacttcgagtgggctatgggctacaccaagaggttcggcatagtctacgtcgattacaaggacgggctctccaggcaccccaaggcatcggccctctggttctcgcgcctcctcaagggcgaggctgccgaaaacagctatagctagagctgccacagactgagggaacagtccgcggcaagtacagaaacattacacacatttctcctgttgttgtgtcttgttgttgtgtcttaaaggtgagtgcacctatgtatgtatgtatgtatgtatgtatgtatgtatgtatgtatgtatgtatatatgtattcatcctaataatctcaggatgtgctagtctgtcgttgatgcgacgctggctgagatgtgttctccaagaacaagaacaaccagaacctcagcaccaaataagctttgaatccatgtgttggacaccaaaatga

SEQ ID NO: 77963 - DNA, 1795 bp, Zea Mays
accctgcgctctcgccggccggggctataagtggtcagcgaatatctctgcggcaagcccacgcttcggagtggacgtcaggcgcgctcgccagccccccacaccaccaccaccaccacaaccccaccaagctcacgtttccgaattcaccaactcctgcacgccgcgtcgagatcgttcacgccttagcttcgggaactccaccaataagcccaccggctggagcaatggggagcacggggcgcgagccggaggtgacccgcgccaacttccccgacggcttcgtcttcggcgtcgccacctccgcgtaccagatcgagggagcgagaagagagggaggcaaaggagacaacatatgggatgtatttacagatgacaaagaacgtgtcttagacagaagcaatgcagaaattgcagttgaccactaccatcgatacaaggaagacattgagctcatggcaagtctaggttttagcgcatacagattttctatatcttgggcacgtatatttcctgatggcttgggggaaaaggtcaatgagcaaggagtcgccttctataatgacctcatcaactttatgatttcgaaaggtattgagccttacgcaacactgtatcattgggatcttccaaacaatcttcaaaaaactctggggggctggatttctgacaagattgtgtaagccactgcaggcatcttaagcgtgtagtatgaatgtatgattaccgaagttttcttaacacgcaaatgaatggttacatatgagattcttctcgactcaacctttttgtttcaaaagtgtttgcagcttgatttgctgtttttacgagtttctcaccataaaaatatcctagggagtactttgcattgtatgcagaagcttgctttgcaaatttcggagatagagtaaagcgttggataacaatcaatgaacctctccaaaccgcaatcaacggttatgggattggaatttttgcgcctggaggatgccaaggtgaaactgcaagatgttacttggccgcccatcaccaaatcttggctcatgctgctgctgttgatgtttatagaagaaaattcaaggctgcacaaagtggtgaagtaggcttggttgttgactgtgaatgggcagagccattttctgaaaaactcgaagaccaaattgctgcgcaacggaggattgactttcaacttggatggcatggatgatgaagacgatcagtccgcgacgattgaccaggtcctaaacgacacgaagagagtcggctacttcaaaggatacctcaattcggttgcacaggcgatcaaggacggggctgatgtccgtgggtacttcgcgtggtcattcctggacaacttcgagtgggctatgggctacaccaagaggttcggcatagtctacgtcgattacaaggacgggctctccaggcaccccaaggcatcggccctctggttctcgcgcctcctcaagggcgaggctgccgaaaacagctatagctagagctgccacagactgagggaacagtccgcggcaagtacagaaacattacacacatttctcctgttgttgtgtcttgttgttgtgtcttaaaggtgagtgcacctatgtatgtatgtatgtatgtatgtatgtatgtatgtatgtatgtatgtatatatgtattcatcctaataatctcaggatgtgctagtctgtcgttgatgcgacgctggctgagatgtgttctccaagaacaagaacaaccagaacctcagcaccaaataagctttgaatccatgtgttggacaccaaaatga

SEQ ID NO: 77964 - DNA, 1757 bp, Zea Mays
accctgcgctctcgccggccggggctataagtggtcagcgaatatctctgcggcaagcccacgcttcggagtggacgtcaggcgcgctcgccagccccccacaccaccaccaccaccacaaccccaccaagctcacgtttccgaattcaccaactcctgcacgccgcgtcgagatcgttcacgccttagcttcgggaactccaccaataagcccaccggctggagcaatggggagcacggggcgcgagccggaggtgacccgcgccaacttccccgacggcttcgtcttcggcgtcgccacctccgcgtaccagatcgagggagcgagaagagagggaggcaaaggagacaacatatgggatgtatttacagatgacaaagaacgtgtcttagacagaagcaatgcagaaattgcagttgaccactaccatcgatacaaggaagacattgagctcatggcaagtctaggttttagcgcatacagattttctatatcttgggcacgtatatttcctgatggcttgggggaaaaggtcaatgagcaaggagtcgccttctataatgacctcatcaactttatgatttcgaaaggtattgagccttacgcaacactgtatcattgggatcttccaaacaatcttcaaaaaactctggggggctggatttctgacaagattgtggagtactttgcattgtatgcagaagcttgctttgcaaatttcggagatagagtaaagcgttggataacaatcaatgaacctctccaaaccgcaatcaacggttatgggattggaatttttgcgcctggaggatgccaaggtgaaactgcaagatgttacttggccgcccatcaccaaatcttggctcatgctgctgctgttgatgtttatagaagaaaattcaaggctgcacaaagtggtgaagtaggcttggttgttgactgtgaatgggcagagccattttctgaaaaactcgaagaccaaattgctgcgcaacggaggattgactttcaacttggatgaaaaatggagtagtggtgaaagcattggtgaaagggctgcatctgaatggcttgtcatagttccttggggccttcacaaattgcttaactatatagtgaagaaatacaacaacccagtaatttatgttactgagaatggcatggatgatgaagacgatcagtccgcgacgattgaccaggtcctaaacgacacgaagagagtcggctacttcaaaggatacctcaattcggttgcacaggcgatcaaggacggggctgatgtccgtgggtacttcgcgtggtcattcctggacaacttcgagtgggctatgggctacaccaagaggttcggcatagtctacgtcgattacaaggacgggctctccaggcaccccaaggcatcggccctctggttctcgcgcctcctcaagggcgaggctgccgaaaacagctatagctagagctgccacagactgagggaacagtccgcggcaagtacagaaacattacacacatttctcctgttgttgtgtcttgttgttgtgtcttaaaggtgagtgcacctatgtatgtatgtatgtatgtatgtatgtatgtatgtatgtatgtatgtatatatgtattcatcctaataatctcaggatgtgctagtctgtcgttgatgcgacgctggctgagatgtgttctccaagaacaagaacaaccagaacctcagcaccaaataagctttgaatccatgtgttggacaccaaaatga

SEQ ID NO: 77965 - DNA, 2190 bp, Zea Mays
accactccagacagtgacacagggacacacgccggcgtggctgctcacgtgttctcagttctcaccctgcgctctcgccggccggggctataagtggtcagcgaatatctctgcggcaagcccacgcttcggagtggacgtcaggcgcgctcgccagccccccacaccaccaccaccaccacaaccccaccaagctcacgtttccgaattcaccaactcctgcacgccgcgtcgagatcgttcacgccttagcttcgggaactccaccaataagcccaccggctggagcaatggggagcacggggcgcgagccggaggtgacccgcgccaacttccccgacggcttcgtcttcggcgtcgccacctccgcgtaccagatcgagggagcgagaagagagggaggcaaaggagacaacatatgggatgtatttacagatgacaaagaacgtgtcttagacagaagcaatgcagaaattgcagttgaccactaccatcgatacaaggaagacattgagctcatggcaagtctaggttttagcgcatacagattttctatatcttgggcacgtatatttcctgatggcttgggggaaaaggtcaatgagcaaggagtcgccttctataatgacctcatcaactttatgatttcgaaaggtattgagccttacgcaacactgtatcattgggatcttccaaacaatcttcaaaaaactctggggggctggatttctgacaagattgtggagtactttgcattgtatgcagaagcttgctttgcaaatttcggagatagagtaaagcgttggataacaatcaatgaacctctccaaaccgcaatcaacggttatgggattggaatttttgcgcctggaggatgccaaggtgaaactgcaagatgttacttggccgcccatcaccaaatcttggctcatgctgctgctgttgatgtttatagaagaaaattcaaggctgcacaaagtggtgaagtaggcttggttgttgactgtgaatgggcagagccattttctgaaaaactcgaagaccaaattgctgcgcaacggaggattgactttcaacttggatggtacctagatccaatatattttggtgattacccagaaagcatgcgtcagcgactgggcagtgatcttccaaccttctcagagaaagataaaaaattcatcaagaacaaaattgattttattggactaaatcattatacttcgaggctcattgctcatcaccaaaatcctgatgatgtttatttctacaaagtgcaacaaatggagagagtaggaatacattctggaagaaattagtggtcaaagatgtgcatcaaagaacgtccaaagtcaaatgtggaaagtatttttgaccagagggagtaacaagtaaattgacgaaattcacatccctcaacttcttgggtctgaaacatttgttagggatgtaagaaaaatggagtagtggtgaaagcattggtgaaagggctgcatctgaatggcttgtcatagttccttggggccttcacaaattgcttaactatatagtgaagaaatacaacaacccagtaatttatgttactgagaatggcatggatgatgaagacgatcagtccgcgacgattgaccaggtcctaaacgacacgaagagagtcggctacttcaaaggatacctcaattcggttgcacaggcgatcaaggacggggctgatgtccgtgggtacttcgcgtggtcattcctggacaacttcgagtgggctatgggctacaccaagaggttcggcatagtctacgtcgattacaaggacgggctctccaggcaccccaaggcatcggccctctggttctcgcgcctcctcaagggcgaggctgccgaaaacagctatagctagagctgccacagactgagggaacagtccgcggcaagtacagaaacattacacacatttctcctgttgttgtgtcttgttgttgtgtcttaaaggtgagtgcacctatgtatgtatgtatgtatgtatgtatgtatgtatgtatgtatgtatgtatatatgtattcatcctaataatctcaggatgtgctagtctgtcgttgatgcgacgctggctgagatgtgttctccaagaacaagaacaaccagaacctcagcaccaaataagctttgaatccatgtgttggacaccaaaatga

SEQ ID NO: 77966 - DNA, 2137 bp, Zea Mays
ggatctgccgcgcccccgctctcctctggctcgctcgcgttctcgcgtacaccactccagacagtgacacagggacacacgccggcgtggctgctcacgtgttctcagttctcaccctgcgctctcgccggccggggctataagtggtcagcgaatatctctgcggcaagcccacgcttcggagtggacgtcaggcgcgctcgccagccccccacaccaccaccaccaccacaaccccaccaagctcacgtttccgaattcaccaactcctgcacgccgcgtcgagatcgttcacgccttagcttcgggaactccaccaataagcccaccggctggagcaatggggagcacggggcgcgagccggaggtgacccgcgccaacttccccgacggcttcgtcttcggcgtcgccacctccgcgtaccagatcgagggagcgagaagagagggaggcaaaggagacaacatatgggatgtatttacagatgacaaagaacgtgtcttagacagaagcaatgcagaaattgcagttgaccactaccatcgatacaaggaagacattgagctcatggcaagtctaggttttagcgcatacagattttctatatcttgggcacgtatatttcctgatggcttgggggaaaaggtcaatgagcaaggagtcgccttctataatgacctcatcaactttatgatttcgaaaggtattgagccttacgcaacactgtatcattgggatcttccaaacaatcttcaaaaaactctggggggctggatttctgacaagattgttgtttgcagcttgatttgctgtttttacgagtttctcaccataaaaatatcctagggagtactttgcattgtatgcagaagcttgctttgcaaatttcggagatagagtaaagcgttggataacaatcaatgaacctctccaaaccgcaatcaacggttatgggattggaatttttgcgcctggaggatgccaaggtgaaactgcaagatgttacttggccgcccatcaccaaatcttggctcatgctgctgctgttgatgtttatagaagaaaattcaaggctgcacaaagtggtgaagtaggcttggttgttgactgtgaatgggcagagccattttctgaaaaactcgaagaccaaattgctgcgcaacggaggattgactttcaacttggatggtacctagatccaatatattttggtgattacccagaaagcatgcgtcagcgactgggcagtgatcttccaaccttctcagagaaagataaaaaattcatcaagaacaaaattgattttattggactaaatcattatacttcgaggctcattgctcatcaccaaaatcctgatgatgtttatttctacaaagtgcaacaaatggagagagtagaaaaatggagtagtggtgaaagcattggtgaaagggctgcatctgaatggcttgtcatagttccttggggccttcacaaattgcttaactatatagtgaagaaatacaacaacccagtaatttatgttactgagaatggcatggatgatgaagacgatcagtccgcgacgattgaccaggtcctaaacgacacgaagagagtcggctacttcaaaggatacctcaattcggttgcacaggcgatcaaggacggggctgatgtccgtgggtacttcgcgtggtcattcctggacaacttcgagtgggctatgggctacaccaagaggttcggcatagtctacgtcgattacaaggacgggctctccaggcaccccaaggcatcggccctctggttctcgcgcctcctcaagggcgaggctgccgaaaacagctatagctagagctgccacagactgagggaacagtccgcggcaagtacagaaacattacacacatttctcctgttgttgtgtcttgttgttgtgtcttaaaggtgagtgcacctatgtatgtatgtatgtatgtatgtatgtatgtatgtatgtatgtatgtatatatgtattcatcctaataatctcaggatgtgctagtctgtcgttgatgcgacgctggctgagatgtgttctccaagaacaagaacaaccagaacctcagcaccaaataagctttgaatccatgtgttggacaccaaaatga

SEQ ID NO: 77967 - DNA, 2059 bp, Zea Mays
ggatctgccgcgcccccgctctcctctggctcgctcgcgttctcgcgtacaccactccagacagtgacacagggacacacgccggcgtggctgctcacgtgttctcagttctcaccctgcgctctcgccggccggggctataagtggtcagcgaatatctctgcggcaagcccacgcttcggagtggacgtcaggcgcgctcgccagccccccacaccaccaccaccaccacaaccccaccaagctcacgtttccgaattcaccaactcctgcacgccgcgtcgagatcgttcacgccttagcttcgggaactccaccaataagcccaccggctggagcaatggggagcacggggcgcgagccggaggtgacccgcgccaacttccccgacggcttcgtcttcggcgtcgccacctccgcgtaccagatcgagggagcgagaagagagggaggcaaaggagacaacatatgggatgtatttacagatgacaaagaacgtgtcttagacagaagcaatgcagaaattgcagttgaccactaccatcgatacaaggaagacattgagctcatggcaagtctaggttttagcgcatacagattttctatatcttgggcacgtatatttcctgatggcttgggggaaaaggtcaatgagcaaggagtcgccttctataatgacctcatcaactttatgatttcgaaaggtattgagccttacgcaacactgtatcattgggatcttccaaacaatcttcaaaaaactctggggggctggatttctgacaagattgtaagcttgctttgcaaatttcggagatagagtaaagcgttggataacaatcaatgaacctctccaaaccgcaatcaacggttatgggattggaatttttgcgcctggaggatgccaaggtgaaactgcaagatgttacttggccgcccatcaccaaatcttggctcatgctgctgctgttgatgtttatagaagaaaattcaaggctgcacaaagtggtgaagtaggcttggttgttgactgtgaatgggcagagccattttctgaaaaactcgaagaccaaattgctgcgcaacggaggattgactttcaacttggatggtacctagatccaatatattttggtgattacccagaaagcatgcgtcagcgactgggcagtgatcttccaaccttctcagagaaagataaaaaattcatcaagaacaaaattgattttattggactaaatcattatacttcgaggctcattgctcatcaccaaaatcctgatgatgtttatttctacaaagtgcaacaaatggagagagtagaaaaatggagtagtggtgaaagcattggtgaaagggctgcatctgaatggcttgtcatagttccttggggccttcacaaattgcttaactatatagtgaagaaatacaacaacccagtaatttatgttactgagaatggcatggatgatgaagacgatcagtccgcgacgattgaccaggtcctaaacgacacgaagagagtcggctacttcaaaggatacctcaattcggttgcacaggcgatcaaggacggggctgatgtccgtgggtacttcgcgtggtcattcctggacaacttcgagtgggctatgggctacaccaagaggttcggcatagtctacgtcgattacaaggacgggctctccaggcaccccaaggcatcggccctctggttctcgcgcctcctcaagggcgaggctgccgaaaacagctatagctagagctgccacagactgagggaacagtccgcggcaagtacagaaacattacacacatttctcctgttgttgtgtcttgttgttgtgtcttaaaggtgagtgcacctatgtatgtatgtatgtatgtatgtatgtatgtatgtatgtatgtatgtatatatgtattcatcctaataatctcaggatgtgctagtctgtcgttgatgcgacgctggctgagatgtgttctccaagaacaagaacaaccagaacctcagcaccaaataagctttgaatccatgtgttggacaccaaaatga

SEQ ID NO: 77968 - DNA, 2009 bp, Zea Mays
ctcggatctgccgcgcccccgctctcctctggctcgctcgcgttctcgcgtacaccactccagacagtgacacagggacacacgccggcgtggctgctcacgtgttctcagttctcaccctgcgctctcgccggccggggctataagtggtcagcgaatatctctgcggcaagcccacgcttcggagtggacgtcaggcgcgctcgccagccccccacaccaccaccaccaccacaaccccaccaagctcacgtttccgaattcaccaactcctgcacgccgcgtcgagatcgttcacgccttagcttcgggaactccaccaataagcccaccggctggagcaatggggagcacggggcgcgagccggaggtgacccgcgccaacttccccgacggcttcgtcttcggcgtcgccacctccgcgtaccagatcgagggagcgagaagagagggaggcaaaggagacaacatatgggatgtatttacagatgacaaagaacgtgtcttagacagaagcaatgcagaaattgcagttgaccactaccatcgatacaagatggcttgggggaaaaggtcaatgagcaaggagtcgccttctataatgacctcatcaactttatgatttcgaaaggtattgagccttacgcaacactgtatcattgggatcttccaaacaatcttcaaaaaactctggggggctggatttctgacaagattgtggagtactttgcattgtatgcagaagcttgctttgcaaatttcggagatagagtaaagcgttggataacaatcaatgaacctctccaaaccgcaatcaacggttatgggattggaatttttgcgcctggaggatgccaaggtgaaactgcaagatgttacttggccgcccatcaccaaatcttggctcatgctgctgctgttgatgtttatagaagaaaattcaaggctgcacaaagtggtgaagtaggcttggttgttgactgtgaatgggcagagccattttctgaaaaactcgaagaccaaattgctgcgcaacggaggattgactttcaacttggatggtacctagatccaatatattttggtgattacccagaaagcatgcgtcagcgactgggcagtgatcttccaaccttctcagagaaagataaaaaattcatcaagaacaaaattgattttattggactaaatcattatacttcgaggctcattgctcatcaccaaaatcctgatgatgtttatttctacaaagtgcaacaaatggagagagtagaaaaatggagtagtggtgaaagcattggtgaaagggctgcatctgaatggcttgtcatagttccttggggccttcacaaattgcttaactatatagtgaagaaatacaacaacccagtaatttatgttactgagaatggcatggatgatgaagacgatcagtccgcgacgattgaccaggtcctaaacgacacgaagagagtcggctacttcaaaggatacctcaattcggttgcacaggcgatcaaggacggggctgatgtccgtgggtacttcgcgtggtcattcctggacaacttcgagtgggctatgggctacaccaagaggttcggcatagtctacgtcgattacaaggacgggctctccaggcaccccaaggcatcggccctctggttctcgcgcctcctcaagggcgaggctgccgaaaacagctatagctagagctgccacagactgagggaacagtccgcggcaagtacagaaacattacacacatttctcctgttgttgtgtcttgttgttgtgtcttaaaggtgagtgcacctatgtatgtatgtatgtatgtatgtatgtatgtatgtatgtatgtatgtatatatgtattcatcctaataatctcaggatgtgctagtctgtcgttgatgcgacgctggctgagatgtgttctccaagaacaagaacaaccagaacctcagcaccaaataagctttgaatccatgtgttggacaccaaaatga

SEQ ID NO: 77969 - DNA, 1565 bp, Zea Mays
aaaaacccttccattcacccgcagctcccatcctctcgctcgccaggagaagcagccgccgttgctgctgccgcgtccacagaatggctacactcgtggaagcttgcgagctcgtgaagaactgagatcgatgtttaggggggtttcgtgaagactcataagaccaatgcgtatttcaaacgtttccaagtgaaattcaagagaaggcgggctggcaagacagactacagggccaggataaggctgattaaccaagacaaaaacaagtacaacacacccaaatacagatttgttgtgcgatttaccaacaaggacatcactgcccaaatcatatctgctagtatagcgggtgatatggttcttgcttctgcctactcgcatgagttgccacgatatggtcttgaagttggtctgaccaactatgcagctgcctactgcactggccttctgttggctcgccgtgtgctcaagatccgtggtttggatcaggagtacgagggcaatgttgaggccactggtgaggacttctctgttgagccagctgatgagaggaggcctttccgtgctctcttggatgttggccttatcaggactacaacagggaaccgtgtctttggtgccctcaagggagcattggatggaggcctggatattcctcacagcgagaagaggtttgctggattcaagaaggacgacaagcagttggatgctgatacccaccgcaggtacatctatggtggccatgttgctgactacatgaagaaccttgctgaagaggagccagaaaagtaccagagccacttcagtgcgtacattaagaagggagttgaggctgatgaaatagaagcgctgtacaagaaggtccatgctgccatccgtgccgatccttccattgttaagtcaaccaagcagccaccaaaggagcataagaggtacaaccccaagaagctgacatatgagcagaggaaggccagcctcattgaaaggctcaaccaactcaactcctccggtggtgctgatgacgacgatgaggacgacgagtaaagttaattgccatcgaagtagtgctatctcaatccagcgatcagcaattgtgtactgtcttatgcggggacctgtagtactgcaataggcatttttgtttaagttttgcgaggtgaacaaaactgtttctgttagtttcgagcttgagctctcaatgtttactctttacattgaaatgctgccgtttggacatgttttttctgagttctacacctgcttgtcttgcttatgtgacggtgcagtattgtgcctttaatatcaacctaaacattgactggttcataccaagataaataaagaaaagaaaaatacagtgtatagcggtaggagggatatggaaaacgagattgtgttagactgtctccagcaacgtcctctatattcatcctctatatctgtcctttacagtctcctctaaaagatttcatcctctatatctcatttctctccaacaacgttctctaaatcacgttctctatactcaaatacccatattaaagacattttttaattttattttt

SEQ ID NO: 77970 - DNA, 1536 bp, Zea Mays
ccagaattaaaagggccgaaggaggcgcccttaaaaacccttccattcacccgcagctcccatcctctcgctcgccaggagaagcagccgccgttgctgctgccgcgtccacagaatggggggtttcgtgaagactcataagaccaatgcgtatttcaaacgtttccaagtgaaattcaagagaaggcgggctggcaagacagactacagggccaggataaggctgattaaccaagacaaaaacaagtacaacacacccaaatacagatttgttgtgcgatttgacatcactgcccaaatcatatctgctagtatagcgggtgatatggttcttgcttctgcctactcgcatgagttgccacgatatggtcttgaagttggtctgaccaactatgcagctgcctactgcactggccttctgttggctcgccgtgtgctcaagatccgtggtttggatcaggagtacgagggcaatgttgaggccactggtgaggacttctctgttgagccagctgatgagaggaggcctttccgtgctctcttggatgttggccttatcaggactacaacagggaaccgtgtctttggtgccctcaagggagcattggatggaggcctggatattcctcacagcgagaagaggtttgctggattcaagaaggacgacaagcagttggatgctgatacccaccgcaggtacatctatggtggccatgttgctgactacatgaagaaccttgctgaagaggagccagaaaagtaccagagccacttcagtgcgtacattaagaagggagttgaggctgatgaaatagaagcgctgtacaagaaggtccatgctgccatccgtgccgatccttccattgttaagtcaaccaagcagccaccaaaggagcataagaggtacaaccccaagaagctgacatatgagcagaggaaggccagcctcattgaaaggctcaaccaactcaactcctccggtggtgctgatgacgacgatgaggacgacgagtaaagttaattgccatcgaagtagtgctatctcaatccagcgatcagcaattgtgtactgtcttatgcggggacctgtagtactgcaataggcatttttgtttaagttttgcgaggtgaacaaaactgtttctgttagtttcgagcttgagctctcaatgtttactctttacattgaaatgctgccgtttggacatgttttttctgagttctacacctgcttgtcttgcttatgtgacggtgcagtattgtgcctttaatatcaacctaaacattgactggttcataccaagataaataaagaaaagaaaaatacagtgtatagcggtaggagggatatggaaaacgagattgtgttagactgtctccagcaacgtcctctatattcatcctctatatctgtcctttacagtctcctctaaaagatttcatcctctatatctcatttctctccaacaacgttctctaaatcacgttctctatactcaaatacccatattaaagacattttttaattttattttt

SEQ ID NO: 77971 - DNA, 1623 bp, Zea Mays
atcttcctttccttccctttcccctcctctctcacgggcttctctctcacatctcgtcatgccgcatcgtcccacgcgtccctccttccgtggtctcaccggcgaccccctcagcacagcaccttgcccggccggctgcccctccgcagtgccttggccccatcgttgcccgagctgcatctcccgcaccctcgtcgcctgagccgccactgtgccttggccccacgagccgtcatgcctagccccgtgtgcagccgtgctcctagtccgtcgtcgtgccttggccctacgtgccgctgtgcctggctcgcgcctgcctgtattcgccaaccactacggcgaagactagtggttgcttgagatcagcgctggttgcctcgtgtgaaggatgttgatgtcgaatggattggctaggcgggcgttaacctaccagactgatacactgttgctcttattattaggcactagcatagctaaagatttagtggtcaggaacgatcgtggataggggatgctgaacatggtagctggccttctagagagcacaactacaattagcagcggctctaggcaaccgtttgtcatggagacagtgaaagatgatgatgctgcaaaactgggtttgatatcaggtaaacatctgctattcgacacttctgtaatagtaagcagaaaggagcaagtcctcattttttatatgtgcaatgttgctttcatgctacacgagaggggtgaatgctagttataaaacaatggattatttgacataatgtagatgagattttcgcaactattcttatgtactgcaatatttgaaataaacagcccttgcaagatgttagggtcctcctaaaacatatgaatgaccattggattagtctaacattactctttaggcttcctagaccatgtaagcagtctttcacaagtccacgatgactttatttaaacatggagttagcacacataggtagagatagtaatggagtggtagttgttaattcttgaactattgaatttggcaaggacatcggttattgaatttggcaagcaaagatttatccctgatttggcaaggacatgttgcagaaatttacatggcgtccgttttcccatattactatactggtaaactaaagctacaaaaatggaggcaagcatattaactcgtttaatgccacgttcacaagtgatatcctagaactttagttttaaatgttaccggtgccagcttccaatgtttattatacttgtttgcatattgatatatttgttcaagttcttcaagctgatggtggtaagtgtgctaccttcctactttcaagcttacaaccttgtttaaatggaattgttttgcgcatgaggtctgcttttggaaacatcttcagtgctaatttgagacaagctcctgcaaggcaagctgcactgggcacagggatactaaacactgttgtttgtgctttttatgattgaggaatacttgaagaagagtacttgtggtctttatcttgtgctgagatgcatgttctttacctaccgaacatcagacccctccagctaccttgctgacgcgtgaacgagaagacgggttagactttgtcgaaaccctcttcgctagtggag

SEQ ID NO: 77972 - DNA, 1430 bp, Zea Mays
atcttcctttccttccctttcccctcctctctcacgggcttctctctcacatctcgtcatgccgcatcgtcccacgcgtccctccttccgtggtctcaccggcgaccccctcagcacagcaccttgcccggccggctgcccctccgcagtgccttggccccatcgttgcccgagctgcatctcccgcaccctcgtcgcctgagccgccactgtgccttggccccacgagccgtcatgcctagccccgtgtgcagccgtgctcctagtccgtcgtcgtgccttggccctacgtgccgctgtgcctggctcgcgcctgcctgtattcgccaaccactacggcgaagactagtggttgcttgagatcagcgctggttgcctcggctctaggcaaccgtttgtcatggagacagtgaaagatgatgatgctgcaaaactgggtttgatatcaggtaaacatctgctattcgacacttctgtaatagtaagcagaaaggagcaagtcctcattttttatatgtgcaatgttgctttcatgctacacgagaggggtgaatgctagttataaaacaatggattatttgacataatgtagatgagattttcgcaactattcttatgtactgcaatatttgaaataaacagcccttgcaagatgttagggtcctcctaaaacatatgaatgaccattggattagtctaacattactctttaggcttcctagaccatgtaagcagtctttcacaagtccacgatgactttatttaaacatggagttagcacacataggtagagatagtaatggagtggtagttgttaattcttgaactattgaatttggcaaggacatcggttattgaatttggcaagcaaagatttatccctgatttggcaaggacatgttgcagaaatttacatggcgtccgttttcccatattactatactggtaaactaaagctacaaaaatggaggcaagcatattaactcgtttaatgccacgttcacaagtgatatcctagaactttagttttaaatgttaccggtgccagcttccaatgtttattatacttgtttgcatattgatatatttgttcaagttcttcaagctgatggtggtaagtgtgctaccttcctactttcaagcttacaaccttgtttaaatggaattgttttgcgcatgaggtctgcttttggaaacatcttcagtgctaatttgagacaagctcctgcaaggcaagctgcactgggcacagggatactaaacactgttgtttgtgctttttatgattgaggaatacttgaagaagagtacttgtggtctttatcttgtgctgagatgcatgttctttacctaccgaacatcagctaccttgctgacgcgtgaacgagaagacgggttagactttgtcgaaaccctcttcgctagtggag

SEQ ID NO: 77973 - DNA, 1440 bp, Zea Mays
atcttcctttccttccctttcccctcctctctcacgggcttctctctcacatctcgtcatgccgcatcgtcccacgcgtccctccttccgtggtctcaccggcgaccccctcagcacagcaccttgcccggccggctgcccctccgcagtgccttggccccatcgttgcccgagctgcatctcccgcaccctcgtcgcctgagccgccactgtgccttggccccacgagccgtcatgcctagccccgtgtgcagccgtgctcctagtccgtcgtcgtgccttggccctacgtgccgctgtgcctggctcgcgcctgcctgtattcgccaaccactacggcgaagactagtggttgcttgagatcagcgctggttgcctcggctctaggcaaccgtttgtcatggagacagtgaaagatgatgatgctgcaaaactgggtttgatatcaggtaaacatctgctattcgacacttctgtaatagtaagcagaaaggagcaagtcctcattttttatatgtgcaatgttgctttcatgctacacgagaggggtgaatgctagttataaaacaatggattatttgacataatgtagatgagattttcgcaactattcttatgtactgcaatatttgaaataaacagcccttgcaagatgttagggtcctcctaaaacatatgaatgaccattggattagtctaacattactctttaggcttcctagaccatgtaagcagtctttcacaagtccacgatgactttatttaaacatggagttagcacacataggtagagatagtaatggagtggtagttgttaattcttgaactattgaatttggcaaggacatcggttattgaatttggcaagcaaagatttatccctgatttggcaaggacatgttgcagaaatttacatggcgtccgttttcccatattactatactggtaaactaaagctacaaaaatggaggcaagcatattaactcgtttaatgccacgttcacaagtgatatcctagaactttagttttaaatgttaccggtgccagcttccaatgtttattatacttgtttgcatattgatatatttgttcaagttcttcaagctgatggtggtaagtgtgctaccttcctactttcaagcttacaaccttgtttaaatggaattgttttgcgcatgaggtctgcttttggaaacatcttcagtgctaatttgagacaagctcctgcaaggcaagctgcactgggcacagggatactaaacactgttgtttgtgctttttatgattgaggaatacttgaagaagagtacttgtggtctttatcttgtgctgagatgcatgttctttacctaccgaacatcagacccctccagctaccttgctgacgcgtgaacgagaagacgggttagactttgtcgaaaccctcttcgctagtggag

SEQ ID NO: 77974 - DNA, 1539 bp, Zea Mays
atcttcctttccttccctttcccctcctctctcacgggcttctctctcacatctcgtcatgccgcatcgtcccacgcgtccctccttccgtggtctcaccggcgaccccctcagcacagcaccttgcccggccggctgcccctccgcagtgccttggccccatcgttgcccgagctgcatctcccgcaccctcgtcgcctgagccgccactgtgccttggccccacgagccgtcatgcctagccccgtgtgcagccgtgctcctagtccgtcgtcgtgccttggccctacgtgccgctgtgcctggctcgcgcctgcctgtattcgccaaccactacggcgaagactagtggttgcttgagatcagcgctggttgcctcgtgtgaaggatgttgatgtcgaatggattggctaggcgggcgttaacctaccagactgatacactgttgctcttattattaggcactagcatagctaaaggctctaggcaaccgtttgtcatggagacagtgaaagatgatgatgctgcaaaactgggtttgatatcaggtaaacatctgctattcgacacttctgtaatagtaagcagaaaggagcaagtcctcattttttatatgtgcaatgttgctttcatgctacacgagaggggtgaatgctagttataaaacaatggattatttgacataatgtagatgagattttcgcaactattcttatgtactgcaatatttgaaataaacagcccttgcaagatgttagggtcctcctaaaacatatgaatgaccattggattagtctaacattactctttaggcttcctagaccatgtaagcagtctttcacaagtccacgatgactttatttaaacatggagttagcacacataggtagagatagtaatggagtggtagttgttaattcttgaactattgaatttggcaaggacatcggttattgaatttggcaagcaaagatttatccctgatttggcaaggacatgttgcagaaatttacatggcgtccgttttcccatattactatactggtaaactaaagctacaaaaatggaggcaagcatattaactcgtttaatgccacgttcacaagtgatatcctagaactttagttttaaatgttaccggtgccagcttccaatgtttattatacttgtttgcatattgatatatttgttcaagttcttcaagctgatggtggtaagtgtgctaccttcctactttcaagcttacaaccttgtttaaatggaattgttttgcgcatgaggtctgcttttggaaacatcttcagtgctaatttgagacaagctcctgcaaggcaagctgcactgggcacagggatactaaacactgttgtttgtgctttttatgattgaggaatacttgaagaagagtacttgtggtctttatcttgtgctgagatgcatgttctttacctaccgaacatcagacccctccagctaccttgctgacgcgtgaacgagaagacgggttagactttgtcgaaaccctcttcgctagtggag

SEQ ID NO: 77975 - DNA, 1609 bp, Zea Mays
atcttcctttccttccctttcccctcctctctcacgggcttctctctcacatctcgtcatgccgcatcgtcccacgcgtccctccttccgtggtctcaccggcgaccccctcagcacagcaccttgcccggccggctgcccctccgcagtgccttggccccatcgttgcccgagctgcatctcccgcaccctcgtcgcctgagccgccactgtgccttggccccacgagccgtcatgcctagccccgtgtgcagccgtgctcctagtccgtcgtcgtgccttggccctacgtgccgctgtgcctggctcgcgcctgcctgtattcgccaaccactacggcgaagactagtggttgcttgagatcagcgctggttgcctcgtgtgaaggatgttgatgtcgaatggattggctaggcgggcgttaacctaccagactgatacactgttgctcttattattaggcactagcatagctaaagaacgatcgtggataggggatgctgaacatggtagctggccttctagagagcacaactacaattagcagcggctctaggcaaccgtttgtcatggagacagtgaaagatgatgatgctgcaaaactgggtttgatatcaggtaaacatctgctattcgacacttctgtaatagtaagcagaaaggagcaagtcctcattttttatatgtgcaatgttgctttcatgctacacgagaggggtgaatgctagttataaaacaatggattatttgacataatgtagatgagattttcgcaactattcttatgtactgcaatatttgaaataaacagcccttgcaagatgttagggtcctcctaaaacatatgaatgaccattggattagtctaacattactctttaggcttcctagaccatgtaagcagtctttcacaagtccacgatgactttatttaaacatggagttagcacacataggtagagatagtaatggagtggtagttgttaattcttgaactattgaatttggcaaggacatcggttattgaatttggcaagcaaagatttatccctgatttggcaaggacatgttgcagaaatttacatggcgtccgttttcccatattactatactggtaaactaaagctacaaaaatggaggcaagcatattaactcgtttaatgccacgttcacaagtgatatcctagaactttagttttaaatgttaccggtgccagcttccaatgtttattatacttgtttgcatattgatatatttgttcaagttcttcaagctgatggtggtaagtgtgctaccttcctactttcaagcttacaaccttgtttaaatggaattgttttgcgcatgaggtctgcttttggaaacatcttcagtgctaatttgagacaagctcctgcaaggcaagctgcactgggcacagggatactaaacactgttgtttgtgctttttatgattgaggaatacttgaagaagagtacttgtggtctttatcttgtgctgagatgcatgttctttacctaccgaacatcagacccctccagctaccttgctgacgcgtgaacgagaagacgggttagactttgtcgaaaccctcttcgctagtggag

SEQ ID NO: 77976 - DNA, 1601 bp, Zea Mays
atcttcctttccttccctttcccctcctctctcacgggcttctctctcacatctcgtcatgccgcatcgtcccacgcgtccctccttccgtggtctcaccggcgaccccctcagcacagcaccttgcccggccggctgcccctccgcagtgccttggccccatcgttgcccgagctgcatctcccgcaccctcgtcgcctgagccgccactgtgccttggccccacgagccgtcatgcctagccccgtgtgcagccgtgctcctagtccgtcgtcgtgccttggccctacgtgccgctgtgcctggctcgcgcctgcctgtattcgccaaccactacggcgaagactagtggttgcttgagatcagcgctggttgcctcgatgttgatgtcgaatggattggctaggcgggcgttaacctaccagactgatacactgttgctcttattattaggcactagcatagctaaagaacgatcgtggataggggatgctgaacatggtagctggccttctagagagcacaactacaattagcagcggctctaggcaaccgtttgtcatggagacagtgaaagatgatgatgctgcaaaactgggtttgatatcaggtaaacatctgctattcgacacttctgtaatagtaagcagaaaggagcaagtcctcattttttatatgtgcaatgttgctttcatgctacacgagaggggtgaatgctagttataaaacaatggattatttgacataatgtagatgagattttcgcaactattcttatgtactgcaatatttgaaataaacagcccttgcaagatgttagggtcctcctaaaacatatgaatgaccattggattagtctaacattactctttaggcttcctagaccatgtaagcagtctttcacaagtccacgatgactttatttaaacatggagttagcacacataggtagagatagtaatggagtggtagttgttaattcttgaactattgaatttggcaaggacatcggttattgaatttggcaagcaaagatttatccctgatttggcaaggacatgttgcagaaatttacatggcgtccgttttcccatattactatactggtaaactaaagctacaaaaatggaggcaagcatattaactcgtttaatgccacgttcacaagtgatatcctagaactttagttttaaatgttaccggtgccagcttccaatgtttattatacttgtttgcatattgatatatttgttcaagttcttcaagctgatggtggtaagtgtgctaccttcctactttcaagcttacaaccttgtttaaatggaattgttttgcgcatgaggtctgcttttggaaacatcttcagtgctaatttgagacaagctcctgcaaggcaagctgcactgggcacagggatactaaacactgttgtttgtgctttttatgattgaggaatacttgaagaagagtacttgtggtctttatcttgtgctgagatgcatgttctttacctaccgaacatcagacccctccagctaccttgctgacgcgtgaacgagaagacgggttagactttgtcgaaaccctcttcgctagtggag

SEQ ID NO: 77977 - DNA, 4532 bp, Zea Mays
ccggttcggcgcttcctctcttccaaatctctagtcttctccagttcccaccccgcgccccaaatccagatccactgcccaccacccgcctattagtctccaacgcggacgcccccgcccccggctgcactcgtcgcgccatcctctggtgcctggtctccgggattctgcaggttcagttgagtagaccagtgtttgagcaagggttgaacataggaatgcgctgtttgttcctagagtagcagttcaaaatccaaacccgcccgcgatgaaaagcggcgtcatggttctcggtgtcggcagccctgaagaggcccctgaccgcaacgatgcggagccacggcgcgatatgggccaatcgcagatgcaggtcggtggccccgttgttctcaaccgatcagctgagctcgggtcaggtgattttatggctatcgatgacgctccagttcaagcaccatcgggccagccggcggcggcaaaacatcagtctcctgctgctctgacggacaccatcatggaggtgcagaagcaactgaagcgaaagagggcttctaataacccagtgattgctgccgcggacaaggacgctctcgctgccgggtgccggcaagagcttgagggtctcttccagttttacaaggaggtttctgaccgtaaggtgcagcttgacggtggtaacctgtccgtcaacggaatggttggctgcttgcttgaggagagcagccttgggctgaccaagttggtggacgggatatatgaaaagttgaagggattggatggtgtgtctgtggcttcagtccgtggctctgtgctgctcgttgggcagaggatgatgtacgggaaatcatccttggacgctgatgtgttggaagatgatacagagtcggctctttggtgctgggagacaagagatctgaaattgatgcctgtgaaagcacgcagtgttcttagtacacggaggtctgtcagaaagaaaatccatgagagaatcactgccatctattgtaagcaactctatcggttcttgaaaacccaggagtttacgtccaagtaaatgatctaaaaaaggcatcattaagattaaacaaatcgctgaacctggaagggatcagatcaatggtggaaagagtggcacaaaagaacctagaacggggtgtgaaagttgctggatcagcaattaaggaattgaagcaagagacagaaaaaaatgaccaaaatcttagaagacttgaggatactagcgtctctgagctgcagaatggaaattcgcctgataatgaaaaagaggttcaaaaggcacaaaaacaggtggagaaggaaataaagcgccaggagaaagaagaagctcggatgaaaaaactgcaaaagaaacagcaagaagatgtcctaagagaacagaagagacgtgaaaaggaggaagctgaagctaagaaacaacaaaagaagcaggaggaggaagcactgaaagaacagaagcgtcgtgaaaaggaagaagctgaaatgaagaaacaacataaaaaacagcaagaggaagctgagaaagaacagaagcgccttgagaaggaagctgcacaactcaagaagcaactagccgtgcaaaagcaagcttctatgatgcaaagatttttcaaaagtaagaaagacaatggaaaacttcaaaaatctggagagaacaactcagctgatggtccgtgcaatgacaacaaagagaccgtaccatcaaccacatcaaaaattgattattcattgtctcaacaagagagctgggttttggaggatctttggaggttgcagatcactggttggaagaagctatctagccacaataggtcctccagatggggtgtaagatgcaaacccaagacgaaagcatttaatgaactgaagcttcagaaatcctcagatgatatggttgatgaaatactttctactccaaataaagatggctgccacacttcaagtcaggaaaatgaacatgctacgcttgaaagtgacattgacatgctacaagctattgaggtgcaatgtcatgacaccaataaccctaaacctctgcaaactagattaattagaaggaaacttctgcaatttgacaaaagtaacaggccagcgtattatggatcctggaggaagaaaagtgttgttattggtccaaggtgtccacttaagatggatcctaatcttgactatgaggttgatagtgatgatgaatgggaagaggaggatcctggtgagagtctttctgactgtgagaaggataatgatgaatttatggaagaagattccaaaattacagatgaagaagatgaagatagctttgttgtgcctgatggctatctatcggacaatgagggaatacaaattgaaagcctattggatgataaagatgaggaagccagtagctcaccaactggtcagtgtgcagaagttgaagagttcaggtctctactgcgccaacaaagagtcctgaacattttaaccgagcaagctctccggaagagccaacctcttattatatccaacctaaatcatgaaaaagctgaattactgactgccgaagacctcaaggggacagcaaagatcgaacagctatgtttgcaagttctttcaatgcacatctgtccaggaggcgcagttgttgatgtgcctctaactgacagctcatctgcaactgttgaagaaattaaccagcccaatccgaaggatggttctcctggggctgcatctgctataccagaaacagatctgccagaaattgtccaggtgataagatcatgtcgagatggtatccataaggtggtggaattactgcagcacaagtttccaaatgtttcaaagactcagctgaatcgcaaagtgagagagatatctgactttgttgacaatcattggaaggtaaagaaagaggtgcttgacaagctgggattggattcgtcaccagtgaaatccaagaagaataaaagcatagccatgtacttctcgaagagatgtttacctcctgaagaggctgtcaatgctctgtctgcttctcctgagttgcggttgaaatctagaaccattcaaaatggcaatggtggcaccgaagctcctcagatcaatctgttcccttcaaagcagtagagtttgtaacaggacaccctgaaagtcggatcaggtataaatgaggctatgcacccaggtgagcacaaagctcagaggtccatgtccctcccatggctatggaagtgcgtgcaacttggttttgcatatggatgatctggatcgattatgtttccagtgacatgttgtaattttagccagaaagtaggtttgttcatgaaggacattcagttcaaatgtttgacctattgttaaggcaaggcattgttctctgcaacatgtggtgttatgaacattatgtgcactcgtgattctgccaaataagtaatgtgtcctgtgactggtcaattgaagcgcatctcttgagagaagtggagaaatttgctatttgtcactctcggttttggtttccatctcgtgtctagtgcaaccatctgtgataatggcaatggtaaaattgccaatggctcggtgcgactggggcgagcaaatatatttttcacttgtggcttatcaaatgacagattttctcagaaatttgtttttacaacctgtttgcatcaaatctgatgaatgtgcatgcaagtagtagcaaaggcaacaaaaagcaatgtatatttgctttggcatttaacaattttggttgaacaggcacagtagtaccaaaaaaaagcaatagtacatactaacagacggcaaagaatcaacgaatcttgttcatatatcattctgaaggagctaacaccagcggacgatcagacatggtacggctgccggttcttggcctggaggtcgtcgtcgtcgtcgtcatcgaggcggagggagaaggcgagcgcgagcgcggcccactcgaggacgaagatggcggtgccgaggcccccgaccatcttgaggatgacggcgccgtcctcgtcgcggacgtaggactgaagctcggccaggaagtcggaggtgcgggtgaacgcgagcagcgcgacggccccctggaagatggcggtgagcgcggcccccgcggtgtgcgcgttgtgccactgcgcgggcgtggcgggcgccgtgaaggagcccgagcagccggccgcggagaagacggcggtgagggcgtggaggaagagcaggaggaggccgcacggggacggcagcaggcgcagcgacagcgtgaggaagatgcagctggaagcggcgcccatgaggacgtagttgcacaggaggaacgccttgcgcgtgtgcgacttgcccgccattcgactcgacgccgccggactccgcttggaagcttaccgagggagcgggatggcttgcggtcgaaggggcgaggtcgagatcgagagagggaggtttggagtggagtgggagcggtggagtggtgggaactttatacctgcgcgggcgggcggggtggcgctggcgcggaggatttggccgttggaggcgtg

SEQ ID NO: 77978 - DNA, 4637 bp, Zea Mays
cgaaaagttctcgaagccgccggccgcgggaaacattttgcgcgccgcgctcccttctccttccgcatgcgcgcgcgcccgccccaccgcccgttacaaatactccattcccggttcggcgcttcctctcttccaaatctctagtcttctccagttcccaccccgcgccccaaatccagatccactgcccaccacccgcctattagtctccaacgcggacgcccccgcccccggctgcactcgtcgcgccatcctctggtgcctggtctccgggattctgcaggttcagttgagtagaccagtgtttgagcaagggttgaacataggaatgcgctgtttgttcctagagtagcagttcaaaatccaaacccgcccgcgatgaaaagcggcgtcatggttctcggtgtcggcagccctgaagaggcccctgaccgcaacgatgcggagccacggcgcgatatgggccaatcgcagatgcaggtcggtggccccgttgttctcaaccgatcagctgagctcgggtcaggtgattttatggctatcgatgacgctccagttcaagcaccatcgggccagccggcggcggcaaaacatcagtctcctgctgctctgacggacaccatcatggaggtgcagaagcaactgaagcgaaagagggcttctaataacccagtgattgctgccgcggacaaggacgctctcgctgccgggtgccggcaagagcttgagggtctcttccagttttacaaggaggtttctgaccgtaaggtgcagcttgacggtggtaacctgtccgtcaacggaatggttggctgcttgcttgaggagagcagccttgggctgaccaagttggtggacgggatatatgaaaagttgaagggattggatggtgtgtctgtggcttcagtccgtggctctgtgctgctcgttgggcagaggatgatgtacgggaaatcatccttggacgctgatgtgttggaagatgatacagagtcggctctttggtgctgggagacaagagatctgaaattgatgcctgtgaaagcacgcagtgttcttagtacacggaggtctgtcagaaagaaaatccatgagagaatcactgccatctattcaactctatcggttcttgaaaacccaggagtttacgtccaagtaaatgatctaaaaaaggcatcattaagattaaacaaatcgctgaacctggaagggatcagatcaatggtggaaagagtggcacaaaagaacctagaacggggtgtgaaagttgctggatcagcaattaaggaattgaagcaagagacagaaaaaaatgaccaaaatcttagaagacttgaggatactagcgtctctgagctgcagaatggaaattcgcctgataatgaaaaagaggttcaaaaggcacaaaaacaggtggagaaggaaataaagcgccaggagaaagaagaagctcggatgaaaaaactgcaaaagaaacagcaagaagatgtcctaagagaacagaagagacgtgaaaaggaggaagctgaagctaagaaacaacaaaagaagcaggaggaggaagcactgaaagaacagaagcgtcgtgaaaaggaagaagctgaaatgaagaaacaacataaaaaacagcaagaggaagctgagaaagaacagaagcgccttgagaaggaagctgcacaactcaagaagcaactagccgtgcaaaagcaagcttctatgatgcaaagatttttcaaaagtaagaaagacaatggaaaacttcaaaaatctggagagaacaactcagctgatggtccgtgcaatgacaacaaagagaccgtaccatcaaccacatcaaaaattgattattcattgtctcaacaagagagctgggttttggaggatctttggaggttgcagatcactggttggaagaagctatctagccacaataggtcctccagatggggtgtaagatgcaaacccaagacgaaagcatttaatgaactgaagcttcagaaatcctcagatgatatggttgatgaaatactttctactccaaataaagatggctgccacacttcaagtcaggaaaatgaacatgctacgcttgaaagtgacattgacatgctacaagctattgaggtgcaatgtcatgacaccaataaccctaaacctctgcaaactagattaattagaaggaaacttctgcaatttgacaaaagtaacaggccagcgtattatggatcctggaggaagaaaagtgttgttattggtccaaggtgtccacttaagatggatcctaatcttgactatgaggttgatagtgatgatgaatgggaagaggaggatcctggtgagagtctttctgactgtgagaaggataatgatgaatttatggaagaagattccaaaattacagatgaagaagatgaagatagctttgttgtgcctgatggctatctatcggacaatgagggaatacaaattgaaagcctattggatgataaagatgaggaagccagtagctcaccaactggtcagtgtgcagaagttgaagagttcaggtctctactgcgccaacaaagagtcctgaacattttaaccgagcaagctctccggaagagccaacctcttattatatccaacctaaatcatgaaaaagctgaattactgactgccgaagacctcaaggggacagcaaagatcgaacagctatgtttgcaagttctttcaatgcacatctgtccaggaggcgcagttgttgatgtgcctctaactgacagctcatctgcaactgttgaagaaattaaccagcccaatccgaaggatggttctcctggggctgcatctgctataccagaaacagatctgccagaaattgtccaggtgataagatcatgtcgagatggtatccataaggtggtggaattactgcagcacaagtttccaaatgtttcaaagactcagctgaatcgcaaagtgagagagatatctgactttgttgacaatcattggaaggtaaagaaagaggtgcttgacaagctgggattggattcgtcaccagtgaaatccaagaagaataaaagcatagccatgtacttctcgaagagatgtttacctcctgaagaggctgtcaatgctctgtctgcttctcctgagttgcggttgaaatctagaaccattcaaaatggcaatggtggcaccgaagctcctcagatcaatctgttcccttcaaagcagtagagtttgtaacaggacaccctgaaagtcggatcaggtataaatgaggctatgcacccaggtgagcacaaagctcagaggtccatgtccctcccatggctatggaagtgcgtgcaacttggttttgcatatggatgatctggatcgattatgtttccagtgacatgttgtaattttagccagaaagtaggtttgttcatgaaggacattcagttcaaatgtttgacctattgttaaggcaaggcattgttctctgcaacatgtggtgttatgaacattatgtgcactcgtgattctgccaaataagtaatgtgtcctgtgactggtcaattgaagcgcatctcttgagagaagtggagaaatttgctatttgtcactctcggttttggtttccatctcgtgtctagtgcaaccatctgtgataatggcaatggtaaaattgccaatggctcggtgcgactggggcgagcaaatatatttttcacttgtggcttatcaaatgacagattttctcagaaatttgtttttacaacctgtttgcatcaaatctgatgaatgtgcatgcaagtagtagcaaaggcaacaaaaagcaatgtatatttgctttggcatttaacaattttggttgaacaggcacagtagtaccaaaaaaaagcaatagtacatactaacagacggcaaagaatcaacgaatcttgttcatatatcattctgaaggagctaacaccagcggacgatcagacatggtacggctgccggttcttggcctggaggtcgtcgtcgtcgtcgtcatcgaggcggagggagaaggcgagcgcgagcgcggcccactcgaggacgaagatggcggtgccgaggcccccgaccatcttgaggatgacggcgccgtcctcgtcgcggacgtaggactgaagctcggccaggaagtcggaggtgcgggtgaacgcgagcagcgcgacggccccctggaagatggcggtgagcgcggcccccgcggtgtgcgcgttgtgccactgcgcgggcgtggcgggcgccgtgaaggagcccgagcagccggccgcggagaagacggcggtgagggcgtggaggaagagcaggaggaggccgcacggggacggcagcaggcgcagcgacagcgtgaggaagatgcagctggaagcggcgcccatgaggacgtagttgcacaggaggaacgccttgcgcgtgtgcgacttgcccgccattcgactcgacgccgccggactccgcttggaagcttaccgagggagcgggatggcttgcggtcgaaggggcgaggtcgagatcgagagagggaggtttggagtggagtgggagcggtggagtggtgggaactttatacctgcgcgggcgggcggggtggcgctggcgcggaggatttggccgttggaggcgtg

SEQ ID NO: 77979 - DNA, 1280 bp, Zea Mays
tgggacttcattttttcattttaaagtttcacttaaagttgtgcaagtacgacaatcaaatgtcaacagatttaagtgcaatagcatacaaagtaacctctttgatagactaacgagggttgccaggtcctacgcaaatgcagttctaagttcatttgaggaccctgagaagattctcgagcaggcagttctcgagatgaacgatgacttgacaaagatgaggcaggccacagcacaggtcttggcgtctcaaaagcggcttgagaataaatacaaagctgcagaacaagcttctgctgattggtatcgaagggctcaacttgctcttcaaaagggtgacgaggatcttgctcgcgaagcccttaagcggcgtaaatcatatgctgacaatgcaagctccttaaggtcccagcttgatcagcagaagggtgtagttgaaaatctgatttcaaatacccgggttcttgagagcaagatagcagaggccaagcagaaaaaggatacgcttaaagctcgtgctcaatcagcaaagactgccacaaaagtgagcgaaatgttgggcaacgtgaatacaagtagcgccctttctgcatttgagaaaatggaggaaaaagttatggcgatggaatcccaagcggaggcactcggccaattagcaactgacgatctagaaggaaagtttgcactgctcgagaattcatctgtcgatgatgatctttcacagctgaaaaaagaactctcgggaagctctttgaaaggggagctcccatcaggcagaagagcggccagcaactcaggcgccgggcgccctttccccgacctagagattgagagcgagctaaacgagctgcggaggaaggccaaagaatactagagagtagagactctccaccaaccatccttcccgggcctgacagaatctctcatttccaagtacatatagcacagctgcagatttgctccatcgcgccttggaaagttggaacagaggtgcgcctttgactgtcactgtcaaagggtatatggagtcgccgagtttctcggcattttcccgtcgacggacatttgtacagctagccataaattgttgtaaatcactacgctccctagagcccttttttttgcgtactacgtatatagtcaaagtttgaagtttccgcgtcgtggtttttacccccattttttccgtgccataacatgtgttttgtgactggagacttgggatcctcagccaggtcgatcaaatactccctttttttcttcttcttcttgcagcgcct

SEQ ID NO: 77980 - DNA, 1457 bp, Zea Mays
ctgcaagccatgaattactaaattaatggttgggagactcggtgggtggaatccgactggaaaaggagtgaagggaaagcaggaaggttcaagcacacagcggggagatactctgcagatcctgatgacaaagcttgatgtttggaccagatatatgtggtactcaaacaaagaagctccatcttatactctcttaccaggggcagaactatcccatcaaaaaagatctagaatgtgagacggacaagttaacacacgtgtatactttcattcttaggcctgatgcatcttatagcctgcttgttgataaccgtgaaagagaatctgggagcatgtacactgattgggatattctccctcctcgtaaaattaaggatgttcacgccaaaaggcctaaggattgggatgacagagaatatattgaagatcctgatgaagttaagccagagggctatgattctatcccaaaacagattcctgatccgaaggacaaaaagcctgacacatgggatgaagatgaggatggaatatggaagcccagaatggtatcaaatccagcatacaagggaccttggaaacgcaagagaattaaaaatcctaactacaagggtaaatggaagaccccatggatcgataatccagagtttgaggatgatccagatctttatgtgctgaagcctttgaagtatattggaattgaagtttggcaggtaaaagctggttcagttttcgacaacattctgatttgtgatgaccctgagtatgcaagaaaggttgttgaggaaacttggggtgcaaatagggaggctgaaaaggaagcttttgaagaagctgaaaaggagaggaaagctagggaggatagggaaggtcaaaaggcaaaggacgatggtggccggcatcgaatacacaggcgtcataaaaaacactacagagatcactgggacgactaccatgatgagctataaaagtccccaaatattgcattcctcaaaagcataagctggaagttgcttcggacattgtgggtgcttttcaataataataattgattcgcctggtcagaacaacctgaagtgtttcttgctatgcgccaacaaattattgaactacaggatttgatatgtaatggacaaccgaagatctgcagggcattccagcgaaaacttggctctggtactgaaatagaggggacgagagactgtagtttgtgtctgtacaacggtgccggccatgtgctagctttgtaatctcaaaacattgtctttgcatgaataatgtaagttacccaaaaattactgcataccaagttacaaagtgttgtagctgacatatgaggaacactttaattttaatcttcatatatatacttctgtaatcttcaaaaaggatacgatgcaattggtctatctctgtcatcaccttgcataaatgaacacacaggtttcagcaacttggct

SEQ ID NO: 77981 - DNA, 1663 bp, Zea Mays
gagcttgctatttctgcaagccatgaattactaaattaatggttgggagactcggtgggtggaatccgactggaaaaggagtgaagggaaagcaggaaggttcaagcacacagcggggagatactctgcagatcctgatgacaaaggaatacaaacaacaatagatgccagacattttgctatctcagccaagttcccggaattcagtaacaagaaccggacgcttgtggtccagtactccattaagtttgagcaggatattgaatgtggcggtggctatattaagcttatgtccggttatgtcaaccagaaaaaatttagtggggacactccgtacagcttgatgtttggaccagatatatgtggtactcaaacaaagaagctccatcttatactctcttaccaggggcagaactatcccatcaaaaaagatctagaatgtgagacggacaagttaacacacgtgtatactttcattcttaggcctgatgcatcttatagcctgcttgttgataaccgtgaaagagaatctgggagcatgtacactgattgggatattctccctcctcgtaaaattaaggatgttcacgccaaaaggcctaaggattgggatgacagagaatatattgaagatcctgatgaagttaagccagagggctatgattctatcccaaaacagattcctgatccgaaggacaaaaagcctgacacatgggatgaagatgaggatggaatatggaagcccagaatggtatcaaatccagcatacaagggaccttggaaacgcaagagaattaaaaatcctaactacaagggtaaatggaagaccccatggatcgataatccagagtttgaggatgatccagatctttatgtgctgaagcctttgaagtatattggaattgaagtttggcaggtaaaagctggttcagttttcgacaacattctgatttgtgatgaccctgagtatgcaagaaaggttgttgaggaaacttggggtgcaaatagggaggctgaaaaggaagcttttgaagaagctgaaaaggagaggaaagctagggaggatagggaaggtcaaaaggcaaaggacgatggtggccggcatcgaatacacaggcgtcataaaaaacactacagagatcactgggacgactaccatgatgagctataaaagtccccaaatattgcattcctcaaaagcataagctggaagttgcttcggacattgtgggtgcttttcaataataataattgattcgcctggtcagaacaacctgaagtgtttcttgctatgcgccaacaaattattgaactacaggatttgatatgtaatggacaaccgaagatctgcagggcattccagcgaaaacttggctctggtactgaaatagaggggacgagagactgtagtttgtgtctgtacaacggtgccggccatgtgctagctttgtaatctcaaaacattgtctttgcatgaataatgtaagttacccaaaaattactgcataccaagttacaaagtgttgtagctgacatatgaggaacactttaattttaatcttcatatatatacttctgtaatcttcaaaaaggatacgatgcaattggtctatctctgtcatcaccttgcataaatgaacacacaggtttcagcaacttggct

SEQ ID NO: 77982 - DNA, 1651 bp, Zea Mays
ctcaaccgctcatgctgagctgagacatggttgggagactcggtgggtggaatccgactggaaaaggagtgaagggaaagcaggaaggttcaagcacacagcggggagatactctgcagatcctgatgacaaaggaatacaaacaacaatagatgccagacattttgctatctcagccaagttcccggaattcagtaacaagaaccggacgcttgtggtccagtactccattaagtttgagcaggatattgaatgtggcggtggctatattaagcttatgtccggttatgtcaaccagaaaaaatttagtggggacactccgtacagcttgatgtttggaccagatatatgtggtactcaaacaaagaagctccatcttatactctcttaccaggggcagaactatcccatcaaaaaagatctagaatgtgagacggacaagttaacacacgtgtatactttcattcttaggcctgatgcatcttatagcctgcttgttgataaccgtgaaagagaatctgggagcatgtacactgattgggatattctccctcctcgtaaaattaaggatgttcacgccaaaaggcctaaggattgggatgacagagaatatattgaagatcctgatgaagttaagccagagggctatgattctatcccaaaacagattcctgatccgaaggacaaaaagcctgacacatgggatgaagatgaggatggaatatggaagcccagaatggtatcaaatccagcatacaagggaccttggaaacgcaagagaattaaaaatcctaactacaagggtaaatggaagaccccatggatcgataatccagagtttgaggatgatccagatctttatgtgctgaagcctttgaagtatattggaattgaagtttggcaggtaaaagctggttcagttttcgacaacattctgatttgtgatgaccctgagtatgcaagaaaggttgttgaggaaacttggggtgcaaatagggaggctgaaaaggaagcttttgaagaagctgaaaaggagaggaaagctagggaggatagggaaggtcaaaaggcaaaggacgatggtggccggcatcgaatacacaggcgtcataaaaaacactacagagatcactgggacgactaccatgatgagctataaaagtccccaaatattgcattcctcaaaagcataagctggaagttgcttcggacattgtgggtgcttttcaataataataattgattcgcctggtcagaacaacctgaagtgtttcttgctatgcgccaacaaattattgaactacaggatttgatatgtaatggacaaccgaagatctgcagggcattccagcgaaaacttggctctggtactgaaatagaggggacgagagactgtagtttgtgtctgtacaacggtgccggccatgtgctagctttgtaatctcaaaacattgtctttgcatgaataatgtaagttacccaaaaattactgcataccaagttacaaagtgttgtagctgacatatgaggaacactttaattttaatcttcatatatatacttctgtaatcttcaaaaaggatacgatgcaattggtctatctctgtcatcaccttgcataaatgaacacacaggtttcagcaacttggct

SEQ ID NO: 77983 - DNA, 1652 bp, Zea Mays
ggctgccaaggttgcctcctgaacctgatggttgggagactcggtgggtggaatccgactggaaaaggagtgaagggaaagcaggaaggttcaagcacacagcggggagatactctgcagatcctgatgacaaaggaatacaaacaacaatagatgccagacattttgctatctcagccaagttcccggaattcagtaacaagaaccggacgcttgtggtccagtactccattaagtttgagcaggatattgaatgtggcggtggctatattaagcttatgtccggttatgtcaaccagaaaaaatttagtggggacactccgtacagcttgatgtttggaccagatatatgtggtactcaaacaaagaagctccatcttatactctcttaccaggggcagaactatcccatcaaaaaagatctagaatgtgagacggacaagttaacacacgtgtatactttcattcttaggcctgatgcatcttatagcctgcttgttgataaccgtgaaagagaatctgggagcatgtacactgattgggatattctccctcctcgtaaaattaaggatgttcacgccaaaaggcctaaggattgggatgacagagaatatattgaagatcctgatgaagttaagccagagggctatgattctatcccaaaacagattcctgatccgaaggacaaaaagcctgacacatgggatgaagatgaggatggaatatggaagcccagaatggtatcaaatccagcatacaagggaccttggaaacgcaagagaattaaaaatcctaactacaagggtaaatggaagaccccatggatcgataatccagagtttgaggatgatccagatctttatgtgctgaagcctttgaagtatattggaattgaagtttggcaggtaaaagctggttcagttttcgacaacattctgatttgtgatgaccctgagtatgcaagaaaggttgttgaggaaacttggggtgcaaatagggaggctgaaaaggaagcttttgaagaagctgaaaaggagaggaaagctagggaggatagggaaggtcaaaaggcaaaggacgatggtggccggcatcgaatacacaggcgtcataaaaaacactacagagatcactgggacgactaccatgatgagctataaaagtccccaaatattgcattcctcaaaagcataagctggaagttgcttcggacattgtgggtgcttttcaataataataattgattcgcctggtcagaacaacctgaagtgtttcttgctatgcgccaacaaattattgaactacaggatttgatatgtaatggacaaccgaagatctgcagggcattccagcgaaaacttggctctggtactgaaatagaggggacgagagactgtagtttgtgtctgtacaacggtgccggccatgtgctagctttgtaatctcaaaacattgtctttgcatgaataatgtaagttacccaaaaattactgcataccaagttacaaagtgttgtagctgacatatgaggaacactttaattttaatcttcatatatatacttctgtaatcttcaaaaaggatacgatgcaattggtctatctctgtcatcaccttgcataaatgaacacacaggtttcagcaacttggct

SEQ ID NO: 77984 - DNA, 1943 bp, Zea Mays
ggtatgggcgacgtggcggcttcctactggacgtactggtgatttactacgctgcgattgggtgatgcggtgggcaggctttcccatttcatgcggcatggactgacgactgctgtcccgcgctctttttggacgcgatgcagcgacgtttttggagccgcgaccgttgacttggacaggtcgcggcgacccaccaccactccggcgatgggcactggccgccgcggcggcggcggcggcggcgtgttccaccgcctcctcgccctctcgtcgctgctgctcctcgcttccggcgaggtcgtcttcgaggagcgcttcgaagatggttgggagactcggtgggtggaatccgactggaaaaggagtgaagggaaagcaggaaggttcaagcacacagcggggagatactctgcagatcctgatgacaaaggaatacaaacaacaatagatgccagacattttgctatctcagccaagttcccggaattcagtaacaagaaccggacgcttgtggtccagtactccattaagtttgagcaggatattgaatgtggcggtggctatattaagcttatgtccggttatgtcaaccagaaaaaatttagtggggacactccgtacagcttgatgtttggaccagatatatgtggtactcaaacaaagaagctccatcttatactctcttaccaggggcagaactatcccatcaaaaaagatctagaatgtgagacggacaagttaacacacgtgtatactttcattcttaggcctgatgcatcttatagcctgcttgttgataaccgtgaaagagaatctgggagcatgtacactgattgggatattctccctcctcgtaaaattaaggatgttcacgccaaaaggcctaaggattgggatgacagagaatatattgaagatcctgatgaagttaagccagagggctatgattctatcccaaaacagattcctgatccgaaggacaaaaagcctgacacatgggatgaagatgaggatggaatatggaagcccagaatggtatcaaatccagcatacaagggaccttggaaacgcaagagaattaaaaatcctaactacaagggtaaatggaagaccccatggatcgataatccagagtttgaggatgatccagatctttatgtgctgaagcctttgaagtatattggaattgaagtttggcaggtaaaagctggttcagttttcgacaacattctgatttgtgatgaccctgagtatgcaagaaaggttgttgaggaaacttggggtgcaaatagggaggctgaaaaggaagcttttgaagaagctgaaaaggagaggaaagctagggaggatagggtcaaaaggcaaaggacgatggtggccggcatcgaatacacaggcgtcataaaaaacactacagagatcactgggacgactaccatgatgagctataaaagtccccaaatattgcattcctcaaaagcataagctggaagttgcttcggacattgtgggtgcttttcaataataataattgattcgcctggtcagaacaacctgaagtgtttcttgctatgcgccaacaaattattgaactacaggatttgatatgtaatggacaaccgaagatctgcagggcattccagcgaaaacttggctctggtactgaaatagaggggacgagagactgtagtttgtgtctgtacaacggtgccggccatgtgctagctttgtaatctcaaaacattgtctttgcatgaataatgtaagttacccaaaaattactgcataccaagttacaaagtgttgtagctgacatatgaggaacactttaattttaatcttcatatatatacttctgtaatcttcaaaaaggatacgatgcaattggtctatctctgtcatcaccttgcataaatgaacacacaggtttcagcaacttggct

SEQ ID NO: 77985 - DNA, 1856 bp, Zea Mays
ggtatgggcgacgtggcggcttcctactggacgtactggtgatttactacgctgcgattgggtgatgcggtgggcaggctttcccatttcatgcggcatggactgacgactgctgtcccgcgctctttttggacgcgatgcagcgacgtttttggagccgcgaccgttgacttggacaggtcgcggcgacccaccaccactccggcgatgggcactggccgccgcggcggcggcggcggcggcgtgttccaccgcctcctcgccctctcgtcgctgctgctcctcgcttccggcgaggtcgtcttcgaggagcgcttcgaagatggttgggagactcggtgggtggaatccgactggaaaaggagtgaagggaaagcaggaaggttcaagcacacagcggggagatactctgcagatcctgatgacaaaggaatacaaacaacaatagatgccagacattttgctatctcagccaagttcccggaattcagtaacaagaaccggacgcttgtggtccagtactccattaagtttgagcaggatattgaatgtggcggtggctatattaagcttatgtccggttatgtcaaccagaaaaaatttagtggggacactccgtacagcttgatgtttggaccagatatatgtggtactcaaacaaagaagctccatcttatactctcttaccaggggcagaactatcccatcaaaaaagatctagaatgtgagacggacaagttaacacacgtgtatactttcattcttaggcctgatgcatcttatagcctgcttgttgataaccgtgaaagagaatctgggagcatgtacactgattgggatattctccctcctcgtaaaattaaggatgttcacgccaaaaggcctaaggattgggatgacagagaatatattgaagatcctgatgaagttaagccagagggctatgattctatcccaaaacagattcctgatccgaaggacaaaaagcctgacacatgggatgaagatgaggatggaatatggaagcccagaatggtatcaaatccagcatacaagggaccttggaaacgcaagagaattaaaaatcctaactacaagggtaaatggaagaccccatggatcgataatccagagtttgaggatgatccagatctttatgtgctgaagcctttgaagtatattggaattgaagtttggcaggtaaaagctggttcagttttcgacaacattctgatttgtgatgaccctgagtatgcaagaaaggttgttgaggaaacttggggtgcaaatagggaggctgaaaaggaagcttttgaagaagctgaaaaggagaggaaagctagggaggatagggaaggtcaaaaggcaaaggacgatggtggccggcatcgaatacacaggcgtcataaaaaacactacagagatcactgggacgactaccatgatgagctataaaagtccccaaatattgcattcctcaaaagcataagctggaagttgcttcggacattgatttgatatgtaatggacaaccgaagatctgcagggcattccagcgaaaacttggctctggtactgaaatagaggggacgagagactgtagtttgtgtctgtacaacggtgccggccatgtgctagctttgtaatctcaaaacattgtctttgcatgaataatgtaagttacccaaaaattactgcataccaagttacaaagtgttgtagctgacatatgaggaacactttaattttaatcttcatatatatacttctgtaatcttcaaaaaggatacgatgcaattggtctatctctgtcatcaccttgcataaatgaacacacaggtttcagcaacttggct

SEQ ID NO: 77986 - DNA, 635 bp, Zea Mays
cagaaatgttccagctgcaactcgcagctcgaaacagtcgcagtgtgatattttttttgacgaagggacaagccccctatttcattaggaaataggaaagtttagaacaacgacatctatcgcgatcaaacgatccgacagaataacaactaggttagatctctatctagacactttacactatcaacctagataggtagagggtttaggatagaagataaagttcgacctgcgactagtagcataagactttcttatttacaaccagatcaagacagacagatcaggacagacaggcgcaaacaaaagacactgattcaagacatcaaccaaaagaaaggctatctccaactccagcctccatattgcagtcttgatcacccagaaattcgcatgtctctcgggcaccatccaaacgcccggtcaaacgcttcacttgctatctttcggattaacttacttccttggaccaccattttttgctccttctttctctgtcgaatagcccaggaatccaaccagaagcagcaaagaaaaatgatgttagaagggtcaagtatagttttattaccaaagcactaatcatttctagtgcgccaaattgcccagaacatagctccacagccaaacaaaat

SEQ ID NO: 77987 - DNA, 423 bp, Zea Mays
agcccgtccgacgcgtacgggtagtcctccatcagcagcagcagcaccttagtagattattacatcttgatcaggtcgtcggggagtacctgctcggtgaagttccatcttccgtagactggcgcgggaagaaggtcctctctaaaaagccgccggcgttgacgagcagctggcgcgcgctggagtattgacatcagttcgaggtcctgtaggaatgccctactcgtactatatatcttgggcgagtgcttgtttaaataatcggacatggccggtggggctctctaccgcgacctggtacaggagcgactctcctctgtgtacgtccggacggcacagtagaaaagagctcatagactgcggcacctataaattatcactggcggtttcgggttatcgcgcgccagtaaaaaacgaggtggg

SEQ ID NO: 77988 - DNA, 1269 bp, Zea Mays
gagcccagaggcccagggtttcgctgtcaccgcacacctcagcgagtctggtgccggcggctgtgacgaggacagcagcaatgcaatggcgagaggaactggaggacgggtaagcgagggcacgtgaagccgttggacgcagggtggaggctatacataacagcttgatacaattggaagagagcattcggtcacctcaaggaagacgagccagttgtgagctccggaaccgaatcctctccgaaggtggtaaccaggcggggtcccatccaagcacactgcaacgcgatgaagcaggccacggcgatcagtatccggctccagacgtgccgccgatcggaaagaaaaaggaggctacggttagtttgaccgaatacccgctcccttcccccgagcgccggcgaggagtgtcaagtcaacgagcctcgatgagctggccggtgccgccaccggtgagcgggagaaggcgacagcggccaggaggagcgcgtgcaggggcgcggccacgacgacggcgagagcgcgtcgacgctgctggtgcgggatgagcggcgacagtagctcggtggccatgaccgtcgcgcgcgggaggagctagtagctagaggaaaagtgtggaagccatgcttgaaagcccgaacccacctactaccatgccatgccatgccagtttgcgagaagtatcaggctggaagaggtcaaactgatgcgcagtttctccagaaaaaaaaaacagatggttgagtggttccaaactactatatgcagtatagaaatcgttggtgtgccaatcgagagtgacgaattacgacaagctacggtcctcctgttttcagacatgtggttcaactccgatctttcttgccgagattcttaccatgtcggaccccgaatctcctgacgggcgacgagacgacagaaatcagaattgcagtcccgttctgctcctggaggccccgcccgcggcttcgccatggagacgcgcggcaagcggctcctcttccccgttctactggttctcatcgccgctgccgcggctccgtccgccatgtcccgtgacgagagagaggtgatggaggtgtccggtgcggcggtgtgccggacggggttgtgcgggtggcccagccccagctcacggatctccacttcagcgtgcaccatgcggagcgcgcctacgacttccggcggtatgtcggcccggcgatggccatggtcaaccccgacctcgtgccgatcacaggggaccttaactgggcttgtcaatgaaag

SEQ ID NO: 77989 - DNA, 1435 bp, Zea Mays
cccacagcttgcgtggtctgtggtctcatctcactcacactcactctctctctcggcgacgtctacgccgagtgcccaggcattcttcaggcgcaggtcgctgccgccctacgccaggtgccccggtcttctttcgtcccttcgccggcgacgaccaccgccaggacagtatagcggatggcttcgtcggtgcgggcgccatcggggtcggtgatcgccgtggcatcgtcctcttcctcagcagccttggccggggtgtgcggcacgggctcgccgtgcgccgcgtgcaagttcctgcgtcgcaagtgccagccggactgcgtgttcgcgccctacttcccaccggacaacccgcagaagttcgtgcgcgtgcaccgcgtcttcggcgcgagcaacgtgaccaagctgatgaacgaaatccacccgttgcagcgcgaggacgccatgaactcgctcgcctacgaggccgacatgcgaattcgcgaccccgtctacggctgcgtgggcgtcatctccatcctccagcacaacctacggcagctccagcaggacctcgcccgcgccaagtacgagctctccaagtaccaggcggcagcggcggcagcatccgcgtcgacggcgccgaccgggccgcaggcgatggcagagttcatcggcagcgcgatgccgaacggcgccgcgcacaacttcatcaaccttggacactcggcggcgctcggctccctcggaggctccaccgccatgttcgggcagcaggagcagttcggcagcaacgcgcagatgctgtccaggagctacgacggcggcgagcccatcgcgaggatagggatgaacaacggcggctacgagttcggttactcgagcgcgacgacgatgggcgggtctgcaggcgctgtctctggcggcctcgggacgctcggcatcagcagcccgccgttcttgaagtctggaaccgccggcggcgacgagaagcccagcggcggttactgacgcgatgaagaaacggggaggaaaaaaatatccatgaaacgcgtgcaaggacttatcctagacgtccgccgttgtcaggagggggctaatttccagacgattttacatggaaaaagtgcgtcgcttgcgtgcgtgcgtgcttgcttttgttgctagattcattgcttgtttgttaattaccacgctatctaccctccccatccacatcatccacgagatcgtcagatattccatgccagcgtccacagagtggcctatgttcttgttattagttgctgtactgcgaagggagggggacaaaatgcatgcttgtccggcccggacctttttttttaccccactcggaagactagcgcccatttgtactccatgtattattgctaggttggctgtaatatatgaagttgaccttttgagaagaggtgcagttgcttatgaagacccc

SEQ ID NO: 77990 - DNA, 1268 bp, Zea Mays
cccacagcttgcgtggtctgtggtctcatctcactcacactcactctctctctcggcgacgtctacgccgagtgcccaggcattcttcaggcgcaggtcgctgccgccctacgccaggtgccccggtcttctttcgtcccttcgccggcgacgaccaccgccagtatagcggatggcttcgtcggtgcgggcgccatcgggcgcgaggacgccatgaactcgctcgcctacgaggccgacatgcgaattcgcgaccccgtctacggctgcgtgggcgtcatctccatcctccagcacaacctacggcagctccagcaggacctcgcccgcgccaagtacgagctctccaagtaccaggcagcggcggcagcatccgcgtcgacggcgccgaccgggccgcaggcgatggcagagttcatcggcagcgcgatgccgaacggcgccgcgcacaacttcatcaaccttggacactcggcggcgctcggctccctcggaggctccaccgccatgttcgggcagcaggagcagttcggcagcaacgcgcagatgctgtccaggagctacgacggcggcgagcccatcgcgaggatagggatgaacaacggcggctacgagttcggttactcgagcgcgacgacgatgggcgggtctgcaggcgctgtctctggcggcctcgggacgctcggcatcagcagcccgccgttcttgaagtctggaaccgccggcggcgacgagaagcccagcggcggtcagtaggcggttccatccgtgtgaccgatccttctatccatccatccatccatcagtcttgtcaggttactgacgcgatgaagaaacggggaggaaaaaaatatccatgaaacgcgtgcaaggacttatcctagacgtccgccgttgtcaggagggggctaatttccagacgattttacatggaaaaagtgcgtcgcttgcgtgcgtgcgtgcttgcttttgttgctagattcattgcttgtttgttaattaccacgctatctaccctccccatccacatcatccacgagatcgtcagatattccatgccagcgtccacagagtggcctatgttcttgttattagttgctgtactgcgaagggagggggacaaaatgcatgcttgtccggcccggacctttttttttaccccactcggaagactagcgcccatttgtactccatgtattattgctaggttggctgtaatatatgaagttgaccttttgagaagaggtgcagttgcttatgaagacccc

SEQ ID NO: 77991 - DNA, 1432 bp, Zea Mays
cccacagcttgcgtggtctgtggtctcatctcactcacactcactctctctctcggcgacgtctacgccgagtgcccaggcattcttcaggcgcaggtcgctgccgccctacgccaggtgccccggtcttctttcgtcccttcgccggcgacgaccaccgccaggacagtatagcggatggcttcgtcggtgcgggcgccatcggggtcggtgatcgccgtggcatcgtcctcttcctcagcagccttggccggggtgtgcggcacgggctcgccgtgcgccgcgtgcaagttcctgcgtcgcaagtgccagccggactgcgtgttcgcgccctacttcccaccggacaacccgcagaagttcgtgcgcgtgcaccgcgtcttcggcgcgagcaacgtgaccaagctgatgaacgaaatccacccgttgcagcgcgaggacgccatgaactcgctcgcctacgaggccgacatgcgaattcgcgaccccgtctacggctgcgtgggcgtcatctccatcctccagcacaacctacggcagctccagcaggacctcgcccgcgccaagtacgagctctccaagtaccaggcagcggcggcagcatccgcgtcgacggcgccgaccgggccgcaggcgatggcagagttcatcggcagcgcgatgccgaacggcgccgcgcacaacttcatcaaccttggacactcggcggcgctcggctccctcggaggctccaccgccatgttcgggcagcaggagcagttcggcagcaacgcgcagatgctgtccaggagctacgacggcggcgagcccatcgcgaggatagggatgaacaacggcggctacgagttcggttactcgagcgcgacgacgatgggcgggtctgcaggcgctgtctctggcggcctcgggacgctcggcatcagcagcccgccgttcttgaagtctggaaccgccggcggcgacgagaagcccagcggcggttactgacgcgatgaagaaacggggaggaaaaaaatatccatgaaacgcgtgcaaggacttatcctagacgtccgccgttgtcaggagggggctaatttccagacgattttacatggaaaaagtgcgtcgcttgcgtgcgtgcgtgcttgcttttgttgctagattcattgcttgtttgttaattaccacgctatctaccctccccatccacatcatccacgagatcgtcagatattccatgccagcgtccacagagtggcctatgttcttgttattagttgctgtactgcgaagggagggggacaaaatgcatgcttgtccggcccggacctttttttttaccccactcggaagactagcgcccatttgtactccatgtattattgctaggttggctgtaatatatgaagttgaccttttgagaagaggtgcagttgcttatgaagacccc

SEQ ID NO: 77992 - DNA, 1734 bp, Zea Mays
cccacagcttgcgtggtctgtggtctcatctcactcacactcactctctctctcggcgacgtctacgccgagtgcccaggcattcttcaggcgcaggtcgctgccgccctacgccaggtgccccggtcttctttcgtcccttcgccggcgacgaccaccgccagtatagcggatggcttcgtcggtgcgggcgccatcggggtcggtgatcgccgtggcatcgtcctcttcctcagcagccttggccggggtgtgcggcacgggctcgccgtgcgccgcgtgcaagttcctgcgtcgcaagtgccagccggactgcgtgttcgcgccctacttcccaccggacaacccgcagaagttcgtgcgcgtgcaccgcgtcttcggcgcgagcaacgtgaccaagctgatgaacgaaatccacccgttgcagcgcgaggacgccatgaactcgctcgcctacgaggccgacatgcgaattcgcgaccccgtctacggctgcgtgggcgtcatctccatcctccagcacaacctacggcagctccagcaggacctcgcccgcgccaagtacgagctctccaagtaccaggcagcggcggcagcatccgcgtcgacggcgccgaccgggccgcaggcgatggcagagttcatcggcagcgcgatgccgaacggcgccgcgcacaacttcatcaaccttggacactcggcggcgctcggctccctcggaggctccaccgccatgttcgggcagcaggagcagttcggcagcaacgcgcagatgctgtccaggagctacgacggcggcgagcccatcgcgaggatagggatgaacaacggcggctacgagttcggttactcgagcgcgacgacgatgggcgggtctgcaggcgctgtctctggcggcctcgggacgctcggcatcagcagcccgccgttcttgaagtctggaaccgccggcggcgacgagaagcccagcggcggtcagtaggcggttccatccgtgtgaccgatccttctatccatccatccatccatcagtcttgtcaggtttggtttggttttgcatttgcatgctgcctgcacagtgttctagtctgttgtgttttgccttgtgcttccgattaattcgcgagtctggtggactactgttagtcagtttattttctaggtagaggcactaatgaagcatgactaaaataagggtttcattccatttccagggctaaataaataccttttgttgcatgatgctagttggagcgtccttgttcggaacaaaacattgtagtagaactgtttggatccataatatatattatcaatgatgactaggtgcatgcatgcatgcatatatatgtgtgtacttgaacactagagcttttctgagcttctttctgatcgacggaacgcgcagcatctgttttgtcaaactgttttgcttttagatcgggtggtacatgcacacgggcgtgttgaacagatctcttttcggtttttgcgtcgatcgtgtgtgtgcctgtgtggtcactggtgaacctaagcttccgtttcttttcttttcttttctttgacaagtgcgctcctggcctgctaaatctgttgaaacagaagagacgccattggctagcaaatcctggagctgttcttgtttgtatatatactatctcttggcagcacggtcctctaacaattaaccaagtgtattttttgtaaattaaaaaaaaatgtctatacgagggc

SEQ ID NO: 77993 - DNA, 2215 bp, Zea Mays
ctacagtctacgctgccggcgaccctggcctcgacctcgagcgctgaaacaggacacgaacgaactggaactggtgtctgttagggactgccgacccaatagcccatggtgcagcccaactatcttatgacttgtgctacaaaggagcaaggaaacatagcagcaggcgcaggcgcgcagcgatcaatcagcgagcaggacgagcggcaggggagaagcactcgagtcgagagcagatcaggatgtgtgtgaagatcgaccgcatgacgcccagacttccgctgtcgaggaggccatggccgcgggcgcgggagaccccgggcagctcgaccaactcttgctgctcgacccctacgccgaggacgacatcaccaactactgcgtcgagttccataatgctgtcgtcattaccatctactcctccatcatcatcaagccggagacgggcagcagtagcagctcttccttcgcgtgttcgaccaaatgtcctagccaggcactgcacaacattggtaagcccagtctggtagccgtggtgactattgcaggcacaccttcatctactttgattgatgctcaagtggtgctcggtgaaatgcaaccaagggaacatagcactttgatgacagccaccattgagttacgcttcattttatggtattttttcattctgtacctggttgctttacaacaaagtccaccatggccacaacccgttaaatcactggtagtagtcgaatacatcctgccaaagcctccttggttagcatttgatctaggcaatttgttcagaattcattacacctgcagtactagaagtgcttccttacagtatacattgcaattgtcacctgacgttgggaatattcagaaccaatgtttggatttgtgtttagtaaatttaatcactgggtcagcactgaacgtcatggttcagcagctgcttgtttctgttggctcccctagcaatgctcttgtgctcaagattccaattcagggtgttgtggatgcacttcataggaaaacacttcagggcacaggtctgaatgaagagcaaatgagacaggctagcgtcgcagacaatggtcatcgtcagctaaacaagataattgttgacttggatcaagataacattactgctaagaattatgcaattgcattttacacagagaagcacattcagattccatgcttgggcggtgaacacgaagttactttcttccatgagtatagagattcagttgaacgggtgtttgttgatcatccctcgtatcacagacctggaaatttatatggagctaaagttgttcttcttgggttccaacattatccggtcatgcttggtacaactgtgatcataccaactgcacttgttccacaaatgggaggaaaatatgaggacaaagttgtggttatccagacactgatgttcgttgtaggtatgaacaccctacgtcagagtttcttgggtaccaggttgcctgcagtgactggcgggtcatacgcttttgttatgtataccatttctatcatccttggtggacgttctgctaatgaacctagttcacacattaaatttctcggcatcatgcgtgggacacatggtgcgttgattgtggcttcagctttacagattatagttgccttcagtggcctttggtgtaatgttgccaggtatctgagttcactttcagctactgctttggtggcactagttgtatttggactgtatgagttagaaattccaagagcagggaaaataaaggctttgtccgttgatgcagtaatagtgtttggatcacaaaggattcctcaggaggaaagacaatgtacaaagattagctattccggtgccgcgggctccgccgccgcctccctcgtccgttgcctcggcgagcgcggtggcgccgacgcaaggcccgcaggcgcgctccacctaggcctccaggtcgtgggcgccacggcgcagagccggcccacggccaccgcggcggccgccagcacggccacgacggccagcatggagatcaccgggccgtacgagtacgacggccctctccccgccgctcccacgggcgcgcctccggtggcgtacgccaccggcatcagaagcgccggcggcatgggcgtcgacattgcccacgggctagatgccgctgagcgtgtttgctcgaaccgcgcgcgtgcagctccagatgagatggcagctctctag

SEQ ID NO: 77994 - DNA, 1189 bp, Zea Mays
caacgaacgagcacgcaccagcatcccacgacgccgaaaccgggaagcccgcaacgtaacgcaaccatcacgacgacgaggcgacgaccgaccactcctgccaccgttcctgaaatgcacagcgcagcggcaccggcaccggcaccggccgaaaaggccggggttcaggatctctcgggcagccagcccctcgtgatccccaaaccgatctccctgtcctctcaatcacacgacccgccgtacggccacgacccactgccgtctgacggttcatggaatgcgaggtacgttccgcgggtaccactccggtcaaaacgtgcagccttgcggagcgaaaaacgcacatgacatgccttgctcctactagtactaggccatgactcactccgcctccgcgtcgttcaacgaacctgctgcgcccgcttagcaaccaaaccaatgcgagcagccgcccaacttgtatattacccgatcgagctcccgatcctttaggcagccgcagccttcccttctcatcctcgactgctgatcggagaaagaaagctctccgatcggaggggtcaacaggctgtctgaaactctgaatgagctttgcggccggcagctccgaggatcaactcaactcgtcgccgctcgccatggaccggagaccggcgaggacgagaagcgaccctcctcacagcagcaggggcgcggtgcacgatgccgttgccgtcgagcagaagcagcaccggcggccgcaaggaacgggggcaccgccggtgtacttcaccgcggagctggtgctggcgtgcctgttcgtggccgtgtcgctggcgctcctcccgctcgtgctgccgccgctctcgccgccgccgtccctgctgctgctggtgcccgtgggcctgctggccgtgctcctcgcgctcgcgttcgtcccgctcgacgcgcacagccacctcgccgtcggctcctcccgctgatcccgtccgtacgcgggaggtggaggctggagatggagagggttaggcccgacgtacatagaatcagattagtttagtgacgaatacttactttttttcggggtgattttgagatatatttgctgtaaactggtcggatcaggtggattggaaccttgttttatttggtcccgcgcacttgacccaattgcagggaatgaacaccgtgcacgttatttcctactcga

SEQ ID NO: 77995 - DNA, 1028 bp, Zea Mays
tgcagattcattctgatggatagatggctaacctcttcagaaaaagttccaggcacatctgaatcccttgaggcaagattacaatcaggctcagcagaatcgtcctgagacagccaaaatacacttcaataatagtgtcttctaactagatagcgtcttctaactaaaatagggccccatttagttggccttctcaacatactttggcttcaaaaaaattccaaacaaagaggtggcaatccatagctactttttctctagtacaaaactcacagcaactccccctgctttgactcactgtgaaggtgggcaacttcgaagaaattacccacctgccactgtgattcagtttttcctctatcccctgttcgcaggactgctccggtccgcatcgagacagtctcctcgctaacgcggctggagtttccccaaggccgaccgccgccctgccggtgccgccttgaggtcggctgcagcctagccaacgtcaccttcataagcaagtcgcccaccaactgcccgcttcggccataggctgaagatccccacaaccaccgagatcggctgccccgagaaccatgcgacgacggaggaagaggcaccccagcacctccaccccacacgtcaggatgacctctgagccaatagccagaactccacaccgagatccacgaccaaggcatgctgcgccgtcggtggacgacagtgaatacagtttctataaactgggaatacagttcctataaactaggacataaactggtatgtttggaatcactccagtttgtacaaaccagattattaaaaattgagtgcttccaaacaggtcctaaactgaacagggcctagagactagcctggctggctgactaccagtacagtctgcacatatatttaaattaacttgctaggcagagagactagcctggctggctgactaccattacagtctgcacatattcaaattaacttgctaggcagacgtacctggtctatcttcaaggaaaccaaagacacagcatcaccaa

SEQ ID NO: 77996 - DNA, 1324 bp, Zea Mays
gcgcgaggcgatgctgcagtctccgcctccattccggcctggtgtccaccctttgtcgcttcttctctgcgaccatcgtcaccaccagccaccatcaccatccctcccctcggcctcgcggtcgcagcggtcagagcctccgagatggagctccgcctctgcctccgtctccacgcgcgcctccctcctgccacgacgccaccgcctttccaggcgaccgcggtgctcccggcctcccgccgccttcggacgggtggtagctacggggttgctcttaggcggcacacgaggcgttcgagtccggcaatctgcgcttcaataaccgacggcgagcagggcgtggctgtgaaggagaggagcgtctcggtgatcctcttgtccggagggcagggaaagagaatgggggcgaatatgccaaagcagtatctacctctactaggactaccaattgcattgtacaggttcctctctctatcataagagttttcaaattcctcaagttagcaaggtgatgtggacacaggaatccttacattttgtccacagtttaaaaacattctgtcaactgaaggaagtcaaagaagttgtggtagtgtgtgatccagactacagtgatgtatttgaaggttctattgacaacttgcaaataccccttaaatttgcacgcccgggaaaagagagacaagactctgtttttaatggacttcaggaaattgatggggattcagaactagtttgtgtccatgattctgcaaggcccttagtttcttctgaagatgtcttagaagatgctgcagtacatggagcagctgttcttggtgtgcctgtgaaagctacaataaaggagtgaaaactcttgaccggaaaactctctgggaaatgcaaactccacaggctatgaagcccaatttactcagagatggttttgagctcgttaaacgggatggccttgaagtcactgatgatgtatccattgtagaatatctaaaacaccctgtgtatatcacggaaggctcttatacaaacattaaggtgactacgcctgatgacttgctactagctgagcgcctgatgaatgaggaatagaggtgataggcaaaattagctctttgcctgattttacagacaagtacgattttgtaggacggcatttatctacacttctacagttttcaaaaaccaaaataattatggagctcatgctcgagatatctgagctctctgtagacattatgtcattctttctatattatatatcaatgaaaaaatggccacgctttctgccgagttcatgctttggcggaaaactggagctcaagctatg

SEQ ID NO: 77997 - DNA, 1645 bp, Zea Mays
gcgcgaggcgatgctgcagtctccgcctccattccggcctggtgtccaccctttgtcgcttcttctctgcgaccatcgtcaccaccagccaccatcaccatccctcccctcggcctcgcggtcgcagcggtcagagcctccgagatggagctccgcctctgcctccgtctccacgcgcgcctccctcctgccacgacgccaccgcctttccaggcgaccgcggtgctcccggcctcccgccgccttcggacgggtggtagctacggggttgctcttaggcggcacacgaggcgttcgagtccggcaatctgcgcttcaataaccgacggcgagcagggcgtggctgtgaaggagaggagcgtctcggtgatcctcttgtccggagggcagggaaagagaatgggggtaccatgtctcttctgcttcaaacgtgtcttcagttttttttttttttttgtcgcaacagtgcgagggcatgctctctagttcttgtgcgttcgttggggatatgttcaccagtttgatcagtttggggacaataaggtcaccctgacagttcagtttttcagttactgataatggagtctttgagcaacactctaatttaaagtattataaacatattataccaaggctgtgtgctctattgaacaaatgaatcgagttaagccaaaaaaagtcattgttgtttgctatcaatatagatgaattgcagcgaaatgttttactgagcactgtaaaaatatttgcattagtgtgttcttccaatgcttcattgctgtctaattctgcccatcttttttaacaggcgaatatgccaaagcagtatctacctctactaggactaccaattgcatttttaaaaacattctgtcaactgaaggaagtcaaagaagttgtggtagtgtgtgatccagactacagtgatgtatttgaaggttctattgacaacttgcaaataccccttaaatttgcacgcccgggaaaagagagacaagactctgtttttaatggacttcaggaaattgatggggattcagaactagtttgtgtccatgattctgcaaggcccttagtttcttctgaagatgtaaaaaaggtcttagaagatgctgcagtacatggagcagctgttcttggtgtgcctgtgaaagctacaataaaggagtgaaaactcttgaccggaaaactctctgggaaatgcaaactccacaggctatgaagcccaatttactcagagatggttttgagctcgttaaacgggatggccttgaagtcactgatgatgtatccattgtagaatatctaaaacaccctgtgtatatcacggaaggctcttatacaaacattaaggtgactacgcctgatgacttgctactagctgagcgcctgatgaatgaggaatagaggtgataggcaaaattagctctttgcctgattttacagacaagtacgattttgtaggacggcatttatctacacttctacagttttcaaaaaccaaaataattatggagctcatgctcgagatatctgagctctctgtagacattatgtcattctttctatattatatatcaatgaaaaaatggccacgctttctgccgagttcatgctttggcggaaaactggagctcaagctatg

SEQ ID NO: 77998 - DNA, 1257 bp, Zea Mays
cgtggattgaccgaagcgcgaggcgatgctgcagtctccgcctccattccggcctggtgtccaccctttgtcgcttcttctctgcgaccatcgtcaccaccagccaccatcaccatccctcccctcggcctcgcggtcgcagcggtcagagcctccgagatggagctccgcctctgcctccgtctccacgcgcgcctccctcctgccacgacgccaccgcctttccaggcgaccgcggtgctcccggcctcccgccgccttcggacgggtggtagctacggggttgctcttaggcggcacacgaggcgttcgagtccggcaatctgcgcttcaataaccgacggcgagcagggcgtggctgtgaaggagaggagcgtctcggtgatcctcttgtccggagggcagggaaagagaatgggggcgaatatgccaaagcagtatctacctctactaggactaccaattgcatttttaaaaacattctgtcaactgaaggaagtcaaagaagttgtggtagtgtgtgatccagactacagtgatgtatttgaaggttctattgacaacttgcaaataccccttaaatttgcacgcccgggaaaagagagacaagactctgtttttaatggacttcaggaaattgatggggattcagaactagtttgtgtccatgattctgcaaggcccttagtttcttctgaagatgtaaaaaaggtcttagaagatgctgcagtacatggagcagctgttcttggtgtgcctgtgaaagctacaataaaggagtgaaaactcttgaccggaaaactctctgggaaatgcaaactccacaggctatgaagcccaatttactcagagatggttttgagctcgttaaacgggatggccttgaagtcactgatgatgtatccattgtagaatatctaaaacaccctgtgtatatcacggaaggctcttatacaaacattaaggtgactacgcctgatgacttgctactagctgagcgcctgatgaatgaggaatagaggtgataggcaaaattagctctttgcctgattttacagacaagtacgattttgtaggacggcatttatctacacttctacagttttcaaaaaccaaaataattatggagctcatgctcgagatatctgagctctctgtagacattatgtcattctttctatattatatatcaatgaaaaaatggccacgctttctgccgagttcatgctttggcggaaaactggagctcaagctatg

SEQ ID NO: 77999 - DNA, 1263 bp, Zea Mays
cgtggattgaccgaagcgcgaggcgatgctgcagtctccgcctccattccggcctggtgtccaccctttgtcgcttcttctctgcgaccatcgtcaccaccagccaccatcaccatccctcccctcggcctcgcggtcgcagcggtcagagcctccgagatggagctccgcctctgcctccgtctccacgcgcgcctccctcctgccacgacgccaccgcctttccaggcgaccgcggtgctcccggcctcccgccgccttcggacgggtggtagctacggggttgctcttaggcggcacacgaggcgttcgagtccggcaatctgcgcttcaataaccgacggcgagcagggcgtggctgtgaaggagaggagcgtctcggtgatcctcttgtccggagggcagggaaagagaatgggggcgaatatgccaaagcagtatctacctctactaggactaccaattgcattgtacagtttaaaaacattctgtcaactgaaggaagtcaaagaagttgtggtagtgtgtgatccagactacagtgatgtatttgaaggttctattgacaacttgcaaataccccttaaatttgcacgcccgggaaaagagagacaagactctgtttttaatggacttcaggaaattgatggggattcagaactagtttgtgtccatgattctgcaaggcccttagtttcttctgaagatgtaaaaaaggtcttagaagatgctgcagtacatggagcagctgttcttggtgtgcctgtgaaagctacaataaaggagtgaaaactcttgaccggaaaactctctgggaaatgcaaactccacaggctatgaagcccaatttactcagagatggttttgagctcgttaaacgggatggccttgaagtcactgatgatgtatccattgtagaatatctaaaacaccctgtgtatatcacggaaggctcttatacaaacattaaggtgactacgcctgatgacttgctactagctgagcgcctgatgaatgaggaatagaggtgataggcaaaattagctctttgcctgattttacagacaagtacgattttgtaggacggcatttatctacacttctacagttttcaaaaaccaaaataattatggagctcatgctcgagatatctgagctctctgtagacattatgtcattctttctatattatatatcaatgaaaaaatggccacgctttctgccgagttcatgctttggcggaaaactggagctcaagctatg

SEQ ID NO: 78000 - DNA, 1489 bp, Zea Mays
gccactctgcgcccatcgcggccactctatattatctctctttcgcccacctgatcaggcgtcgccgccatccaccggacgcggcagccatggcgccagcggtgaggctcaagcgctcctccacccagactatcacactgccgccgcccgacgcgcggctggctgtgcgcgatgtcatgcggtccacgatcccgtcgcggcccgccgaggctccggcgtccacggagaggccggcgcccgccgcggcgctgcaggggttcctgtgcctggaggaggtggacgggaggcgctggagctatgtggtggacggcgggtccgcgaaggggaggggcagtggcggggtcgctgtccccgctggcgcctccgtcagggccgtaccgctgcagtcgccgcttccgcctgccgaggaaataatgtcattcataagatcatatgttgtgcctgaagggtttccagacagtgttactccttcatatgtaccttacatgaactggagggctctgaagcatttctttggtggtgccatgggggtgtttacgacaagaaccttgctgagttctgttggagtctctcaaagcaaggtaataccaggtgccattgctatcaactggatcctcaaggtaaaaatattatgtctattcaggagctcttctttctcttgttcaccatactaacctgtacaatgtattcaagtcaatattctaactatccagagtgaataccctttattaactactgggctttttttgcacacaagatattagccatgttaccattaccacatactctgttctgttataccaagctttaatgcttaggaatcatgtggatgccccctggcttgtaaggtaatatggttatcatcgcacttgtaccacaggatggtgctgggcgtgttggaaaaatgctttttgcacgtcaaggaaagaagtttgacaatgacctaaagcagttgcggttttctagtgatctcttgttggaaataggagctgggatagaattaactactgctgcattccctcagtttttcttgcctatggcctgtgtagccaatgttgtaaagaacgtcgctgctgttacatcaacttcaactcgcactcctatctataaggcctatgctagaggagaaaacattggagatgtcactgctaaaggcgaatctgtcgggaacattgcagatctgcttggtactggtttgagtatctttatctcaaaaaggaacccgtcactggtgacttcgtttgccttcctttcctgtggatatctcctgagttcatatcaagaggtgagatctgttgtgctgaataccctaaacagagcgaggttcaccgtcgcagtagattccttcattaaaactggtcacattccctccttgaaggaaggaaactcacaggagacgatatttaatccaccttggcggcacgagacagtcgccataggtttgtgcaagtgcaagtgttattcaaattgtgttcctttcttgagatac

SEQ ID NO: 78001 - DNA, 692 bp, Zea Mays
tgcccagaacataatcaagcttccactcgtgcattgatttatgggtaatagtcatatacatcacactaccatagtaccatgggtactgagtatccaatcatttacaactccagcacacaagatcgatgacataaggattcaggaaataaaaatataagcatgggtatacacagaaggggcataaactagatcaggtcctaaacttacaaggtcttccacaagtgtgtagttccaaattacaagcagccagtagtacatctgctgctgggcatcgcataatatgcccgcctgtggcaacgtgggctggggcagttgtacttgtactactagctcgatcacgtcatctcacaggtctcccagtcctcgtccatctcgcggaggccggctagggttcgcgggcgggattccgagggcaaataggaggggaaccgttggatgaaggcggactggagcgagtggtgtgccgtgtcgggtcggggaacgggggccgcagattcgcgagctgcaaggaaacggtggttatttcgcgcttgcttgcttgattgcttggagtttagcgtgtgtggggaagaagggggcaggaattcgattcctttttttgtttgtgcacgagtcatcaacagcgattcggttggtcgcgagtaaaccagcaaattttacagatctgtgggcattccattttttccacatgg

SEQ ID NO: 78002 - DNA, 995 bp, Zea Mays
taagtaaggtgggtgtaccagaggtactgcgaggagatgaaggagctgtcgctgacgatcatggagctgctggagctgagcctgggcgtggagctgcgcggctactaccgggagttcttcgaggacagccggtccatcatgcggtgcaactactacccgccgtgcccggagccggagcgcacgctgggcacgggcccgcactgcgaccccacggcgctcaccatcctcctgcaggacgacgtgggcgggctggaggtgctggtggacggtgagtggcgccccgtccggcccgtcccgggcgccatggtcatcaacatcggcgacaccttcatggcgctgtcgaacgggaggtacaagagctgcctgcaccgcgcggtggtgaaccagcggcgggcgcggcggtcgctggccttcttcctgtgcccgcgcgaggaccgggtggtgcgcccgccggccagtgctgcgccgcggcgctacccggacttcacctgggccgacctcatgcgcttcacgcagcgccactaccgcgccgacacccgcacgctggacgccttcacccgctggctctcccacggcccggcccaggcggcggcgcctccctgcacctagcgagccgggccaaggccgtctctttcgccccacgtgcgcgcccagctgggcaggtggccagacacgcggcccgcgggccccgcgccgccttgccattttttgacgctggccctactgctgtgctactagtgtacatatgcaagagtacatatatatatatatatatacgtattttctatatattatatataaaagcaaggcggcccggtgcccttctcttgttttgtccacaactgtttgatcccattattctatggaccatggatacttcaatgtttgtactaagaccgtgaacgtgggattcttttccttcctctgtgttttttctgagaaaaattaaactgatttctgtgaaatttctttgttttaacaagaaaacagaaaaa

SEQ ID NO: 78003 - DNA, 1615 bp, Zea Mays
acggatcaaaatagcatcattacatgcttgcttgcacacctgcattgctataatcatgtcagaactgatgaacctggcggatcggcaaatgtcgctccaaagaaaaggagaagaaaggatgcatcaagtacttatctggagactaatcatcttgctccagttgattattttgatattggctatgtacctggaaaatcctctgcaagaggtactgcgaaggtgggaaaacaattagctagtagcaacataggttcttatggtcaataccacgaagacaatagagtggtgaagaataaaaccagtggtcctggaggagcccctagaagaaaatcttctgaattctcggttggtgatgctgcagcacgcgctaaggttattaaggatgtctcagatgctcctttggagctaagagacttggaaaagcaaaaggctgcaccaccacctgtttcctatgcacataagtcaaaaaccagtgaggcatttgattatgcttatccagctgacagggataaaggcacttcagcacaacttggtttccaacaaagaaaggtaagtggagaaaatcaagatccatcaaatagaatatatcacaaagagaagcattgaacaagtgaatatcctggcttggttatggctagtgcggcctattctacacaaacaatggttcatgtattaaacccaaaggcaccaggcttgagcgaggtattcgtgacctccagaagattgctgcagaatcttgcagagttatggcctcaaggtttcatggatagtgttggaatcaaagatgccatttatagatgaaaggagcgaagaagattatactacagccagcaaaaggttcgcagcgaagagagaatgaaaaggaagaggctggctgcagcagcaaagctggaagatggcttcccagttgtaatgcgagctggtgttgccccacaagtttcacaaccacccataacaaacaacatcacataccagattatggacagaaccaggggtttaaattttttgacagggctcgtgaaacgagctccagtggaattcctgatgacggcaacagaaatattggcgagatcaagaagaaaagaaaacctgaatacgatgttgtagatacacaagctaacctaccaaaggctcccttaccgcatgggagagaagcaaaagccttctaagcctgctgacgaggccagtgctggtagcctgccctccacgtcgacaactcaaactgtgcttggcctaccctaccatcggtgcttggtcataaccaacaacctaactgatcatttcggcatattgttggacatttggttatccttataggctcttttcagctgctgtacaaaattatggcatttccatgtgttcagcatccatggtcaaggccatcacctttccgagtcgagaggatatttgaccatttgcaattttctagcattgcttggttcctttggccaggttatctgtgccacgctgataaatatggtcagatgcagatttgcacccctacaaatatcggttgtaattatgaatcgtttctgagacatgcgttcatattgtgcgatttaaaatctcattcagcgaggtgcagatttaatatcattgacaaccgcacaaaaca

SEQ ID NO: 78004 - DNA, 1637 bp, Zea Mays
acggatcaaaatagcatcattacatgcttgcttgcacacctgcattgctataatcatgtcagaactgatgaacctggcggatcggcaaatgtcgctccaaagaaaaggagaagaaaggatgcatcaagtacttatctggagactaatcatcttgctccagttgattattttgatattggctatgtacctggaaaatcctctgcaagaggtactgcgaaggtgggaaaacaattagctagtagcaacataggttcttatggtcaataccacgaagacaatagagtggtgaagaataaaaccagtggtcctggaggagcccctagaagaaaatcttctgaattctcggttggtgatgctgcagcacgcgctaaggttattaaggatgtctcagatgctcctttggagctaagagacttggaaaagcaaaaggctgcaccaccacctgtttcctatgcacataagtcaaaaaccagtgaggcatttgattatgcttatccagctgacagggataaaggcacttcagcacaacttggtttccaacaaagaaaggtaagtggagaaaatcaagatccatcaaatagaatatatcacaaagagaagcattgaacaagtgaatatcctggcttggttatggctagtgcggcctattctacacaaacaatgcacccagttgttggtagggcaggttcatgtattaaacccaaaggcaccaggcttgagcgaggtattcgtgacctccagaagattgctgcagaatcttgcagagttatggcctcaaggtttcatggatagtgttggaatcaaagatgccatttatagatgaaaggagcgaagaagattatactacagccagcaaaaggttcgcagcgaagagagaatgaaaaggaagaggctggctgcagcagcaaagctggaagatggcttcccagttgtaatgcgagctggtgttgccccacaagtttcacaaccacccataacaaacaacatcacataccagattatggacagaaccaggggtttaaattttttgacagggctcgtgaaacgagctccagtggaattcctgatgacggcaacagaaatattggcgagatcaagaagaaaagaaaacctgaatacgatgttgtagatacacaagctaacctaccaaaggctcccttaccgcatgggagagaagcaaaagccttctaagcctgctgacgaggccagtgctggtagcctgccctccacgtcgacaactcaaactgtgcttggcctaccctaccatcggtgcttggtcataaccaacaacctaactgatcatttcggcatattgttggacatttggttatccttataggctcttttcagctgctgtacaaaattatggcatttccatgtgttcagcatccatggtcaaggccatcacctttccgagtcgagaggatatttgaccatttgcaattttctagcattgcttggttcctttggccaggttatctgtgccacgctgataaatatggtcagatgcagatttgcacccctacaaatatcggttgtaattatgaatcgtttctgagacatgcgttcatattgtgcgatttaaaatctcattcagcgaggtgcagatttaatatcattgacaaccgcacaaaaca

SEQ ID NO: 78005 - DNA, 2360 bp, Zea Mays
cattatatcgtctaattaaaagatttaatcaccgaaccgatttcatatccgcgttcctgacatttttgcgaacgaaactagaccactcatactatatatatttcaaataaaaaaattacgtgattaagattaatatataattagtgtatattaacatgtaattagtatctattaagcaatttaccatataattagtgtctattaatagattttttaaatttttttaactcatgcaccatgtactcatgcaagcaaccaaacaacatctcttgtgaaccagactggccacatacacacaaccaaacacgctatactgcatgcactcagccagtccagtctgagccaggctcactagatacgagccaggctcacccatacaagtaaccaaacgccccctaagagaacctggaaccggctgcgtctgggagagtggctgggtgccgtcgtgtacgaactccaactatacctatactccagaaatcttcgtgagaggaagtcgagcgccgggagcggcgctcaactcatccgctcaacggggttctaacactatccatggaagaccccgtggcggcgccctcttcgtcttccgccgccccagctgcttccgcagcggctaggatttcggcggcggcggcggcggcggtaacatctgccgttacctctgcgccgcccgctctcgctccgctgcagccgtctggcaccgccgctgcggtccctgaagccgcgtcgacgtgccggaggcagctgttcacggtggagctgcggccaggggagtccacaatcgtgtcgtggaagaagcttctcaaggaggccgggcacaccgccacggcaccgccagtggcgccggagccaaagttcgctgcacatgcgggcccatctggtgctgtaagcagtcattttgcggttgttgcgtgttggttggttacttggttacctgctgcatcgatgtaatctgtgcgctatctagcttagccttttgagttcatgaaaatagaaggattccctgctgactgaaggtaagatctggaagatggaacgtgagggccgtttgtgtttggtgcctgtgctctatcttccagagatgttctacagcgagtatcagttcctcttgtaatctgccaaaaccttgaaagcatataggtccaaatcaatgacacctcatcgtgatggattgttgtacctgttcatgccaaaaccttatcattcttgaacatgatgttcttagcattcagcatttcatcagtgtgaaaagcacatcctgcagaaaatgacccaaaggatccaatgcagtcattgaaaaaattgagtgcctttacatgggaaaacatagcagtgacgaagaggatcttaatgatgtaccagatgatgatcagtatgacactgaggattctttcgttgatgatgctgaattggatgaatattttgaagtcgataatttgaaaactaagcacgatgggtattttgtgaacaagggaagttggatcagatcttgcagagttatggcctcaaggtttcatggatagtgttggaatcaaagatgccatttatagatgaaaggagcgaagaagattatactacagccagcaaaagcgaagagagaatgaaaaggaagaggctggctgcagcagcaaagctggaagatggcttcccagttgtaatgcgagctggtgttgccccacaagtttcacaaccacccataacaaacaacatcacataccagattatggacagaaccaggggtttaaattttttgacagggctcgtgaaacgagctccagtggaattcctgatgacggcaacagaaatattggcgagatcaagaagaaaagaaaacctgaatacgatgttgtagatacacaagctaacctaccaaaggctcccttaccgcatgggagagaagcaaaagccttctaagcctgctgacgaggccagtgctggtagcctgccctccacgtcgacaactcaaactgtgcttggcctaccctaccatcggtgcttggtcataaccaacaacctaactgatcatttcggcatattgttggacatttggttatccttataggctcttttcagctgctgtacaaaattatggcatttccatgtgttcagcatccatggtcaaggccatcacctttccgagtcgagaggatatttgaccatttgcaattttctagcattgcttggttcctttggccaggttatctgtgccacgctgataaatatggtcagatgcagatttgcacccctacaaatatcggttgtaattatgaatcgtttctgagacatgcgttcatattgtgcgatttaaaatctcattcagcgaggtgcagatttaatatcattgacaaccgcacaaaaca

SEQ ID NO: 78006 - DNA, 2284 bp, Zea Mays
cattatatcgtctaattaaaagatttaatcaccgaaccgatttcatatccgcgttcctgacatttttgcgaacgaaactagaccactcatactatatatatttcaaataaaaaaattacgtgattaagattaatatataattagtgtatattaacatgtaattagtatctattaagcaatttaccatataattagtgtctattaatagattttttaaatttttttaactcatgcaccatgtactcatgcaagcaaccaaacaacatctcttgtgaaccagactggccacatacacacaaccaaacacgctatactgcatgcactcagccagtccagtctgagccaggctcactagatacgagccaggctcacccatacaagtaaccaaacgccccctaagagaacctggaaccggctgcgtctgggagagtggctgggtgccgtcgtgtacgaactccaactatacctatactccagaaatcttcgtgagaggaagtcgagcgccgggagcggcgctcaactcatccgctcaacggggttctaacactatccatggaagaccccgtggcggcgccctcttcgtcttccgccgccccagctgcttccgcagcggctaggatttcggcggcggcggcggcggcggtaacatctgccgttacctctgcgccgcccgctctcgctccgctgcagccgtctggcaccgccgctgcggtccctgaagccgcgtcgacgtgccggaggcagctgttcacggtggagctgcggccaggggagtccacaatcgtgtcgtggaagaagcttctcaaggaggccgggcacaccgccacggcaccgccagtggcgccggagccaaagttcgctgcacatgcgggcccatctggtgctgtaagcagtcattttgcggttgttgcgtgttggttggttacttggttacctgctgcatcgatgtaatctgtgcgctatctagcttagccttttgagttcatgaaaatagaaggattccctgctgactgaaggtaagatctggaagatggaacgtgagggccgtttgtgtttggtgcctgtgctctatcttccagagatgttctacagcgagtatcagttcctcttgtaatctgccaaaaccttgaaagcatataggtccaaatcaatgacacctcatcgtgatggattgttgtacctgttcatgccaaaaccttatcattcttgaacatgatgttcttagcattcagcatttcatcagtgtgaaaagcacatcctgcagaaaatgacccaaaggatccaatgcagtcattgaaaaaattgagtgcctttacatgggaaaacatagcagtgacgaagaggatcttaatgatgtaccagatgatgatcagtatgacactgaggattctttcgttgatgatgctgaattgcttgcagagttatggcctcaaggtttcatggatagtgttggaatcaaagatgccatttatagatgaaaggagcgaagaagattatactacagccagcaaaagcgaagagagaatgaaaaggaagaggctggctgcagcagcaaagctggaagatggcttcccagttgtaatgcgagctggtgttgccccacaagtttcacaaccacccataacaaacaacatcacataccagattatggacagaaccaggggtttaaattttttgacagggctcgtgaaacgagctccagtggaattcctgatgacggcaacagaaatattggcgagatcaagaagaaaagaaaacctgaatacgatgttgtagatacacaagctaacctaccaaaggctcccttaccgcatgggagagaagcaaaagccttctaagcctgctgacgaggccagtgctggtagcctgccctccacgtcgacaactcaaactgtgcttggcctaccctaccatcggtgcttggtcataaccaacaacctaactgatcatttcggcatattgttggacatttggttatccttataggctcttttcagctgctgtacaaaattatggcatttccatgtgttcagcatccatggtcaaggccatcacctttccgagtcgagaggatatttgaccatttgcaattttctagcattgcttggttcctttggccaggttatctgtgccacgctgataaatatggtcagatgcagatttgcacccctacaaatatcggttgtaattatgaatcgtttctgagacatgcgttcatattgtgcgatttaaaatctcattcagcgaggtgcagatttaatatcattgacaaccgcacaaaaca

SEQ ID NO: 78007 - DNA, 2292 bp, Zea Mays
cattatatcgtctaattaaaagatttaatcaccgaaccgatttcatatccgcgttcctgacatttttgcgaacgaaactagaccactcatactatatatatttcaaataaaaaaattacgtgattaagattaatatataattagtgtatattaacatgtaattagtatctattaagcaatttaccatataattagtgtctattaatagattttttaaatttttttaactcatgcaccatgtactcatgcaagcaaccaaacaacatctcttgtgaaccagactggccacatacacacaaccaaacacgctatactgcatgcactcagccagtccagtctgagccaggctcactagatacgagccaggctcacccatacaagtaaccaaacgccccctaagagaacctggaaccggctgcgtctgggagagtggctgggtgccgtcgtgtacgaactccaactatacctatactccagaaatcttcgtgagaggaagtcgagcgccgggagcggcgctcaactcatccgctcaacggggttctaacactatccatggaagaccccgtggcggcgccctcttcgtcttccgccgccccagctgcttccgcagcggctaggatttcggcggcggcggcggcggcggtaacatctgccgttacctctgcgccgcccgctctcgctccgctgcagccgtctggcaccgccgctgcggtccctgaagccgcgtcgacgtgccggaggcagctgttcacggtggagctgcggccaggggagtccacaatcgtgtcgtggaagaagcttctcaaggaggccgggcacaccgccacggcaccgccagtggcgccggagccaaagttcgctgcacatgcgggcccatctggtgctgtaagcagtcattttgcggttgttgcgtgttggttggttacttggttacctgctgcatcgatgtaatctgtgcgctatctagcttagccttttgagttcatgaaaatagaaggattccctgctgactgaaggtaagatctggaagatggaacgtgagggccgtttgtgtttggtgcctgtgctctatcttccagagatgttctacagcgagtatcagttcctcttgtaatctgccaaaaccttgaaagcatataggtccaaatcaatgacacctcatcgtgatggattgttgtacctgttcatgccaaaaccttatcattcttgaacatgatgttcttagcattcagcatttcatcagtgtgaaaagcacatcctgcagaaaatgacccaaaggatccaatgcagtcattgaaaaaattgagtgcctttacatgggaaaacatagcagtgacgaagaggatcttaatgatgtaccagatgatgatcagtatgacactgaggattctttcgttgatgatgctgaattgcttgcagagttatggcctcaaggtttcatggatagtgttggaatcaaagatgccatttatagatgaaaggagcgaagaagattatactacagccagcaaaaggttcgcagcgaagagagaatgaaaaggaagaggctggctgcagcagcaaagctggaagatggcttcccagttgtaatgcgagctggtgttgccccacaagtttcacaaccacccataacaaacaacatcacataccagattatggacagaaccaggggtttaaattttttgacagggctcgtgaaacgagctccagtggaattcctgatgacggcaacagaaatattggcgagatcaagaagaaaagaaaacctgaatacgatgttgtagatacacaagctaacctaccaaaggctcccttaccgcatgggagagaagcaaaagccttctaagcctgctgacgaggccagtgctggtagcctgccctccacgtcgacaactcaaactgtgcttggcctaccctaccatcggtgcttggtcataaccaacaacctaactgatcatttcggcatattgttggacatttggttatccttataggctcttttcagctgctgtacaaaattatggcatttccatgtgttcagcatccatggtcaaggccatcacctttccgagtcgagaggatatttgaccatttgcaattttctagcattgcttggttcctttggccaggttatctgtgccacgctgataaatatggtcagatgcagatttgcacccctacaaatatcggttgtaattatgaatcgtttctgagacatgcgttcatattgtgcgatttaaaatctcattcagcgaggtgcagatttaatatcattgacaaccgcacaaaaca

SEQ ID NO: 78008 - DNA, 1994 bp, Zea Mays
cattatatcgtctaattaaaagatttaatcaccgaaccgatttcatatccgcgttcctgacatttttgcgaacgaaactagaccactcatactatatatatttcaaataaaaaaattacgtgattaagattaatatataattagtgtatattaacatgtaattagtatctattaagcaatttaccatataattagtgtctattaatagattttttaaatttttttaactcatgcaccatgtactcatgcaagcaaccaaacaacatctcttgtgaaccagactggccacatacacacaaccaaacacgctatactgcatgcactcagccagtccagtctgagccaggctcactagatacgagccaggctcacccatacaagtaaccaaacgccccctaagagaacctggaaccggctgcgtctgggagagtggctgggtgccgtcgtgtacgaactccaactatacctatactccagaaatcttcgtgagaggaagtcgagcgccgggagcggcgctcaactcatccgctcaacggggttctaacactatccatggaagaccccgtggcggcgccctcttcgtcttccgccgccccagctgcttccgcagcggctaggatttcggcggcggcggcggcggcggtaacatctgccgttacctctgcgccgcccgctctcgctccgctgcagccgtctggcaccgccgctgcggtccctgaagccgcgtcgacgtgccggaggcagctgttcacggtggagctgcggccaggggagtccacaatcgtgtcgtggaagaagcttctcaaggaggccgggcacaccgccacggcaccgccagtggcgccggagccaaagttcgctgcacatgcgggcccatctggtgctgcacatcctgcagaaaatgacccaaaggatccaatgcagtcattgaaaaaattgagtgcctttacatgggaaaacatagcagtgacgaagaggatcttaatgatgtaccagatgatgatcagtatgacactgaggattctttcgttgatgatgctgaattggatgaatattttgaagtcgataatttgaaaactaagcacgatgggtattttgtgaacaagggaagttggatcagatcttgcagagttatggcctcaaggtttcatggatagtgttggaatcaaagatgccatttatagatgaaaggagcgaagaagattatactacagccagcaaaagcgaagagagaatgaaaaggaagaggctggctgcagcagcaaagctggaagatggcttcccagttgtaatgcgagctggtgttgccccacaagtttcacaaccacccataacaaacaacatcacataccagattatggacagaaccaggggtttaaattttttgacagggctcgtgaaacgagctccagtggaattcctgatgacggcaacagaaatattggcgagatcaagaagaaaagaaaacctgaatacgatgttgtagatacacaagctaacctaccaaaggctcccttaccgcatgggagagaagcaaaagccttctaagcctgctgacgaggccagtgctggtagcctgccctccacgtcgacaactcaaactgtgcttggcctaccctaccatcggtgcttggtcataaccaacaacctaactgatcatttcggcatattgttggacatttggttatccttataggctcttttcagctgctgtacaaaattatggcatttccatgtgttcagcatccatggtcaaggccatcacctttccgagtcgagaggatatttgaccatttgcaattttctagcattgcttggttcctttggccaggttatctgtgccacgctgataaatatggtcagatgcagatttgcacccctacaaatatcggttgtaattatgaatcgtttctgagacatgcgttcatattgtgcgatttaaaatctcattcagcgaggtgcagatttaatatcattgacaaccgcacaaaaca

SEQ ID NO: 78009 - DNA, 2002 bp, Zea Mays
cattatatcgtctaattaaaagatttaatcaccgaaccgatttcatatccgcgttcctgacatttttgcgaacgaaactagaccactcatactatatatatttcaaataaaaaaattacgtgattaagattaatatataattagtgtatattaacatgtaattagtatctattaagcaatttaccatataattagtgtctattaatagattttttaaatttttttaactcatgcaccatgtactcatgcaagcaaccaaacaacatctcttgtgaaccagactggccacatacacacaaccaaacacgctatactgcatgcactcagccagtccagtctgagccaggctcactagatacgagccaggctcacccatacaagtaaccaaacgccccctaagagaacctggaaccggctgcgtctgggagagtggctgggtgccgtcgtgtacgaactccaactatacctatactccagaaatcttcgtgagaggaagtcgagcgccgggagcggcgctcaactcatccgctcaacggggttctaacactatccatggaagaccccgtggcggcgccctcttcgtcttccgccgccccagctgcttccgcagcggctaggatttcggcggcggcggcggcggcggtaacatctgccgttacctctgcgccgcccgctctcgctccgctgcagccgtctggcaccgccgctgcggtccctgaagccgcgtcgacgtgccggaggcagctgttcacggtggagctgcggccaggggagtccacaatcgtgtcgtggaagaagcttctcaaggaggccgggcacaccgccacggcaccgccagtggcgccggagccaaagttcgctgcacatgcgggcccatctggtgctgcacatcctgcagaaaatgacccaaaggatccaatgcagtcattgaaaaaattgagtgcctttacatgggaaaacatagcagtgacgaagaggatcttaatgatgtaccagatgatgatcagtatgacactgaggattctttcgttgatgatgctgaattggatgaatattttgaagtcgataatttgaaaactaagcacgatgggtattttgtgaacaagggaagttggatcagatcttgcagagttatggcctcaaggtttcatggatagtgttggaatcaaagatgccatttatagatgaaaggagcgaagaagattatactacagccagcaaaaggttcgcagcgaagagagaatgaaaaggaagaggctggctgcagcagcaaagctggaagatggcttcccagttgtaatgcgagctggtgttgccccacaagtttcacaaccacccataacaaacaacatcacataccagattatggacagaaccaggggtttaaattttttgacagggctcgtgaaacgagctccagtggaattcctgatgacggcaacagaaatattggcgagatcaagaagaaaagaaaacctgaatacgatgttgtagatacacaagctaacctaccaaaggctcccttaccgcatgggagagaagcaaaagccttctaagcctgctgacgaggccagtgctggtagcctgccctccacgtcgacaactcaaactgtgcttggcctaccctaccatcggtgcttggtcataaccaacaacctaactgatcatttcggcatattgttggacatttggttatccttataggctcttttcagctgctgtacaaaattatggcatttccatgtgttcagcatccatggtcaaggccatcacctttccgagtcgagaggatatttgaccatttgcaattttctagcattgcttggttcctttggccaggttatctgtgccacgctgataaatatggtcagatgcagatttgcacccctacaaatatcggttgtaattatgaatcgtttctgagacatgcgttcatattgtgcgatttaaaatctcattcagcgaggtgcagatttaatatcattgacaaccgcacaaaaca

SEQ ID NO: 78010 - DNA, 2196 bp, Zea Mays
cattatatcgtctaattaaaagatttaatcaccgaaccgatttcatatccgcgttcctgacatttttgcgaacgaaactagaccactcatactatatatatttcaaataaaaaaattacgtgattaagattaatatataattagtgtatattaacatgtaattagtatctattaagcaatttaccatataattagtgtctattaatagattttttaaatttttttaactcatgcaccatgtactcatgcaagcaaccaaacaacatctcttgtgaaccagactggccacatacacacaaccaaacacgctatactgcatgcactcagccagtccagtctgagccaggctcactagatacgagccaggctcacccatacaagtaaccaaacgccccctaagagaacctggaaccggctgcgtctgggagagtggctgggtgccgtcgtgtacgaactccaactatacctatactccagaaatcttcgtgagaggaagtcgagcgccgggagcggcgctcaactcatccgctcaacggggttctaacactatccatggaagaccccgtggcggcgccctcttcgtcttccgccgccccagctgcttccgcagcggctaggatttcggcggcggcggcggcggcggtaacatctgccgttacctctgcgccgcccgctctcgctccgctgcagccgtctggcaccgccgctgcggtccctgaagccgcgtcgacgtgccggaggcagctgttcacggtggagctgcggccaggggagtccacaatcgtgtcgtggaagaagcttctcaaggaggccgggcacaccgccacggcaccgccagtggcgccggagccaaagttcgctgcacatgcgggcccatctggtgctgtgcctgtgctctatcttccagagatgttctacagcgagtatcagttcctcttgtaatctgccaaaaccttgaaagcatataggtccaaatcaatgacacctcatcgtgatggattgttgtacctgttcatgccaaaaccttatcattcttgaacatgatgttcttagcattcagcatttcatcagtgtgaaaagcacatcctgcagaaaatgacccaaaggatccaatgcagtcattgaaaaaattgagtgcctttacatgggaaaacatagcagtgacgaagaggatcttaatgatgtaccagatgatgatcagtatgacactgaggattctttcgttgatgatgctgaattggatgaatattttgaagtcgataatttgaaaactaagcacgatgggtattttgtgaacaagggaagttggatcagatcttgcagagttatggcctcaaggtttcatggatagtgttggaatcaaagatgccatttatagatgaaaggagcgaagaagattatactacagccagcaaaaggttcgcagcgaagagagaatgaaaaggaagaggctggctgcagcagcaaagctggaagatggcttcccagttgtaatgcgagctggtgttgccccacaagtttcacaaccacccataacaaacaacatcacataccagattatggacagaaccaggggtttaaattttttgacagggctcgtgaaacgagctccagtggaattcctgatgacggcaacagaaatattggcgagatcaagaagaaaagaaaacctgaatacgatgttgtagatacacaagctaacctaccaaaggctcccttaccgcatgggagagaagcaaaagccttctaagcctgctgacgaggccagtgctggtagcctgccctccacgtcgacaactcaaactgtgcttggcctaccctaccatcggtgcttggtcataaccaacaacctaactgatcatttcggcatattgttggacatttggttatccttataggctcttttcagctgctgtacaaaattatggcatttccatgtgttcagcatccatggtcaaggccatcacctttccgagtcgagaggatatttgaccatttgcaattttctagcattgcttggttcctttggccaggttatctgtgccacgctgataaatatggtcagatgcagatttgcacccctacaaatatcggttgtaattatgaatcgtttctgagacatgcgttcatattgtgcgatttaaaatctcattcagcgaggtgcagatttaatatcattgacaaccgcacaaaaca

SEQ ID NO: 78011 - DNA, 2112 bp, Zea Mays
cattatatcgtctaattaaaagatttaatcaccgaaccgatttcatatccgcgttcctgacatttttgcgaacgaaactagaccactcatactatatatatttcaaataaaaaaattacgtgattaagattaatatataattagtgtatattaacatgtaattagtatctattaagcaatttaccatataattagtgtctattaatagattttttaaatttttttaactcatgcaccatgtactcatgcaagcaaccaaacaacatctcttgtgaaccagactggccacatacacacaaccaaacacgctatactgcatgcactcagccagtccagtctgagccaggctcactagatacgagccaggctcacccatacaagtaaccaaacgccccctaagagaacctggaaccggctgcgtctgggagagtggctgggtgccgtcgtgtacgaactccaactatacctatactccagaaatcttcgtgagaggaagtcgagcgccgggagcggcgctcaactcatccgctcaacggggttctaacactatccatggaagaccccgtggcggcgccctcttcgtcttccgccgccccagctgcttccgcagcggctaggatttcggcggcggcggcggcggcggtaacatctgccgttacctctgcgccgcccgctctcgctccgctgcagccgtctggcaccgccgctgcggtccctgaagccgcgtcgacgtgccggaggcagctgttcacggtggagctgcggccaggggagtccacaatcgtgtcgtggaagaagcttctcaaggaggccgggcacaccgccacggcaccgccagtggcgccggagccaaagttcgctgcacatgcgggcccatctggtgctgtgcctgtgctctatcttccagagatgttctacagcgagtatcagttcctcttgtaatctgccaaaaccttgaaagcatataggtccaaatcaatgacacctcatcgtgatggattgttgtacctgttcatgccaaaaccttatcattcttgaacatgatgttcttagcattcagcatttcatcagtgtgaaaagcacatcctgcagaaaatgacccaaaggatccaatgcagtcattgaaaaaattgagtgcctttacatgggaaaacatagcagtgacgaagaggatcttaatgatgtaccagatgatgatcagtatgacactgaggattctttcgttgatgatgctgaattgcttgcagagttatggcctcaaggtttcatggatagtgttggaatcaaagatgccatttatagatgaaaggagcgaagaagattatactacagccagcaaaagcgaagagagaatgaaaaggaagaggctggctgcagcagcaaagctggaagatggcttcccagttgtaatgcgagctggtgttgccccacaagtttcacaaccacccataacaaacaacatcacataccagattatggacagaaccaggggtttaaattttttgacagggctcgtgaaacgagctccagtggaattcctgatgacggcaacagaaatattggcgagatcaagaagaaaagaaaacctgaatacgatgttgtagatacacaagctaacctaccaaaggctcccttaccgcatgggagagaagcaaaagccttctaagcctgctgacgaggccagtgctggtagcctgccctccacgtcgacaactcaaactgtgcttggcctaccctaccatcggtgcttggtcataaccaacaacctaactgatcatttcggcatattgttggacatttggttatccttataggctcttttcagctgctgtacaaaattatggcatttccatgtgttcagcatccatggtcaaggccatcacctttccgagtcgagaggatatttgaccatttgcaattttctagcattgcttggttcctttggccaggttatctgtgccacgctgataaatatggtcagatgcagatttgcacccctacaaatatcggttgtaattatgaatcgtttctgagacatgcgttcatattgtgcgatttaaaatctcattcagcgaggtgcagatttaatatcattgacaaccgcacaaaaca

SEQ ID NO: 78012 - DNA, 2120 bp, Zea Mays
cattatatcgtctaattaaaagatttaatcaccgaaccgatttcatatccgcgttcctgacatttttgcgaacgaaactagaccactcatactatatatatttcaaataaaaaaattacgtgattaagattaatatataattagtgtatattaacatgtaattagtatctattaagcaatttaccatataattagtgtctattaatagattttttaaatttttttaactcatgcaccatgtactcatgcaagcaaccaaacaacatctcttgtgaaccagactggccacatacacacaaccaaacacgctatactgcatgcactcagccagtccagtctgagccaggctcactagatacgagccaggctcacccatacaagtaaccaaacgccccctaagagaacctggaaccggctgcgtctgggagagtggctgggtgccgtcgtgtacgaactccaactatacctatactccagaaatcttcgtgagaggaagtcgagcgccgggagcggcgctcaactcatccgctcaacggggttctaacactatccatggaagaccccgtggcggcgccctcttcgtcttccgccgccccagctgcttccgcagcggctaggatttcggcggcggcggcggcggcggtaacatctgccgttacctctgcgccgcccgctctcgctccgctgcagccgtctggcaccgccgctgcggtccctgaagccgcgtcgacgtgccggaggcagctgttcacggtggagctgcggccaggggagtccacaatcgtgtcgtggaagaagcttctcaaggaggccgggcacaccgccacggcaccgccagtggcgccggagccaaagttcgctgcacatgcgggcccatctggtgctgtgcctgtgctctatcttccagagatgttctacagcgagtatcagttcctcttgtaatctgccaaaaccttgaaagcatataggtccaaatcaatgacacctcatcgtgatggattgttgtacctgttcatgccaaaaccttatcattcttgaacatgatgttcttagcattcagcatttcatcagtgtgaaaagcacatcctgcagaaaatgacccaaaggatccaatgcagtcattgaaaaaattgagtgcctttacatgggaaaacatagcagtgacgaagaggatcttaatgatgtaccagatgatgatcagtatgacactgaggattctttcgttgatgatgctgaattgcttgcagagttatggcctcaaggtttcatggatagtgttggaatcaaagatgccatttatagatgaaaggagcgaagaagattatactacagccagcaaaaggttcgcagcgaagagagaatgaaaaggaagaggctggctgcagcagcaaagctggaagatggcttcccagttgtaatgcgagctggtgttgccccacaagtttcacaaccacccataacaaacaacatcacataccagattatggacagaaccaggggtttaaattttttgacagggctcgtgaaacgagctccagtggaattcctgatgacggcaacagaaatattggcgagatcaagaagaaaagaaaacctgaatacgatgttgtagatacacaagctaacctaccaaaggctcccttaccgcatgggagagaagcaaaagccttctaagcctgctgacgaggccagtgctggtagcctgccctccacgtcgacaactcaaactgtgcttggcctaccctaccatcggtgcttggtcataaccaacaacctaactgatcatttcggcatattgttggacatttggttatccttataggctcttttcagctgctgtacaaaattatggcatttccatgtgttcagcatccatggtcaaggccatcacctttccgagtcgagaggatatttgaccatttgcaattttctagcattgcttggttcctttggccaggttatctgtgccacgctgataaatatggtcagatgcagatttgcacccctacaaatatcggttgtaattatgaatcgtttctgagacatgcgttcatattgtgcgatttaaaatctcattcagcgaggtgcagatttaatatcattgacaaccgcacaaaaca

SEQ ID NO: 78013 - DNA, 965 bp, Zea Mays
acggatcaaaatagcatcattacatgcttgcttgcacacctgcattgctataatcatgtcagaactgatgaacctggcggatcggcaaatgtcgctccaaagaaaaggagaagaaaggatgcatcaagtacttatctggagactaatcatcttgctccagttgattattttgatattggctatgtacctggaaaatcctctgcaagaggtactgcgaaggtgggaaaacaattagctagtagcaacataggttcttatggtcaataccacgaagacaatagagtggtgaagaataaaaccagtggtcctggaggagcccctagaagaaaatcttctgaattctcggttggtgatgctgcagcacgcgctaaggttattaaggatgtctcagatgctcctttggagctaagagacttggaaaagcaaaaggctgcaccaccacctgtttcctatgcacataagtcaaaaaccagtgaggcatttgattatgcttatccagctgacagggataaaggcacttcagcacaacttggtttccaacaaagaaaggtaagtggagaaaatcaagatccatcaaatagaatatatcacaaagagaagcattgaacaagtgaatatcctggcttggttatggctagtgcggcctattctacacaaacaatgggcaggttcatgtattaaacccaaaggcaccaggcttgagcgaggtattcgtgacctccagaagattgctgcagaatacagaccaccaacaattgatattaatgaggttgatccaaatggccaggcagcagttaaaagacggttgcctcctgaagtaaagcaaaaggttgcaaggttatcggtatgaactatgtagtacactagcaccacatccaaatttacttcagattcaagtgcagatactacttcgtctgaactttggaaattttgtttgcagactacatatgcatgcttggcttatg

SEQ ID NO: 78014 - DNA, 2294 bp, Zea Mays
cattatatcgtctaattaaaagatttaatcaccgaaccgatttcatatccgcgttcctgacatttttgcgaacgaaactagaccactcatactatatatatttcaaataaaaaaattacgtgattaagattaatatataattagtgtatattaacatgtaattagtatctattaagcaatttaccatataattagtgtctattaatagattttttaaatttttttaactcatgcaccatgtactcatgcaagcaaccaaacaacatctcttgtgaaccagactggccacatacacacaaccaaacacgctatactgcatgcactcagccagtccagtctgagccaggctcactagatacgagccaggctcacccatacaagtaaccaaacgccccctaagagaacctggaaccggctgcgtctgggagagtggctgggtgccgtcgtgtacgaactccaactatacctatactccagaaatcttcgtgagaggaagtcgagcgccgggagcggcgctcaactcatccgctcaacggggttctaacactatccatggaagaccccgtggcggcgccctcttcgtcttccgccgccccagctgcttccgcagcggctaggatttcggcggcggcggcggcggcggtaacatctgccgttacctctgcgccgcccgctctcgctccgctgcagccgtctggcaccgccgctgcggtccctgaagccgcgtcgacgtgccggaggcagctgttcacggtggagctgcggccaggggagtccacaatcgtgtcgtggaagaagcttctcaaggaggccgggcacaccgccacggcaccgccagtggcgccggagccaaagttcgctgcacatgcgggcccatctggtgctgtaagcagtcattttgcggttgttgcgtgttggttggttacttggttacctgctgcatcgatgtaatctgtgcgctatctagcttagccttttgagttcatgaaaatagaaggattccctgctgactgaaggtaagatctggaagatggaacgtgagggccgtttgtgtttggtgcctgtgctctatcttccagagatgttctacagcgagtatcagttcctcttgtaatctgccaaaaccttgaaagcatataggtccaaatcaatgacacctcatcgtgatggattgttgtacctgttcatgccaaaaccttatcattcttgaacatgatgttcttagcattcagcatttcatcagtgtgaaaagcacatcctgcagaaaatgacccaaaggatccaatgcagtcattgaaaaaattgagtgcctttacatgggaaaacatagcagtgacgaagaggatcttaatgatgtaccagatgatgatcagtatgacactgaggattctttcgttgatgatgctgaattggatgaatattttgaagtcgataatttgaaaactaagcacgatgggtattttgtgaacaagggaagttggatcagataactgatgaacctggcggatcggcaaatgtcgctccaaagaaaaggagaagaaaggatgcatcaagtacttatctggagactaatcatcttgctccagttgattattttgatattggctatgtacctggaaaatcctctgcaagaggtactgcgaaggtgggaaaacaattagctagtagcaacataggttcttatggtcaataccacgaagacaatagagtggtgaagaataaaaccagtggtcctggaggagcccctagaagaaaatcttctgaattctcggttggtgatgctgcagcacgcgctaaggttattaaggatgtctcagatgctcctttggagctaagagacttggaaaagcaaaaggctgcaccaccacctgtttcctatgcacataagtcaaaaaccagtgaggcatttgattatgcttatccagctgacagggataaaggcacttcagcacaacttggtttccaacaaagaaagcacccagttgttggtagggcaggttcatgtattaaacccaaaggcaccaggcttgagcgaggtattcgtgacctccagaagattgctgcagaatacagaccaccaacaattgatattaatgaggttgatccaaatggccaggcagcagttaaaagacggttgcctcctgaagtaaagcaaaaggttgcaaggttatcggtatgaactatgtagtacactagcaccacatccaaatttacttcagattcaagtgcagatactacttcgtctgaactttggaaattttgtttgcagactacatatgcatgcttggcttatg

SEQ ID NO: 78015 - DNA, 1812 bp, Zea Mays
cattatatcgtctaattaaaagatttaatcaccgaaccgatttcatatccgcgttcctgacatttttgcgaacgaaactagaccactcatactatatatatttcaaataaaaaaattacgtgattaagattaatatataattagtgtatattaacatgtaattagtatctattaagcaatttaccatataattagtgtctattaatagattttttaaatttttttaactcatgcaccatgtactcatgcaagcaaccaaacaacatctcttgtgaaccagactggccacatacacacaaccaaacacgctatactgcatgcactcagccagtccagtctgagccaggctcactagatacgagccaggctcacccatacaagtaaccaaacgccccctaagagaacctggaaccggctgcgtctgggagagtggctgggtgccgtcgtgtacgaactccaactatacctatactccagaaatcttcgtgagaggaagtcgagcgccgggagcggcgctcaactcatccgctcaacggggttctaacactatccatggaagaccccgtggcggcgccctcttcgtcttccgccgccccagctgcttccgcagcggctaggatttcggcggcggcggcggcggcggtaacatctgccgttacctctgcgccgcccgctctcgctccgctgcagccgtctggcaccgccgctgcggtccctgaagccgcgtcgacgtgccggaggcagctgttcacggtggagctgcggccaggggagtccacaatcgtgtcgtggaagaagcttctcaaggaggccgggcacaccgccacggcaccgccagtggcgccggagccaaagttcgctgcacatgcgggcccatctggtgctgtaagcagtcattttgcggttgttgcgtgttggttggttacttggttacctgctgcatcgatgtaatctgtgcgctatctagcttagccttttgagttcatgaaaatagaaggattccctgctgactgaaggtaagatctggaagatggaacgtgagggccgtttgtgtttggtaggtagcaatagcaacatgtccatccctcctaaaattacacctttagggaacctgttcatagggatggcgatgacaacgttgatcttttttttgtaggtgcctgtgctctatcttccagagatgttctacagcgagtatcagttcctcttgtaatctgccaaaaccttgaaagcatataggtccaaatcaatgacacctcatcgtgatggattgttgtacctgttcatgccaaaaccttatcattcttgaacatgatgttcttagcattcagcatttcatcagtgtgaaaagcacatcctgcagaaaatgacccaaaggatccaatgcagtcattgaaaaaattgagtgcctttacatgggaaaacatagcagtgacgaagaggatcttaatgatgtaccagatgatgatcagtatgacactgaggattctttcgttgatgatgctgaattggatgaatattttgaagtcgataatttgaaaactaagcacgatgggtattttgtgaacaagggaagttggatcagatacagaccaccaacaattgatattaatgaggttgatccaaatggccaggcagcagttaaaagacggttgcctcctgaagtaaagcaaaaggttgcaaggttatcggtatgaactatgtagtacactagcaccacatccaaatttacttcagattcaagtgcagatactacttcgtctgaactttggaaattttgtttgcagactacatatgcatgcttggcttatg

SEQ ID NO: 78016 - DNA, 2244 bp, Zea Mays
cattatatcgtctaattaaaagatttaatcaccgaaccgatttcatatccgcgttcctgacatttttgcgaacgaaactagaccactcatactatatatatttcaaataaaaaaattacgtgattaagattaatatataattagtgtatattaacatgtaattagtatctattaagcaatttaccatataattagtgtctattaatagattttttaaatttttttaactcatgcaccatgtactcatgcaagcaaccaaacaacatctcttgtgaaccagactggccacatacacacaaccaaacacgctatactgcatgcactcagccagtccagtctgagccaggctcactagatacgagccaggctcacccatacaagtaaccaaacgccccctaagagaacctggaaccggctgcgtctgggagagtggctgggtgccgtcgtgtacgaactccaactatacctatactccagaaatcttcgtgagaggaagtcgagcgccgggagcggcgctcaactcatccgctcaacggggttctaacactatccatggaagaccccgtggcggcgccctcttcgtcttccgccgccccagctgcttccgcagcggctaggatttcggcggcggcggcggcggcggtaacatctgccgttacctctgcgccgcccgctctcgctccgctgcagccgtctggcaccgccgctgcggtccctgaagccgcgtcgacgtgccggaggcagctgttcacggtggagctgcggccaggggagtccacaatcgtgtcgtggaagaagcttctcaaggaggccgggcacaccgccacggcaccgccagtggcgccggagccaaagttcgctgcacatgcgggcccatctggtgctgtaagcagtcattttgcggttgttgcgtgttggttggttacttggttacctgctgcatcgatgtaatctgtgcgctatctagcttagccttttgagttcatgaaaatagaaggattccctgctgactgaaggtaagatctggaagatggaacgtgagggccgtttgtgtttggtgcctgtgctctatcttccagagatgttctacagcgagtatcagttcctcttgtaatctgccaaaaccttgaaagcatataggtccaaatcaatgacacctcatcgtgatggattgttgtacctgttcatgccaaaaccttatcattcttgaacatgatgttcttagcattcagcatttcatcagtgtgaaaagcacatcctgcagaaaatgacccaaaggatccaatgcagtcattgaaaaaattgagtgcctttacatgggaaaacatagcagtgacgaagaggatcttaatgatgtaccagatgatgatcagtatgacactgaggattctttcgttgatgatgctgaattggatgaatattttgaagtcgataatttgaaaactaagcacgatgggtattttgtgaacaagggaagttggatcagataactgatgaacctggcggatcggcaaatgtcgctccaaagaaaaggagaagaaaggatgcatcaagtacttatctggagactaatcatcttgctccagttgattattttgatattggctatgtacctggaaaatcctctgcaagaggtactgcgaagcacgcgctaaggttattaaggatgtctcagatgctcctttggagctaagagacttggaaaagcaaaaggctgcaccaccacctgtttcctatgcacataagtcaaaaaccagtgaggcatttgattatgcttatccagctgacagggataaaggcacttcagcacaacttggtttccaacaaagaaaggtaagtggagaaaatcaagatccatcaaatagaatatatcacaaagagaagcattgaacaagtgaatatcctggcttggttatggctagtgcggcctattctacacaaacaatggttcatgtattaaacccaaaggcaccaggcttgagcgaggtattcgtgacctccagaagattgctgcagaatacagaccaccaacaattgatattaatgaggttgatccaaatggccaggcagcagttaaaagacggttgcctcctgaagtaaagcaaaaggttgcaaggttatcggtatgaactatgtagtacactagcaccacatccaaatttacttcagattcaagtgcagatactacttcgtctgaactttggaaattttgtttgcagactacatatgcatgcttggcttatg

SEQ ID NO: 78017 - DNA, 2408 bp, Zea Mays
cattatatcgtctaattaaaagatttaatcaccgaaccgatttcatatccgcgttcctgacatttttgcgaacgaaactagaccactcatactatatatatttcaaataaaaaaattacgtgattaagattaatatataattagtgtatattaacatgtaattagtatctattaagcaatttaccatataattagtgtctattaatagattttttaaatttttttaactcatgcaccatgtactcatgcaagcaaccaaacaacatctcttgtgaaccagactggccacatacacacaaccaaacacgctatactgcatgcactcagccagtccagtctgagccaggctcactagatacgagccaggctcacccatacaagtaaccaaacgccccctaagagaacctggaaccggctgcgtctgggagagtggctgggtgccgtcgtgtacgaactccaactatacctatactccagaaatcttcgtgagaggaagtcgagcgccgggagcggcgctcaactcatccgctcaacggggttctaacactatccatggaagaccccgtggcggcgccctcttcgtcttccgccgccccagctgcttccgcagcggctaggatttcggcggcggcggcggcggcggtaacatctgccgttacctctgcgccgcccgctctcgctccgctgcagccgtctggcaccgccgctgcggtccctgaagccgcgtcgacgtgccggaggcagctgttcacggtggagctgcggccaggggagtccacaatcgtgtcgtggaagaagcttctcaaggaggccgggcacaccgccacggcaccgccagtggcgccggagccaaagttcgctgcacatgcgggcccatctggtgctgtaagcagtcattttgcggttgttgcgtgttggttggttacttggttacctgctgcatcgatgtaatctgtgcgctatctagcttagccttttgagttcatgaaaatagaaggattccctgctgactgaaggtaagatctggaagatggaacgtgagggccgtttgtgtttggtgcctgtgctctatcttccagagatgttctacagcgagtatcagttcctcttgtaatctgccaaaaccttgaaagcatataggtccaaatcaatgacacctcatcgtgatggattgttgtacctgttcatgccaaaaccttatcattcttgaacatgatgttcttagcattcagcatttcatcagtgtgaaaagcacatcctgcagaaaatgacccaaaggatccaatgcagtcattgaaaaaattgagtgcctttacatgggaaaacatagcagtgacgaagaggatcttaatgatgtaccagatgatgatcagtatgacactgaggattctttcgttgatgatgctgaattggatgaatattttgaagtcgataatttgaaaactaagcacgatgggtattttgtgaacaagggaagttggatcagataactgatgaacctggcggatcggcaaatgtcgctccaaagaaaaggagaagaaaggatgcatcaagtacttatctggagactaatcatcttgctccagttgattattttgatattggctatgtacctggaaaatcctctgcaagaggtactgcgaaggtgggaaaacaattagctagtagcaacataggttcttatggtcaataccacgaagacaatagagtggtgaagaataaaaccagtggtcctggaggagcccctagaagaaaatcttctgaattctcggttggtgatgctgcagcacgcgctaaggttattaaggatgtctcagatgctcctttggagctaagagacttggaaaagcaaaaggctgcaccaccacctgtttcctatgcacataagtcaaaaaccagtgaggcatttgattatgcttatccagctgacagggataaaggcacttcagcacaacttggtttccaacaaagaaaggtaagtggagaaaatcaagatccatcaaatagaatatatcacaaagagaagcattgaacaagtgaatatcctggcttggttatggctagtgcggcctattctacacaaacaatgcacccagttgttggtagggcaggttcatgtattaaacccaaaggcaccaggcttgagcgaggtattcgtgacctccagaagattgctgcagaatacagaccaccaacaattgatattaatgaggttgatccaaatggccaggcagcagttaaaagacggttgcctcctgaagtaaagcaaaaggttgcaaggttatcggtatgaactatgtagtacactagcaccacatccaaatttacttcagattcaagtgcagatactacttcgtctgaactttggaaattttgtttgcagactacatatgcatgcttggcttatg

SEQ ID NO: 78018 - DNA, 4079 bp, Zea Mays
ctccccacatttcgttgtgtaccgcaaacagcagagagaaaacggaatcccagatccacccctccccatctccatccgcggccatggcctccgccgacgccggcacttgcccgtgggatgccctcccgttgcacctccaggagcgaatcctctccctcctccccatcaccgaactacttcccgttgccgccgtgtcccgcgccttccaccgccttctgcgctccccgaccttccatgccctcctctccccgcatcgcctcgacgccttcttcctcctttccccacggctcgccgtccacccgctgtcccgccgcgtccgcactatgcccgcgttcgccgcgctctctcctccttcctacccgctcgtctcctccccgtccccatcactccttatcacctgcgcctcactccagttcctcccgccgatccccgacggagcctacctcctatccgctatcgtcccatcgcgcggctcctccacctcctgcacccttgtcgccgtcatcaccggcgcagccgcgcgttcttacaccctggacaccggcgatccctccccgcagtgggcgtctagaggcgatctcccgctgtctctcacgctcctggaaaacgccgcggtctccggtgaccgcagcaaactcttcgtcctcggccgtggccccgaggcgctcttggtttttcatctcgtgacggggacatgggaggtgctgcatgttgtgatgccacaaggtctcactacggcgcacctgtttctttttgatgggagcctattcttagtaggtggtattgagagctttggagtagtggatcgggtggtggtctggcggttggacgacgataaggtggaggaggtgtggtggagggaggtgagcgtgatgccgacggaggttttcgatgagttgctagctggtaggtttggcagattctggcattttcaggctgcagacagattggggattgtttgcttgtacaatgctgtggatcggaggctggtcatgtttgatgcggctgatggcatgtggacagtgctgccacgattgtccgcgttggatgcatgcgagagcttcaggtggtttggacatgtcttggagccaggagttgaaatcttgatgggactacgttggtgaggctttgctcttaacttgtagtatttcagttgagtcctggcagattcagctttatgctccttgagtcttaatgtgagtgtctctttaaacaagaataagtaggctagctaacgtttagtctctgtatgtgtatattgatataactttttgtcatttgccgtttataattctctgctgtaaaagctgatttccataacatgtggaattttgtagacatcccgatgaagatttcatgctaacatcattaaattcataaagctagagttactagaagagctgtatgcaaatccctggtgagtaccaatgcattagagctcatgaaggttctttttactcagcttatcatctttttcagaagcgcaagctgcattaatagccacctttcagatttattcacggagtgaaattcttattgtcctttcctttgagagagaagaattttcatggttagaatgtgtaacttatctatcaattgtcatatctctcttttatttttttaactacgatgtacccaactttgatctgtagtagctcctctgttgggacatagataaaaatcaaatatattgataaaaccatgttaaatttattgtcctacatgcaatattcaacttgttagctgataaaacaagattgtcctggttccgcaacttcgttctgtgagaactatttgtacatataggtattagttttatagtaataaacataattgtcggtgtacgaaacccgggtccctagggccacaagtcagtagaggattgatgccaggttcatccaccacgagttaaataaagctccaccccgcgggacaatccctcgaagttgggcaaggcggaaacttgcggaggggggtcaggcgaaccagcgaaaacccactcgagtggatttcacgtatctgaactgaccacaccgacaactttacgtacgtctcattaactacgccagccggcggagcgcgatgcaggtagtgttggtctttccccaccactcatgacctacaagacctaggcctgagttcctagaaggtctacgaccccgtaggagataagggaccggcggataggctacaaaggagggtcggcgtagggagagatgtggacaaaatccagtaatgatggcactctgacttttgtcgccaacacggatcgcaccctactcaggaaatctcggagatatgccagaagacctatgggaaagggcactgacacacgacaagatttaccgagggtgaatcccttttttacctcacattacgctcccttctgggagaaggcattgtgagaaggtatgtcccagtttccaatacccatatatgttggaaacaatgtagactagtttcatctctatttaactcattttaccctatgaaactttgatcatctctctcttcattgatattgtgccatgtccggatatttggtagttttgtagcttattcaatgctcatgaaacttatgaaacctccactaagactggcccgagaaacacaaactttgaccaagataggtggtgacctctgctatcattaagagaaaggtttcccttgtatccaagtggctttgaataaagagaaaatttgaacaagtaatcccatgcaagtgttacatcataaaaaaatacattatctttactttagctggggaaatgagcagcaaggatgttcgtttccaggtagaaagctgtgtgtgagcctgtgacatgttatgagatttaaacaatatgagtttttgttactgtttattgtccgcatctcatttgggagttttataaggcatgattggttgtccgctcgcgttcatccacgctctccgcatgcgttgaccaagtgacggacaatgtttggtttcctgtatacatgaggtcagagactgcacccgtaactgcagcgtaaactagaaataactcttctaactgtatgcacagatacgcacagaaatcccgttttccggcgggccaagcgcacatgagccacactacgcttatccagctagccaatcaggcgcatagtgatggcctcgggacactatagaatatatggcgaacacttaccatcattttttgtactgaaaacgagccatacattcttctgacatgttcagaaatgcatttgtattgcttattcttcaaactgctaaaccaggagttagtttaagggaaatgtcacaggcactgcatccactaggcacagtgtatcaatttggttattgatatgctcgtgatttcagctggccattaaggtagatatgtggacatgtatatagtagattggtgtagctgttttagcttttttttttgttagtggcaaatcgatggatcaagtaaagttcacttcatatggaccaagttgtgaatattttctattgttctcttctcttttcttttctttattttttgcttagtctagttctacaaaaaaaattcatcatacagattttgttattggcttggtctattcggcagaaaaagaaggaaaaaaaactggtggagcaaggaagtctcataatccgaaagataacaagtgatatctacaacaaagctcatggatggaagccggtcgatagacgcattcagtgatattttggctgttgttctgtctttttgggttcatctgttttgttagatgtaatctggctggctctttagtttggtaaaatcttagctaagttcgtcgctgaagttgtcagaaccaggctgcctttggttgggttgttttggtcccttcggttgaacatcagttttcaggcggtctgaaaacatttcctgctatggaaatgttcctctattttagctgatagttgcgtatgtcttgtcggcttgtagttgatgttggcttgtatggttgtgtaagaactttgtccttgtctatttcctaatgaaataggggtgctctcctgtgtcaaaaaaaacagattttgttattggcattctctttgcttatatattggccatctccag

SEQ ID NO: 78019 - DNA, 1771 bp, Zea Mays
ctccccacatttcgttgtgtaccgcaaacagcagagagaaaacggaatcccagatccacccctccccatctccatccgcggccatggcctccgccgacgccggcacttgcccgtgggatgccctcccgttgcacctccaggagcgaatcctctccctcctccccatcaccgaactacttcccgttgccgccgtgtcccgcgccttccaccgccttctgcgctccccgaccttccatgccctcctctccccgcatcgcctcgacgccttcttcctcctttccccacggctcgccgtccacccgctgtcccgccgcgtccgcactatgcccgcgttcgccgcgctctctcctccttcctacccgctcgtctcctccccgtccccatcactccttatcacctgcgcctcactccagttcctcccgccgatccccgacggagcctacctcctatccgctatcgtcccatcgcgcggctcctccacctcctgcacccttgtcgccgtcatcaccggcgcagccgcgcgttcttacaccctggacaccggcgatccctccccgcagtgggcgtctagaggcgatctcccgctgtctctcacgctcctggaaaacgccgcggtctccggtgaccgcagcaaactcttcgtcctcggccgtggccccgaggcgctcttggtttttcatctcgtgacggggacatgggaggtgctgcatgttgtgatgccacaaggtctcactacggcgcacctgtttctttttgatgggagcctattcttagtaggtggtattgagagctttggagtagtggatcgggtggtggtctggcggttggacgacgataaggtggaggaggtgtggtggagggaggtgagcgtgatgccgacggaggttttcgatgagttgctagctggtaggtttggcagattctggcattttcaggctgcagacagattggggattgtttgcttgtacaatgctgtggatcggaggctggtcatgtttgatgcggctgatggcatgtggacagtgctgccacgattgtccgcgttggatgcatgcgagagcttcaggtggtttggacatgtcttggagccaggagttgaaatcttgatgggactacgttggtgaggctttgctcttaacttgtagtatttcagttgagtcctggcagattcagctttatgctccttgagtcttaatacatcccgatgaagatttcatgctaacatcattaaattcataaagctagagttactagaagagctgtatgcaaatccctgaaaaagaaggaaaaaaaactggtggagcaaggaagtctcataatccgaaagataacaagtgatatctacaacaaagctcatggatggaagccggtcgatagacgcattcagtgatattttggctgttgttctgtctttttgggttcatctgttttgttagatgtaatctggctggctctttagtttggtaaaatcttagctaagttcgtcgctgaagttgtcagaaccaggctgcctttggttgggttgttttggtcccttcggttgaacatcagttttcaggcggtctgaaaacatttcctgctatggaaatgttcctctattttagctgatagttgcgtatgtcttgtcggcttgtagttgatgttggcttgtatggttgtgtaagaactttgtccttgtctatttcctaatgaaataggggtgctctcctgtgtcaaaaaaaacagattttgttattggcattctctttgcttatatattggccatctccag

SEQ ID NO: 78020 - DNA, 3229 bp, Zea Mays
gttcgcttctcttttctccctattcctgttcagcgttcaccggcccctcccctcccctcccctccccacatttcgttgtgtaccgcaaacagcagagagaaaacggaatcccagatccacccctccccatctccatccgcggccatggcctccgccgacgccggcacttgcccgtgggatgccctcccgttgcacctccaggagcgaatcctctccctcctccccatcaccgaactacttcccgttgccgccgtgtcccgcgccttccaccgccttctgcgctccccgaccttccatgccctcctctccccgcatcgcctcgacgccttcttcctcctttccccacggctcgccgtccacccgctgtcccgccgcgtccgcactatgcccgcgttcgccgcgctctctcctccttcctacccgctcgtctcctccccgtccccatcactccttatcacctgcgcctcactccagttcctcccgccgatccccgacggagcctacctcctatccgctatcgtcccatcgcgcggctcctccacctcctgcacccttgtcgccgtcatcaccggcgcagccgcgcgttcttacaccctggacaccggcgatccctccccgcagtgggcgtctagaggcgatctcccgctgtctctcacgctcctggaaaacgccgcggtctccggtgaccgcagcaaactcttcgtcctcggccgtggccccgaggcgctcttggtttttcatctcgtgacggggacatgggaggtgctgcatgttgtgatgccacaaggtctcactacggcgcacctgtttctttttgatgggagcctattcttagtaggtggtattgagagctttggagtagtggatcgggtggtggtctggcggttggacgacgataaggtggaggaggtgtggtggagggaggtgagcgtgatgccgacggaggttttcgatgagttgctagctggtaggtttggcagattctggcattttcaggctgcagacagattggggattgtttgcttgtacaatgctgtggatcggaggctggtcatgtttgatgcggctgatggcatgtggacagtgctgccacgattgtccgcgttggatgcatgcgagagcttcaggtggtttggacatgtcttggagccaggagttgaaatcttgatgggactacgttgacatcccgatgaagatttcatgctaacatcattaaattcataaagctagagttactagaagagctgtatgcaaatccctgatttattcacggagtgaaattcttattgtcctttcctttgagagagaagaattttcatggttagaatgtgtaacttatctatcaattgtcatatctctcttttatttttttaactacgatgtacccaactttgatctgtagtagctcctctgttgggacatagataaaaatcaaatatattgataaaaccatgttaaatttattgtcctacatgcaatattcaacttgttagctgataaaacaagattgtcctggttccgcaacttcgttctgtgagaactatttgtacatataggtattagttttatagtaataaacataattgtcggtgtacgaaacccgggtccctagggccacaagtcagtagaggattgatgccaggttcatccaccacgagttaaataaagctccaccccgcgggacaatccctcgaagttgggcaaggcggaaacttgcggaggggggtcaggcgaaccagcgaaaacccactcgagtggatttcacgtatctgaactgaccacaccgacaactttacgtacgtctcattaactacgccagccggcggagcgcgatgcaggtagtgttggtctttccccaccactcatgacctacaagacctaggcctgagttcctagaaggtctacgaccccgtaggagataagggaccggcggataggctacaaaggagggtcggcgtagggagagatgtggacaaaatccagtaatgatggcactctgacttttgtcgccaacacggatcgcaccctactcaggaaatctcggagatatgccagaagacctatgggaaagggcactgacacacgacaagatttaccgagggtgaatcccttttttacctcacattacgctcccttctgggagaaggcattgtgagaaggtatgtcccagtttccaatacccatatatgttggaaacaatgtagactagtttcatctctatttaactcattttaccctatgaaactttgatcatctctctcttcattgatattgtgccatgtccggatatttggtagttttgtagcttattcaatgctcatgaaacttatgaaacctccactaagactggcccgagaaacacaaactttgaccaagataggtggtgacctctgctatcattaagagaaaggtttcccttgtatccaagtggctttgaataaagagaaaatttgaacaagtaatcccatgcaagtgttacatcataaaaaaatacattatctttactttagctggggaaatgagcagcaaggatgttcgtttccaggtagaaagctgtgtgtgagcctgtgacatgttatgagatttaaacaatatgagtttttgttactgtttattgtccgcatctcatttgggagttttataaggcatgattggttgtccgctcgcgttcatccacgctctccgcatgcgttgaccaagtgacggacaatgtttggtttcctgtatacatgagaaaaagaaggaaaaaaaactggtggagcaaggaagtctcataatccgaaagataacaagtgatatctacaacaaagctcatggatggaagccggtcgatagacgcattcagtgatattttggctgttgttctgtctttttgggttcatctgttttgttagatgtaatctggctggctctttagtttggtaaaatcttagctaagttcgtcgctgaagttgtcagaaccaggctgcctttggttgggttgttttggtcccttcggttgaacatcagttttcaggcggtctgaaaacatttcctgctatggaaatgttcctctattttagctgatagttgcgtatgtcttgtcggcttgtagttgatgttggcttgtatggttgtgtaagaactttgtccttgtctatttcctaatgaaataggggtgctctcctgtgtcaaaaaaaacagattttgttattggcattctctttgcttatatattggccatctccag

SEQ ID NO: 78021 - DNA, 2654 bp, Zea Mays
gttcgcttctcttttctccctattcctgttcagcgttcaccggcccctcccctcccctcccctccccacatttcgttgtgtaccgcaaacagcagagagaaaacggaatcccagatccacccctccccatctccatccgcggccatggcctccgccgacgccggcacttgcccgtgggatgccctcccgttgcacctccaggagcgaatcctctccctcctccccatcaccgaactacttcccgttgccgccgtgtcccgcgccttccaccgccttctgcgctccccgaccttccatgccctcctctccccgcatcgcctcgacgccttcttcctcctttccccacggctcgccgtccacccgctgtcccgccgcgtccgcactatgcccgcgttcgccgcgctctctcctccttcctacccgctcgtctcctccccgtccccatcactccttatcacctgcgcctcactccagttcctcccgccgatccccgacggagcctacctcctatccgctatcgtcccatcgcgcggctcctccacctcctgcacccttgtcgccgtcatcaccggcgcagccgcgcgttcttacaccctggacaccggcgatccctccccgcagtgggcgtctagaggcgatctcccgctgtctctcacgctcctggaaaacgccgcggtctccggtgaccgcagcaaactcttcgtcctcggccgtggccccgaggcgctcttggtttttcatctcgtgacggggacatgggaggtgctgcatgttgtgatgccacaaggtctcactacggcgcacctgtttctttttgatgggagcctattcttagtaggtggtattgagagctttggagtagtggatcgggtggtggtctggcggttggacgacgataaggtggaggaggtgtggtggagggaggtgagcgtgatgccgacggaggttttcgatgagttgctagctggtaggtttggcagattctggcattttcaggctgcagacagattggggattgtttgcttgtacaatgctgtggatcggaggctggtcatgtttgatgcggctgatggcatgtggacagtgctgccacgattgtccgcgttggatgcatgcgagagcttcaggtggtttggacatgtcttggagccaggagttgaaatcttgatgggactacgttgacatcccgatgaagatttcatgctaacatcattaaattcataaagctagagttactagaagagctgtatgcaaatccctgatttattcacggagtgaaattcttattgtcctttcctttgagagagaagaattttcatggttagaatgtgtaacttatctatcaattgtcatatctctcttttatttttttaactacgatgtacccaactttgatctgtagtagctcctctgttgggacatagataaaaatcaaatatattgataaaaccatgttaaatttattgtcctacatgcaatattcaacttgttagctgataaaacaagattgtcctggttccgcaacttcgttctgtgagaactatttgtacatataggtattagttttatagtaataaacataattgtcggtgtacgaaacccgggtccctagggccacaagtcagtagaggattgatgccaggttcatccaccacgagttaaataaagctccaccccgcgggacaatccctcgaagttgggcaaggcggaaacttgcggaggggggtcaggcgaaccagcgaaaacccactcgagtggatttcacgtatctgaactgaccacaccgacaactttacgtacgtctcattaactacgccagccggcggagcgcgatgcaggtagtgttggtctttccccaccactcatgacctacaagacctaggcctgagttcctagaaggtctacgaccccgtaggagataagggaccggcggataggctacaaaggagggtcggcgtagggagagatgtggacaaaatccagtaatgatggcactctgacttttgtcgccaacacggatcgcaccctactcaggaaatctcggagatatgccagaagacctatgggaaagggcactgacacacgacaagatttaccgagggtgaatcccttttttacctcacattacgctcccttctgggagaaggcattgtgagaagaaaaagaaggaaaaaaaactggtggagcaaggaagtctcataatccgaaagataacaagtgatatctacaacaaagctcatggatggaagccggtcgatagacgcattcagtgatattttggctgttgttctgtctttttgggttcatctgttttgttagatgtaatctggctggctctttagtttggtaaaatcttagctaagttcgtcgctgaagttgtcagaaccaggctgcctttggttgggttgttttggtcccttcggttgaacatcagttttcaggcggtctgaaaacatttcctgctatggaaatgttcctctattttagctgatagttgcgtatgtcttgtcggcttgtagttgatgttggcttgtatggttgtgtaagaactttgtccttgtctatttcctaatgaaataggggtgctctcctgtgtcaaaaaaaacagattttgttattggcattctctttgcttatatattggccatctccag

SEQ ID NO: 78022 - DNA, 3829 bp, Zea Mays
gttcgcttctcttttctccctattcctgttcagcgttcaccggcccctcccctcccctcccctccccacatttcgttgtgtaccgcaaacagcagagagaaaacggaatcccagatccacccctccccatctccatccgcggccatggcctccgccgacgccggcacttgcccgtgggatgccctcccgttgcacctccaggagcgaatcctctccctcctccccatcaccgaactacttcccgttgccgccgtgtcccgcgccttccaccgccttctgcgctccccgaccttccatgccctcctctccccgcatcgcctcgacgccttcttcctcctttccccacggctcgccgtccacccgctgtcccgccgcgtccgcactatgcccgcgttcgccgcgctctctcctccttcctacccgctcgtctcctccccgtccccatcactccttatcacctgcgcctcactccagttcctcccgccgatccccgacggagcctacctcctatccgctatcgtcccatcgcgcggctcctccacctcctgcacccttgtcgccgtcatcaccggcgcagccgcgcgttcttacaccctggacaccggcgatccctccccgcagtgggcgtctagaggcgatctcccgctgtctctcacgctcctggaaaacgccgcggtctccggtgaccgcagcaaactcttcgtcctcggccgtggccccgaggcgctcttggtttttcatctcgtgacggggacatgggaggtgctgcatgttgtgatgccacaaggtctcactacggcgcacctgtttctttttgatgggagcctattcttagtaggtggtattgagagctttggagtagtggatcgggtggtggtctggcggttggacgacgataaggtggaggaggtgtggtggagggaggtgagcgtgatgccgacggaggttttcgatgagttgctagctggtaggtttggcagattctggcattttcaggctgcagacagattggggattgtttgcttgtacaatgctgtggatcggaggctggtcatgtttgatgcggctgatggcatgtggacagtgctgccacgattgtccgcgttggatgcatgcgagagcttcaggtggtttggacatgtcttggagccaggagttgaaatcttgatgggactacgttgacatcccgatgaagatttcatgctaacatcattaaattcataaagctagagttactagaagagctgtatgcaaatccctgatttattcacggagtgaaattcttattgtcctttcctttgagagagaagaattttcatggttagaatgtgtaacttatctatcaattgtcatatctctcttttatttttttaactacgatgtacccaactttgatctgtagtagctcctctgttgggacatagataaaaatcaaatatattgataaaaccatgttaaatttattgtcctacatgcaatattcaacttgttagctgataaaacaagattgtcctggttccgcaacttcgttctgtgagaactatttgtacatataggtattagttttatagtaataaacataattgtcggtgtacgaaacccgggtccctagggccacaagtcagtagaggattgatgccaggttcatccaccacgagttaaataaagctccaccccgcgggacaatccctcgaagttgggcaaggcggaaacttgcggaggggggtcaggcgaaccagcgaaaacccactcgagtggatttcacgtatctgaactgaccacaccgacaactttacgtacgtctcattaactacgccagccggcggagcgcgatgcaggtagtgttggtctttccccaccactcatgacctacaagacctaggcctgagttcctagaaggtctacgaccccgtaggagataagggaccggcggataggctacaaaggagggtcggcgtagggagagatgtggacaaaatccagtaatgatggcactctgacttttgtcgccaacacggatcgcaccctactcaggaaatctcggagatatgccagaagacctatgggaaagggcactgacacacgacaagatttaccgagggtgaatcccttttttacctcacattacgctcccttctgggagaaggcattgtgagaaggtatgtcccagtttccaatacccatatatgttggaaacaatgtagactagtttcatctctatttaactcattttaccctatgaaactttgatcatctctctcttcattgatattgtgccatgtccggatatttggtagttttgtagcttattcaatgctcatgaaacttatgaaacctccactaagactggcccgagaaacacaaactttgaccaagataggtggtgacctctgctatcattaagagaaaggtttcccttgtatccaagtggctttgaataaagagaaaatttgaacaagtaatcccatgcaagtgttacatcataaaaaaatacattatctttactttagctggggaaatgagcagcaaggatgttcgtttccaggtagaaagctgtgtgtgagcctgtgacatgttatgagatttaaacaatatgagtttttgttactgtttattgtccgcatctcatttgggagttttataaggcatgattggttgtccgctcgcgttcatccacgctctccgcatgcgttgaccaagtgacggacaatgtttggtttcctgtatacatgaggtcagagactgcacccgtaactgcagcgtaaactagaaataactcttctaactgtatgcacagatacgcacagaaatcccgttttccggcgggccaagcgcacatgagccacactacgcttatccagctagccaatcaggcgcatagtgatggcctcgggacactatagaatatatggcgaacacttaccatcattttttgtactgaaaacgagccatacattcttctgacatgttcagaaatgcatttgtattgcttattcttcaaactgctaaaccaggagttagtttaagggaaatgtcacaggcactgcatccactaggcacagtgtatcaatttggttattgatatgctcgtgatttcagctggccattaaggtagatatgtggacatgtatatagtagattggtgtagctgttttagcttttttttttgttagtggcaaatcgatggatcaagtaaagttcacttcatatggaccaagttgtgaatattttctattgttctcttctcttttcttttctttattttttgcttagtctagttctacaaaaaaaattcatcatacagattttgttattggcttggtctattcggcagaaaaagaaggaaaaaaaactggtggagcaaggaagtctcataatccgaaagataacaagtgatatctacaacaaagctcatggatggaagccggtcgatagacgcattcagtgatattttggctgttgttctgtctttttgggttcatctgttttgttagatgtaatctggctggctctttagtttggtaaaatcttagctaagttcgtcgctgaagttgtcagaaccaggctgcctttggttgggttgttttggtcccttcggttgaacatcagttttcaggcggtctgaaaacatttcctgctatggaaatgttcctctattttagctgatagttgcgtatgtcttgtcggcttgtagttgatgttggcttgtatggttgtgtaagaactttgtccttgtctatttcctaatgaaataggggtgctctcctgtgtcaaaaaaaacagattttgttattggcattctctttgcttatatattggccatctccag

SEQ ID NO: 78023 - DNA, 2501 bp, Zea Mays
tcgacaatgacagatgccactaatttcttttggctcctttttaattctcagtgctggatgaggattttttcctttagcctttttttcttctatagtgaggacacagctaagagaaggacccaaaaaagcaaaagtttcaaagaggttgaaaaatttgatgtttttgtgctggagaaaagttctggttgcaagttccgatcgatgcaacttttgctcttcgctatcatgtctgctgcatttctaacaatcctatacacaccatctgtgtatgaacatcagttgcagtcaagctctcggcttgtcaatgggtggatatgggataagaggagttctgatccccgatatgtatcttctgctagcattcaatgggaggatgtatataaaagtatccaaaatctgaatgttggtgaacagaagctcagtgttggactcctgaattttaacaggactgagttcgacgcttggacacacatgctcccagaaagtgatttttcaatcataaggctggagcatgccaatgaaagcattacctggcaaactctctatcctgaatggatagatgaggaggaagaaactgagataccatcttgtccttcgcttccagatccaagtgtcccaagagcaacgcattttgatgttattgctgttaagctcccctgttctcgtgtggctggttggtcaagagatgttgcaaggttacatttgcagttatcagcagcaaaattagcagcgaccacagcaagaggcaatagtggaatccatgtgctgtttgtgactgattgcttcccgattccgaacctcttctcttgcaaggacctagtgaagcgtgaaggcaatgcttggatgtacaaacctgacgtgaaggcgttgaaggagaagctcaggctgcctgttggttcctgtgagcttgctgttccactcaacgcaaaagcacgactctacacagtagacagacgcagagaagcatatgctacaatactgcattcagcaagtgaatatgtttgcggcgcgatcacggcagctcaaagcattcgtcaggcaggatcaacaagagacctagttattctcgtcgacgacaccataagtgaccaccaccgcaaggggctggaatctgcggggtggaaggtcaggataatacagaggatccggaaccccaaagccgagcgcgacgcctacaacgagtggaactacagcaaattccggctgtggcagctcacggattacgacaaggtcatcttcatcgacgcggatctcctcatcctgaggaacatcgatttcctgttcgcgctgccggagatcacggcgacggggaacaacgcgacgctcttcaactcgggagtgatggtcatcgagccttcgaactgcacgttccggctactgatggagcacatcgacgagataacgtcgtacaacggcggggaccaggggtacctgaacgagatattcacgtggtggcaccggatcccgaagcacatgaacttcctgaagcatttctgggagggcgacgaggaggaggtgaaggcgaagaagacccggctgttcggcgcgaacccgccggtcctctacgtgctccactacctggggaggaagccgtggctgtgcttccgggactacgactgcaactggaacgtggagatcctgcgggagttcgcgagcgacgtcgcgcacgcccgctggtggaaggtgcacaaccggatgcccaggaagctccagagctactgccttctgaggtcgagcctgaaggccgggctggagtgggagcggcggcaggccgagaaggcgaacttcacggacgggcattggaagcggaacgtaacggacccgaggctgaagacctgcttcgagaagttctgcttctgggagagcatgctgtggcactggggcgagaagagcaagagcaactcgacgacgacgcggaacagcgccgtgccggcaacgacaacgacaacgcctgctgctgcgagcctgtcgagctcgtgagacttgtagatagctctgtctgccgagagtagtataccagtaccagatacagaacttctgaagctccatacatacatagcgacagctctgtaaaggtagctatgtaggccttttccttccccgaatgactatataccttcgtcttcgttcgccgtcacagctgcaggcagctccctccctcccgctggtttccgatggttaacaattcttttgtttttgccaataattcatcagtataggatgtcaggctatgttgcctcaattcccagtggctattgctgtgctgcagtacgtctggtttgatatgtggtggttgaacggatttttcagtgataaaatctggagtggtgcaatatggggttgctgaccatcgaacactgcgtcatcttgggacgagtatgacggcatcaccttttatgccgtagtgaagttggaatttagctcgctcgctcgctgggtaccgaaggatgaacgaaaccacccttgacttgtgagccgtttggatgcacagcatcttactg

SEQ ID NO: 78024 - DNA, 2549 bp, Zea Mays
atgccttcacgacatcttccaccggcccgtccgttcttcctcccattttgccatcccagccagacaaaccggcaagaaccttgcccccccccctgatgatatgcatggttggtggtggttcgctggcgatgcgtttcgagcattgaggacacagctaagagaaggacccaaaaaagcaaaagtttcaaagaggttgaaaaatttgatgtttttgtgctggagaaaagttctggttgcaagttccgatcgatgcaacttttgctcttcgctatcatgtctgctgcatttctaacaatcctatacacaccatctgtgtatgaacatcagttgcagtcaagctctcggcttgtcaatgggtggatatgggataagaggagttctgatccccgatatgtatcttctgctagcattcaatgggaggatgtatataaaagtatccaaaatctgaatgttggtgaacagaagctcagtgttggactcctgaattttaacaggactgagttcgacgcttggacacacatgctcccagaaagtgatttttcaatcataaggctggagcatgccaatgaaagcattacctggcaaactctctatcctgaatggatagatgaggaggaagaaactgagataccatcttgtccttcgcttccagatccaagtgtcccaagagcaacgcattttgatgttattgctgttaagctcccctgttctcgtgtggctggttggtcaagagatgttgcaaggttacatttgcagttatcagcagcaaaattagcagcgaccacagcaagaggcaatagtggaatccatgtgctgtttgtgactgattgcttcccgattccgaacctcttctcttgcaaggacctagtgaagcgtgaaggcaatgcttggatgtacaaacctgacgtgaaggcgttgaaggagaagctcaggctgcctgttggttcctgtgagcttgctgttccactcaacgcaaaagcacgactctacacagtagacagacgcagagaagcatatgctacaatactgcattcagcaagtgaatatgtttgcggcgcgatcacggcagctcaaagcattcgtcaggcaggatcaacaagagacctagttattctcgtcgacgacaccataagtgaccaccaccgcaaggggctggaatctgcggggtggaaggtcaggataatacagaggatccggaaccccaaagccgagcgcgacgcctacaacgagtggaactacagcaaattccggctgtggcagctcacggattacgacaaggtcatcttcatcgacgcggatctcctcatcctgaggaacatcgatttcctgttcgcgctgccggagatcacggcgacggggaacaacgcgacgctcttcaactcgggagtgatggtcatcgagccttcgaactgcacgttccggctactgatggagcacatcgacgagataacgtcgtacaacggcggggaccaggggtacctgaacgagatattcacgtggtggcaccggatcccgaagcacatgaacttcctgaagcatttctgggagggcgacgaggaggaggtgaaggcgaagaagacccggctgttcggcgcgaacccgccggtcctctacgtgctccactacctggggaggaagccgtggctgtgcttccgggactacgactgcaactggaacgtggagatcctgcgggagttcgcgagcgacgtcgcgcacgcccgctggtggaaggtgcacaaccggatgcccaggaagctccagagctactgccttctgaggtcgagcctgaaggccgggctggagtgggagcggcggcaggccgagaaggcgaacttcacggacgggcattggaagcggaacgtaacggacccgaggctgaagacctgcttcgagaagttctgcttctgggagagcatgctgtggcactggggcgagaagagcaagagcaactcgacgacgacgcggaacagcgccgtgccggcaacgacaacgacaacgcctgctgctgcgagcctgtcgagctcgtgagacttgtagatagctctgtctgccgagagtagtataccagtaccagatacagaacttctgaagctccatacatacatagcgacagctctgtaaaggtagctatgtaggccttttccttccccgaatgactatataccttcgtcttcgttcgccgtcacagctgcaggcagctccctccctcccgctggtttccgatggttaacaattcttttgtttttgccaataattcatcagtataggatgtcaggctatgttgcctcaattcccagtggctattgctgtgctgcagtacgtctggtttgatatgtggtggttgaacggatttttcagtgataaaatctggagtggtgcaatatggggttgctgaccatcgaacactgcgtcatcttgggacgagtatgacggcatcaccttttatgccgtagtgaagttggaatttagctcgctcgctcgctgggtaccgaaggatgaacgaaaccacccttgacttgtgagccgtttggatgcacagcatcttactg

SEQ ID NO: 78025 - DNA, 2431 bp, Zea Mays
gaccatcctccgctctcattatcattgaggacacagctaagagaaggacccaaaaaagcaaaagtttcaaagaggttgaaaaatttgatgtttttgtgctggagaaaagttctggttgcaagttccgatcgatgcaacttttgctcttcgctatcatgtctgctgcatttctaacaatcctatacacaccatctgtgtatgaacatcagttgcagtcaagctctcggcttgtcaatgggtggatatgggataagaggagttctgatccccgatatgtatcttctgctagcattcaatgggaggatgtatataaaagtatccaaaatctgaatgttggtgaacagaagctcagtgttggactcctgaattttaacaggactgagttcgacgcttggacacacatgctcccagaaagtgatttttcaatcataaggctggagcatgccaatgaaagcattacctggcaaactctctatcctgaatggatagatgaggaggaagaaactgagataccatcttgtccttcgcttccagatccaagtgtcccaagagcaacgcattttgatgttattgctgttaagctcccctgttctcgtgtggctggttggtcaagagatgttgcaaggttacatttgcagttatcagcagcaaaattagcagcgaccacagcaagaggcaatagtggaatccatgtgctgtttgtgactgattgcttcccgattccgaacctcttctcttgcaaggacctagtgaagcgtgaaggcaatgcttggatgtacaaacctgacgtgaaggcgttgaaggagaagctcaggctgcctgttggttcctgtgagcttgctgttccactcaacgcaaaagcacgactctacacagtagacagacgcagagaagcatatgctacaatactgcattcagcaagtgaatatgtttgcggcgcgatcacggcagctcaaagcattcgtcaggcaggatcaacaagagacctagttattctcgtcgacgacaccataagtgaccaccaccgcaaggggctggaatctgcggggtggaaggtcaggataatacagaggatccggaaccccaaagccgagcgcgacgcctacaacgagtggaactacagcaaattccggctgtggcagctcacggattacgacaaggtcatcttcatcgacgcggatctcctcatcctgaggaacatcgatttcctgttcgcgctgccggagatcacggcgacggggaacaacgcgacgctcttcaactcgggagtgatggtcatcgagccttcgaactgcacgttccggctactgatggagcacatcgacgagataacgtcgtacaacggcggggaccaggggtacctgaacgagatattcacgtggtggcaccggatcccgaagcacatgaacttcctgaagcatttctgggagggcgacgaggaggaggtgaaggcgaagaagacccggctgttcggcgcgaacccgccggtcctctacgtgctccactacctggggaggaagccgtggctgtgcttccgggactacgactgcaactggaacgtggagatcctgcgggagttcgcgagcgacgtcgcgcacgcccgctggtggaaggtgcacaaccggatgcccaggaagctccagagctactgccttctgaggtcgagcctgaaggccgggctggagtgggagcggcggcaggccgagaaggcgaacttcacggacgggcattggaagcggaacgtaacggacccgaggctgaagacctgcttcgagaagttctgcttctgggagagcatgctgtggcactggggcgagaagagcaagagcaactcgacgacgacgcggaacagcgccgtgccggcaacgacaacgacaacgcctgctgctgcgagcctgtcgagctcgtgagacttgtagatagctctgtctgccgagagtagtataccagtaccagatacagaacttctgaagctccatacatacatagcgacagctctgtaaaggtagctatgtaggccttttccttccccgaatgactatataccttcgtcttcgttcgccgtcacagctgcaggcagctccctccctcccgctggtttccgatggttaacaattcttttgtttttgccaataattcatcagtataggatgtcaggctatgttgcctcaattcccagtggctattgctgtgctgcagtacgtctggtttgatatgtggtggttgaacggatttttcagtgataaaatctggagtggtgcaatatggggttgctgaccatcgaacactgcgtcatcttgggacgagtatgacggcatcaccttttatgccgtagtgaagttggaatttagctcgctcgctcgctgggtaccgaaggatgaacgaaaccacccttgacttgtgagccgtttggatgcacagcatcttactg

SEQ ID NO: 78026 - DNA, 2646 bp, Zea Mays
cttgtttcttgcttggtttgttgccttcggttcgcggctttacctcgcgttggtgctcctttttaaccgactcatgcttcggctcacgaagatttccgcgcctattgtatgagaagcggcgcaacctgggcagcggaagcgtggtcggcctgagccttcgccggggtttctgccgagaaggatcctggagattaagcgcatgggttccttggaggcccggtacaggccggccggggcagctgaggacacagctaagagaaggacccaaaaaagcaaaagtttcaaagaggttgaaaaatttgatgtttttgtgctggagaaaagttctggttgcaagttccgatcgatgcaacttttgctcttcgctatcatgtctgctgcatttctaacaatcctatacacaccatctgtgtatgaacatcagttgcagtcaagctctcggcttgtcaatgggtggatatgggataagaggagttctgatccccgatatgtatcttctgctagcattcaatgggaggatgtatataaaagtatccaaaatctgaatgttggtgaacagaagctcagtgttggactcctgaattttaacaggactgagttcgacgcttggacacacatgctcccagaaagtgatttttcaatcataaggctggagcatgccaatgaaagcattacctggcaaactctctatcctgaatggatagatgaggaggaagaaactgagataccatcttgtccttcgcttccagatccaagtgtcccaagagcaacgcattttgatgttattgctgttaagctcccctgttctcgtgtggctggttggtcaagagatgttgcaaggttacatttgcagttatcagcagcaaaattagcagcgaccacagcaagaggcaatagtggaatccatgtgctgtttgtgactgattgcttcccgattccgaacctcttctcttgcaaggacctagtgaagcgtgaaggcaatgcttggatgtacaaacctgacgtgaaggcgttgaaggagaagctcaggctgcctgttggttcctgtgagcttgctgttccactcaacgcaaaagcacgactctacacagtagacagacgcagagaagcatatgctacaatactgcattcagcaagtgaatatgtttgcggcgcgatcacggcagctcaaagcattcgtcaggcaggatcaacaagagacctagttattctcgtcgacgacaccataagtgaccaccaccgcaaggggctggaatctgcggggtggaaggtcaggataatacagaggatccggaaccccaaagccgagcgcgacgcctacaacgagtggaactacagcaaattccggctgtggcagctcacggattacgacaaggtcatcttcatcgacgcggatctcctcatcctgaggaacatcgatttcctgttcgcgctgccggagatcacggcgacggggaacaacgcgacgctcttcaactcgggagtgatggtcatcgagccttcgaactgcacgttccggctactgatggagcacatcgacgagataacgtcgtacaacggcggggaccaggggtacctgaacgagatattcacgtggtggcaccggatcccgaagcacatgaacttcctgaagcatttctgggagggcgacgaggaggaggtgaaggcgaagaagacccggctgttcggcgcgaacccgccggtcctctacgtgctccactacctggggaggaagccgtggctgtgcttccgggactacgactgcaactggaacgtggagatcctgcgggagttcgcgagcgacgtcgcgcacgcccgctggtggaaggtgcacaaccggatgcccaggaagctccagagctactgccttctgaggtcgagcctgaaggccgggctggagtgggagcggcggcaggccgagaaggcgaacttcacggacgggcattggaagcggaacgtaacggacccgaggctgaagacctgcttcgagaagttctgcttctgggagagcatgctgtggcactggggcgagaagagcaagagcaactcgacgacgacgcggaacagcgccgtgccggcaacgacaacgacaacgcctgctgctgcgagcctgtcgagctcgtgagacttgtagatagctctgtctgccgagagtagtataccagtaccagatacagaacttctgaagctccatacatacatagcgacagctctgtaaaggtagctatgtaggccttttccttccccgaatgactatataccttcgtcttcgttcgccgtcacagctgcaggcagctccctccctcccgctggtttccgatggttaacaattcttttgtttttgccaataattcatcagtataggatgtcaggctatgttgcctcaattcccagtggctattgctgtgctgcagtacgtctggtttgatatgtggtggttgaacggatttttcagtgataaaatctggagtggtgcaatatggggttgctgaccatcgaacactgcgtcatcttgggacgagtatgacggcatcaccttttatgccgtagtgaagttggaatttagctcgctcgctcgctgggtaccgaaggatgaacgaaaccacccttgacttgtgagccgtttggatgcacagcatcttactg

SEQ ID NO: 78027 - DNA, 2852 bp, Zea Mays
aaaccagctcgaccttcgcttttgcggcggagaacataactttgctattagcttgttcgctgcggcttgctgcggctgcaatccggctgcggctgcggcttctacagtatttttctatttatggattgcagctgcagcaatccaaacagctgcaacagtgtcggcttgcagccagccgaacacgcccatatatatacaatctcctcttgctgctctccactcggaccactcccactcttcaagcccacacagagctctgcacaagaaaaggggaggaaggacgagccggagccactcagccgccacctcaccccccccatcggccgcctgcgtcccaccacccgctcctgctgccgggcctgccgcccgttgctctcgccactgaagccctcgccgccgcctccgcctccgcccgcttgcttgccctcctgccggctgcctcccggtgaggacacagctaagagaaggacccaaaaaagcaaaagtttcaaagaggttgaaaaatttgatgtttttgtgctggagaaaagttctggttgcaagttccgatcgatgcaacttttgctcttcgctatcatgtctgctgcatttctaacaatcctatacacaccatctgtgtatgaacatcagttgcagtcaagctctcggcttgtcaatgggtggatatgggataagaggagttctgatccccgatatgtatcttctgctagcattcaatgggaggatgtatataaaagtatccaaaatctgaatgttggtgaacagaagctcagtgttggactcctgaattttaacaggactgagttcgacgcttggacacacatgctcccagaaagtgatttttcaatcataaggctggagcatgccaatgaaagcattacctggcaaactctctatcctgaatggatagatgaggaggaagaaactgagataccatcttgtccttcgcttccagatccaagtgtcccaagagcaacgcattttgatgttattgctgttaagctcccctgttctcgtgtggctggttggtcaagagatgttgcaaggttacatttgcagttatcagcagcaaaattagcagcgaccacagcaagaggcaatagtggaatccatgtgctgtttgtgactgattgcttcccgattccgaacctcttctcttgcaaggacctagtgaagcgtgaaggcaatgcttggatgtacaaacctgacgtgaaggcgttgaaggagaagctcaggctgcctgttggttcctgtgagcttgctgttccactcaacgcaaaagcacgactctacacagtagacagacgcagagaagcatatgctacaatactgcattcagcaagtgaatatgtttgcggcgcgatcacggcagctcaaagcattcgtcaggcaggatcaacaagagacctagttattctcgtcgacgacaccataagtgaccaccaccgcaaggggctggaatctgcggggtggaaggtcaggataatacagaggatccggaaccccaaagccgagcgcgacgcctacaacgagtggaactacagcaaattccggctgtggcagctcacggattacgacaaggtcatcttcatcgacgcggatctcctcatcctgaggaacatcgatttcctgttcgcgctgccggagatcacggcgacggggaacaacgcgacgctcttcaactcgggagtgatggtcatcgagccttcgaactgcacgttccggctactgatggagcacatcgacgagataacgtcgtacaacggcggggaccaggggtacctgaacgagatattcacgtggtggcaccggatcccgaagcacatgaacttcctgaagcatttctgggagggcgacgaggaggaggtgaaggcgaagaagacccggctgttcggcgcgaacccgccggtcctctacgtgctccactacctggggaggaagccgtggctgtgcttccgggactacgactgcaactggaacgtggagatcctgcgggagttcgcgagcgacgtcgcgcacgcccgctggtggaaggtgcacaaccggatgcccaggaagctccagagctactgccttctgaggtcgagcctgaaggccgggctggagtgggagcggcggcaggccgagaaggcgaacttcacggacgggcattggaagcggaacgtaacggacccgaggctgaagacctgcttcgagaagttctgcttctgggagagcatgctgtggcactggggcgagaagagcaagagcaactcgacgacgacgcggaacagcgccgtgccggcaacgacaacgacaacgcctgctgctgcgagcctgtcgagctcgtgagacttgtagatagctctgtctgccgagagtagtataccagtaccagatacagaacttctgaagctccatacatacatagcgacagctctgtaaaggtagctatgtaggccttttccttccccgaatgactatataccttcgtcttcgttcgccgtcacagctgcaggcagctccctccctcccgctggtttccgatggttaacaattcttttgtttttgccaataattcatcagtataggatgtcaggctatgttgcctcaattcccagtggctattgctgtgctgcagtacgtctggtttgatatgtggtggttgaacggatttttcagtgataaaatctggagtggtgcaatatggggttgctgaccatcgaacactgcgtcatcttgggacgagtatgacggcatcaccttttatgccgtagtgaagttggaatttagctcgctcgctcgctgggtaccgaaggatgaacgaaaccacccttgacttgtgagccgtttggatgcacagcatcttactg

SEQ ID NO: 78028 - DNA, 1411 bp, Zea Mays
actccactgtacgccacgcacgattacgtgggcccgacatttgctccgtcccctctggtgcacaaagaccaggcgcacctgatcgtgcttcacctcgaaggaatcgaccccatcaccatcctcctcgttatctcgcagctaccgccgccgccgcaaaccctaacctgagttccgatccggttaatcgacgacgaggaagacgacggtgcgttgcagatctgaggggatctgacgacggcggcggagggggagatggtggtcaacggccggccgctgaagagggcgagggcgcgggtcgaggccagggacttcgcgaggttcccggcggccggagactgcggggcggccgggacgttcagggaggcggtgagagggttcctcgcaaagcatgcgaggctgctcccgttgccgtccatcttctctccggcggccgcggccgccccgccgcacctgctgatctggagggtgtccctaagggtcggggaggccggggaggaagagagcggcggcggggtagagctcaacgtcgttgaggaggatgtgctccgatcccgatctgtgtattgtgaccagtgcagagtcgtgggctggagtggacacccggtctgcgtgaagcggtaccatttcatcatcgagaacgacagtagccacctttctggccgccggcgcacctgctgcctccgctgcggaacacccatggccgctggagaatcaaggtgagaggcacatttcagaaagaaaattatataccttctcacacaacagcgaatgggggaaatggaacatgcttgtgcgttcgatgtctataatgccgaatgttaatacatgaccaactttatgccaacgtgctgtgccattgatgcctgtaatgatctggatcacccaatctgaatgtaagatgagtgcttcatataggtctgtgtttggatggggcgtgcttgcttgcatttgtaatataagatgagaattcagaagtgtttctattactatattcataggcagcacatagaaaatttctcggaatgaaggattcgccaagtaaccttgtgatgctccgaatatgcaacatactcttactctgaatgcactgccgtctccaggtgtgctctgtgcaatttcgatatggatggggaggagattgaagagtgtgcatacctgcatctggatgaccccacccacttgctgcacgctgtggtgcatgcaaatggttatgggcatcttctcagggtaaatgggcgtgaaggtggctcaagattcctcactggccgtgacataatgagcctgtgggatcgcctgtgcaaggtgttacatgtgaggaaggtaactgtcatggatatatccaagaaacatggaatggactacagacttcttcatgcagtcataagtgggcacccttggtacggccaatggg

SEQ ID NO: 78029 - DNA, 1027 bp, Zea Mays
actccactgtacgccacgcacgattacgtgggcccgacatttgctccgtcccctctggtgcacaaagaccaggcgcacctgatcgtgcttcacctcgaaggaatcgaccccatcaccatcctcctcgttatctcgcagctaccgccgccgccgcaaaccctaacctgagttccgatccggttaatcgacgacgaggaagacgacggtgcgttgcagatctgaggggatctgacgacggcggcggagggggagatggtggtcaacggccggccgctgaagagggcgagggcgcgggtcgaggccagggacttcgcgaggttcccggcggccggagactgcggggcggccgggacgttcagggaggcggtgagagggttcctcgcaaagcatgcgaggctgctcccgttgccgtccatcttctctccggcggccgcggccgccccgccgcacctgctgatctggagggtgtccctaagggtcggggaggccggggaggaagagagcggcggcggggtagagctcaacgtcgttgaggaggatgtgctccgatcccgatctgtgtattgtgaccagtgcagagtcgtgggctggagtggacacccggtctgcgtgaagcggtaccatttcatcatcgagaacgacagtagccacctttctggccgccggcgcacctgctgcctccgctgcggaacacccatggccgctggagaatcaaggtgtgctctgtgcaatttcgatatggatggggaggagattgaagagtgtgcatacctgcatctggatgaccccacccacttgctgcacgctgtggtgcatgcaaatggttatgggcatcttctcagggtaaatgggcgtgaaggtggctcaagattcctcactggccgtgacataatgagcctgtgggatcgcctgtgcaaggtgttacatgtgaggaaggtaactgtcatggatatatccaagaaacatggaatggactacagacttcttcatgcagtcataagtgggcacccttggtacggccaatggg

SEQ ID NO: 78030 - DNA, 1522 bp, Zea Mays
gcaggcggcccgggcagatagcaggcgtgttgctcgcgcctcggcacataaatcgtctccgatctccaggtgcccggccaccctggttcgtcgaagcaccctagtcgtcgtagcggcctacgggctcttgggcagagagagaagctgcatagcctgcatatgctccagctgctgcgcgcaatgatggcactgacggagcggcagccgcagctggagaagaagccgacgcgcgggagggcgccgctgtccgggaaggccgtcgcggcgctgtgcgtgacgagcttcgttgtggggctgctgcttagcggcaacgtgtcgctcatgtcggcctcggcgtcaccgtcgtcctcgagcacggacagcgagaagagcattcgtgtttccggttgcgacaatgagcgtaaactcggagagaaccaccccaaggatctcctgaacgaggtgtcgagaactcatcaagcaatccagtcgctggacaaggcggtgtccaccctggagatggagatggccgtggaacgcgctaggggcggtggcggcggcggcggcgccgcgtccatggcgtccagcaggactcctcagaaggccttcgtcgtggtcggcatcaacacggccttcaccagcaagaagcggcgcgactcgctccgcgacacctgggtccccagaggggataagctgaggaagctggagcgggagaaggggatcgtggtccggttcgtgatcgggcacagcggcacgccgggcctgtcctgtcacagaaaggagtcaagtaccacgagccagagtactggaagttcggcgacgagggcaacaagtacttccgccacgccaccggccaaatctacgccatctccaaggacctcgccgcctacatctccatcaaccagccgatcctgcacaggttcgcgaacgaggacgtctcgctgggggcgtggctgatcgggctcgaggtcgagcacgtcgacgaccggagcatgtgctgcgcgacgcctccagactgcgagtggaagaagcgagccgggaacgtgtgcgtggcgtccttcgactggtcgtgcagcggcgtctgtaagtcggtggaccggatgcgccacatccacaaggcgtgcggcgaaggcgaaggcgccgtctggaacgccgccacatgagacgagattgccattctcgtcggaacacttgttgtatgcggagcttcacttgatgaaaacgcgaaggcgagagggaagcgcctgcgccactgtttggcatgacacattccgcatggcaagcgtggttgtttcacttgagacggcatgctatgatccacgtaaaagcgcatggattattattggtgtgtcaacgtgatcctttttggatgaaaaaaaaaaattgcacggtggcccttggatgtcttttttaaccccgaaacatagtaaaatatttaaaaagtatattcataatattttttcagaaatatttagttaagctagaggcttcgacgtcatacaacaactaatatgcaatcagacttatgtgcaagcgagcctct

SEQ ID NO: 78031 - DNA, 2337 bp, Zea Mays
ttaatatgagcgtgctttggaccaaaaggacctcgctggtgcattatagcaaacactagtatatattgatgtttctgtacctcgccctctctctcctctaccccttttcctctaacctttagctttcctccctccctcctctctttctctcctctaacaagaacttagtcccggcagttcagatcctaagttgctgaccttgctgctgattgttggagatagatttgctgcttctaagttggaaataccatgagtccaccgagtgtgatggggcagtttggggacacgacctacaccaaggtttttgttgggggactcgcgtgggaaacccagaaggagactatgaggaagtatttcgagcagtttggagagatcctggaggctgttgtcatcactgacaagaacactggcagatccaagggctacggatttgttaccttccgggactcggatgcggcaatgagagcttgcgttgatcctgcaccggtgattgatgggaggagggctaactgtaatcttgcttcccttggggttcaaagatctaggcctcctactccccagcatggaggggctaggaactttaaagtgatgaaatctttcagccagcaggcaggaatccaaggtggactgggcgcagcttttccttctcatgccaccttccctcattatgccatcccacaaggcctcccctaccatatctatgggtactctccatataccctagactacggttatccaacatttgggcaatcaggaaacactactaccaactatacaagtggacaaggctacaacttgcaatacccacaaatgttccacttctcaactgtatcatctacagctgcagctgtgaacggctttgctcagcagtatggaggaccattgtcactagcagcaagtcctcaagcccaagcagtgtgtatccccattaaacaggcatgactatggcactcgcagctccaaccatgccaactccaacacaggctgctcatccttaccggttgattccctcagtgtccactgctccagagcaacccttggcctaaccatggtctcccttctcgtcattgctgtactgtctcgtttccaacttgtcgagtccatgcatccatctctaacaccaaaaggcactattgtagatcatgtttatcagccaaagtgctcacatccatatcccacatggtcatgtggtaactggatattagctttagccccaggatgggcacaaagcttcatgccccgaggatggggcgttctaacagacaagtacaaaccctaaccattctaaatatagtccaaggaaggactttatctgggagagttaatttcagctgtagcgagacaaggctgtaactaaaagatactaacagtcaagcatgacccaaggagggttcatgctgatactagtcaaattggactacaatgacagctaaataactgaactagcatgccactcccacatttcatcggtagaatcccaactgtacctagcttaggcctgacatttcttgttgaagcataaaccatttaggcaaacctacccttctatagtcctgctgttacggtgttacctagaccaaatgcatatgatatatgaccagcgactagtgtaaccaactcatcttttctttgcaaaagattagatgcaccaactaacaatttatttgatctttcagttgatagcttgcatctaggtggtcaaggctctaaggagagcctgtgcccctaatcagaaacaggttcagagtagtgccaatgtttgtttttagcacttggcactaccccctgtccctcgaaacacagcattggggactccaaagaaggctttggagtaaccaagcactgctgtgtaactcattaacacaatggacccatagatgaatttttgttgtcttgggtcaccccactcatgtagatgtcattacttctcagtgtcactaccatggttaggtccaggccccccttcactccctccctctctctctgcacagggcagagaccttagcactctttaatctactattaccaggcatggtggttgtaataataaattagcgctatgctacttgtaggacacgaagaactctgttattccacccttcatatgtacttaatatcctgtccatttcagttcagtagttggtacttatttccaaattccaaccattgtagtgcaccatataatgttgtgtaatatatgtccactgtgctgcacatttcttaatcatctgtcgttcagttgcatatattccaggtgaatgtactattagtctattacatctgtgaaagtatgcctttgaaagcatttacttcatataataggacaagactaagaag

SEQ ID NO: 78032 - DNA, 2317 bp, Zea Mays
ttaatatgagcgtgctttggaccaaaaggacctcgctggtgcattatagcaaacactagtatatattgatgtttctgtacctcgccctctctctcctctaccccttttcctctaacctttagctttcctccctccctcctctctttctctcctctaacaagaacttagtcccggcagttcagatcctaagttgctgaccttgctgctgattgttggagatagatttgctgcttctaagttggaaataccatgagtccaccgagtgtgatggggcagtttggggacacgacctacaccaaggtttttgttgggggactcgcgtgggaaacccagaaggagactatgaggaagtatttcgagcagtttggagagatcctggaggctgttgtcatcactgacaagaacactggcagatccaagggctacggatttgttaccttccgggactcggatgcggcaatgagagcttgcgttgatcctgcaccggtgattgatgggaggagggctaactgtaatcttgcttcccttggggttcaaagatctaggcctcctactccccagcatggaggggctaggaactttaaagtgatgaaatctttcagccagcaggcaggaatccaaggtggactgggcgcagcttttccttctcatgccaccttccctcattatgccatcccacaaggcctcccctaccatatctatgggtactctccatataccctagactacggttatccaacatttgggcaatcaggaaacactactaccaactatacaagtggacaaggctacaacttgcaatacccacaaatgttccacttctcaactgtatcatctacagctgcagctgtgaacggctttgctcagcagtatggaggaccattgtcactagcagcaagtcctcaagcccaagcaggcatgactatggcactcgcagctccaaccatgccaactccaacacaggctgctcatccttaccggttgattccctcagtgtccactgctccagagcaacccttggcctaaccatggtctcccttctcgtcattgctgtactgtctcgtttccaacttgtcgagtccatgcatccatctctaacaccaaaaggcactattgtagatcatgtttatcagccaaagtgctcacatccatatcccacatggtcatgtggtaactggatattagctttagccccaggatgggcacaaagcttcatgccccgaggatggggcgttctaacagacaagtacaaaccctaaccattctaaatatagtccaaggaaggactttatctgggagagttaatttcagctgtagcgagacaaggctgtaactaaaagatactaacagtcaagcatgacccaaggagggttcatgctgatactagtcaaattggactacaatgacagctaaataactgaactagcatgccactcccacatttcatcggtagaatcccaactgtacctagcttaggcctgacatttcttgttgaagcataaaccatttaggcaaacctacccttctatagtcctgctgttacggtgttacctagaccaaatgcatatgatatatgaccagcgactagtgtaaccaactcatcttttctttgcaaaagattagatgcaccaactaacaatttatttgatctttcagttgatagcttgcatctaggtggtcaaggctctaaggagagcctgtgcccctaatcagaaacaggttcagagtagtgccaatgtttgtttttagcacttggcactaccccctgtccctcgaaacacagcattggggactccaaagaaggctttggagtaaccaagcactgctgtgtaactcattaacacaatggacccatagatgaatttttgttgtcttgggtcaccccactcatgtagatgtcattacttctcagtgtcactaccatggttaggtccaggccccccttcactccctccctctctctctgcacagggcagagaccttagcactctttaatctactattaccaggcatggtggttgtaataataaattagcgctatgctacttgtaggacacgaagaactctgttattccacccttcatatgtacttaatatcctgtccatttcagttcagtagttggtacttatttccaaattccaaccattgtagtgcaccatataatgttgtgtaatatatgtccactgtgctgcacatttcttaatcatctgtcgttcagttgcatatattccaggtgaatgtactattagtctattacatctgtgaaagtatgcctttgaaagcatttacttcatataataggacaagactaagaag

SEQ ID NO: 78033 - DNA, 2198 bp, Zea Mays
ttaatatgagcgtgctttggaccaaaaggacctcgctggtgcattatagcaaacactagtatatattgatgtttctgtacctcgccctctctctcctctaccccttttcctctaacctttagctttcctccctccctcctctctttctctcctctaacaagaacttagtcccggcagttcagatcctaagttgctgaccttgctgctgattgttggagatagatttgctgcttctaagttggaaataccatgagtccaccgagtgtgatggggcagtttggggacacgacctacaccaaggtttttgttgggggactcgcgtgggaaacccagaaggagactatgaggaagtatttcgagcagtttggagagatcctggaggctgttgtcatcactgacaagaacactggcagatccaagggctacggatttgttaccttccgggactcggatgcggcaatgagagcttgcgttgatcctgcaccggtgattgatgggaggagggctaactgtaatcttgcttcccttggggttcaaagatctaggcctcctactccccagcatggaggggctaggaactttaaagtgatgaaatctttcagccagcaggcaggaatccaagtttgggcaatcaggaaacactactaccaactatacaagtggacaaggctacaacttgcaatacccacaaatgttccacttctcaactgtatcatctacagctgcagctgtgaacggctttgctcagcagtatggaggaccattgtcactagcagcaagtcctcaagcccaagcaggcatgactatggcactcgcagctccaaccatgccaactccaacacaggctgctcatccttaccggttgattccctcagtgtccactgctccagagcaacccttggcctaaccatggtctcccttctcgtcattgctgtactgtctcgtttccaacttgtcgagtccatgcatccatctctaacaccaaaaggcactattgtagatcatgtttatcagccaaagtgctcacatccatatcccacatggtcatgtggtaactggatattagctttagccccaggatgggcacaaagcttcatgccccgaggatggggcgttctaacagacaagtacaaaccctaaccattctaaatatagtccaaggaaggactttatctgggagagttaatttcagctgtagcgagacaaggctgtaactaaaagatactaacagtcaagcatgacccaaggagggttcatgctgatactagtcaaattggactacaatgacagctaaataactgaactagcatgccactcccacatttcatcggtagaatcccaactgtacctagcttaggcctgacatttcttgttgaagcataaaccatttaggcaaacctacccttctatagtcctgctgttacggtgttacctagaccaaatgcatatgatatatgaccagcgactagtgtaaccaactcatcttttctttgcaaaagattagatgcaccaactaacaatttatttgatctttcagttgatagcttgcatctaggtggtcaaggctctaaggagagcctgtgcccctaatcagaaacaggttcagagtagtgccaatgtttgtttttagcacttggcactaccccctgtccctcgaaacacagcattggggactccaaagaaggctttggagtaaccaagcactgctgtgtaactcattaacacaatggacccatagatgaatttttgttgtcttgggtcaccccactcatgtagatgtcattacttctcagtgtcactaccatggttaggtccaggccccccttcactccctccctctctctctgcacagggcagagaccttagcactctttaatctactattaccaggcatggtggttgtaataataaattagcgctatgctacttgtaggacacgaagaactctgttattccacccttcatatgtacttaatatcctgtccatttcagttcagtagttggtacttatttccaaattccaaccattgtagtgcaccatataatgttgtgtaatatatgtccactgtgctgcacatttcttaatcatctgtcgttcagttgcatatattccaggtgaatgtactattagtctattacatctgtgaaagtatgcctttgaaagcatttacttcatataataggacaagactaagaag

SEQ ID NO: 78034 - DNA, 2237 bp, Zea Mays
ttaatatgagcgtgctttggaccaaaaggacctcgctggtgcattatagcaaacactagtatatattgatgtttctgtacctcgccctctctctcctctaccccttttcctctaacctttagctttcctccctccctcctctctttctctcctctaacaagaacttagtcccggcagttcagatcctaagttgctgaccttgctgctgattgttggagatagatttgctgcttctaagttggaaataccatgagtccaccgagtgtgatggggcagtttggggacacgacctacaccaaggtttttgttgggggactcgcgtgggaaacccagaaggagactatgaggaagtatttcgagcagtttggagagatcctggaggctgttgtcatcactgacaagaacactggcagatccaagggctacggatttgttaccttccgggactcggatgcggcaatgagagcttgcgttgatcctgcaccggtgattgatgggaggagggctaactgtaatcttgcttcccttggggttcaaagatctaggcctcctactccccagcatgaacttttataatatatatggaggacctcagtacacattttatggaggaggagctggcatggtgacaggaacaagtcccttttatccatatttccagtttgggcaatcaggaaacactactaccaactatacaagtggacaaggctacaacttgcaatacccacaaatgttccacttctcaactgtatcatctacagctgcagctgtgaacggctttgctcagcagtatggaggaccattgtcactagcagcaagtcctcaagcccaagcaggcatgactatggcactcgcagctccaaccatgccaactccaacacaggctgctcatccttaccggttgattccctcagtgtccactgctccagagcaacccttggcctaaccatggtctcccttctcgtcattgctgtactgtctcgtttccaacttgtcgagtccatgcatccatctctaacaccaaaaggcactattgtagatcatgtttatcagccaaagtgctcacatccatatcccacatggtcatgtggtaactggatattagctttagccccaggatgggcacaaagcttcatgccccgaggatggggcgttctaacagacaagtacaaaccctaaccattctaaatatagtccaaggaaggactttatctgggagagttaatttcagctgtagcgagacaaggctgtaactaaaagatactaacagtcaagcatgacccaaggagggttcatgctgatactagtcaaattggactacaatgacagctaaataactgaactagcatgccactcccacatttcatcggtagaatcccaactgtacctagcttaggcctgacatttcttgttgaagcataaaccatttaggcaaacctacccttctatagtcctgctgttacggtgttacctagaccaaatgcatatgatatatgaccagcgactagtgtaaccaactcatcttttctttgcaaaagattagatgcaccaactaacaatttatttgatctttcagttgatagcttgcatctaggtggtcaaggctctaaggagagcctgtgcccctaatcagaaacaggttcagagtagtgccaatgtttgtttttagcacttggcactaccccctgtccctcgaaacacagcattggggactccaaagaaggctttggagtaaccaagcactgctgtgtaactcattaacacaatggacccatagatgaatttttgttgtcttgggtcaccccactcatgtagatgtcattacttctcagtgtcactaccatggttaggtccaggccccccttcactccctccctctctctctgcacagggcagagaccttagcactctttaatctactattaccaggcatggtggttgtaataataaattagcgctatgctacttgtaggacacgaagaactctgttattccacccttcatatgtacttaatatcctgtccatttcagttcagtagttggtacttatttccaaattccaaccattgtagtgcaccatataatgttgtgtaatatatgtccactgtgctgcacatttcttaatcatctgtcgttcagttgcatatattccaggtgaatgtactattagtctattacatctgtgaaagtatgcctttgaaagcatttacttcatataataggacaagactaagaag

SEQ ID NO: 78035 - DNA, 1602 bp, Zea Mays
ttccgattccaccccgcggcaccggcaacggcctaccctacgctgcgtcgccgccacctgattttctcgtccggtcgtgctgcactgcatcacaccgattcccacgtgattgcggcgcggccgcgcgaggagtgctcgtagccctccccctcttaataggtaacttggacgaaaaggtatctgagagaatcttgtatgagattcttattcaggcaggccatgtagtagacctgcatgtacccagtgacaaggagagtaacagtctcaaaggttacgcttttgttgagtatgaaaccgaggaaatcgcacaatacgctgttaagcttttctcaggacttgttcggatcagtggtaaaacgcttaagttcatgattgctggttatgacaaaccgtcttcaaatgtcaatacctcagtaatgctcaatcctgtaccctcttcaaatggcaataatccacatatcaggtggtaaacgggaggattggaggttatgtcttttctctcactccttatccatatggttttcaagctttatcaggtggacaagtacacggccatggccagcctttgcacatcggacatacttgaaggcttgaagctgtcgtccttacagtctcatcgaccgatgccacagcgacacatgcacgaacaagagcacctgcccgactgagcgtgcacgacctcgcgccgatcagggccaagaactcacccccgtcgtgtgtgccgatggaggtggaggccgacgggatccaggaagccaccgcaggcgcaggagacggcggcggcgtggacgatgtcttcttctgcgtcgccgcgacgtccaggggcaacaagaacagcatctcctacttccacaccaacgcggtcggcgaggacgccgagtcggcgctcgcgctcgccgcgctctgcctcgaccacgcccccgaccaccaccggtggcaccaccacaccgtcgccggggcgaagacgttcgcgttcctctcggccgacgacggccgcacgtacttcgccgcggccgacccgagccccggcgccgccgaggtggtccggttcctggagcgcgtccgcgacgcgtgcgacgccgcgcccaggaagcgcctgcgcgacgaggcggtggcccccgtcgctcgccagttcgccaggacgctgcgggcggcggcggcgggcccgagctcaggcgcggagctaccggaggcctcgctgcaggcgaaggagccgtccacgccgctggcgccggtctgcgagaaagacgaggaggagcgccagagggccggagagcgacgtcgcgccttcttgcagccggaggaaagcgcaagcgcgcttccggggtggcgcccgtggtggcgccacgcgtcggtcgtgatcgtcgtggatgtggtgctgtgcctcgtgctgttcgccgtgtggatgggggtttgcaaaggcttcgggtgtctgacgcgatgaaaatcgcccgagagcatgcaattgtaaatttgtaatcacatccatgctgtgtgcatggttcgcgttctttatgttaatttgcttgtcagatatcacatctacaatttgaaggaaaaaaacggtttaagaaacgaagacgcatgccttcaatgcacaca

SEQ ID NO: 78036 - DNA, 2668 bp, Zea Mays
ttccgattccaccccgcggcaccggcaacggcctaccctacgctgcgtcgccgccacctgattttctcgtccggtcgtgctgcactgcatcacaccgattcccacgtgattgcggcgcggccgcgcgaggagtgctcgtagccctccccctcttaataggtaacttggacgaaaaggtatctgagagaatcttgtatgagattcttattcaggcaggccatgtagtagacctgcatgtacccagtgacaaggagagtaacagtctcaaaggttacgcttttgttgagtatgaaaccgaggaaatcgcacaatacgctgttaagcttttctcaggacttgttcggatcagtggtaaaacgcttaagttcatgattgctggttatgacaaaccgtcttcaaatgtcaatacctcagtaatgctcaatcctgtaccctcttcaaatggcaataatccacatatcaggtggtaaacgggaggattggaggttatgtcttttctctcactccttatccatatggttttcaagctttatcaggtggacaagtacacggccatggccagatcttcagaagaacgctgcactatccttggaaggcaaaaatcctgtcctgttgtgttctccattgtcccaactctgaagccagcagatgttactaataaaaagagagtgaagaactctaccatgttcgtgccagccacactagtgaatctaactcgttcgggttggattgcagttgcaggaacaacagagagttcctgaatgtaggcaggcatggccaattagttttgatgttgacattgcagaccgaaagcctactagatgacaaggaaactcagttgcagtctggcacttaatatgttaattcgtacactagtgatgcaatggttctgtgtgtcatctttcactgctagcatgatcttggttgccatttggcctttatttttttagttaggtgagattgcccggtgcctgaatacatagcctgtttttatgtttgacgagtctgatggtttcttttagtagcgcagttccacctttcatcatatgcgtaacatttgtaagtcgtacgtacctttcatcttatgagtaagtgtcaaggtcattgtccgaactaccaccaattaagcttgtgctaagtgatgacaagcaacctgtcttctcgccctattgcttcactaacatagtattccaccagcatcctcgcaagaggggaaaaaacgagacggtttagaggacgtgtatcgcaccaaggaacttgctcgtaactcacgacccgaccaaaattgttttattctggaacgagaactgtctacagcagaactacactctatcattgtcgtgtgcaccttggaggcttctccaaggtcagaaccacacttgaagccatgaatcagaatggcattcctctcaactaagtttacttgtgatgcaccctagctcctctactgacccagcacctagggcttctttccttctctctttgtgtattctttggcaaacagagcacatatcatctatatcgttctgtcctgtacttccttccggtaggcttgaaatcatttctgcataagcacagcaactcccggttgcagcagttttccctcaaaactttttgcgtcgcagcagcctttgcacatcggacatacttgaaggcttgaagctgtcgtccttacagtctcatcgaccgatgccacagcgacacatgcacgaacaagagcacctgcccgactgagcgtgcacgacctcgcgccgatcagggccaagaactcacccccgtcgtgtgtgccgatggaggtggaggccgacgggatccaggaagccaccgcaggcgcaggagacggcggcggcgtggacgatgtcttcttctgcgtcgccgcgacgtccaggggcaacaagaacagcatctcctacttccacaccaacgcggtcggcgaggacgccgagtcggcgctcgcgctcgccgcgctctgcctcgaccacgcccccgaccaccaccggtggcaccaccacaccgtcgccggggcgaagacgttcgcgttcctctcggccgacgacggccgcacgtacttcgccgcggccgacccgagccccggcgccgccgaggtggtccggttcctggagcgcgtccgcgacgcgtgcgacgccgcgcccaggaagcgcctgcgcgacgaggcggtggcccccgtcgctcgccagttcgccaggacgctgcgggcggcggcggcgggcccgagctcaggcgcggagctaccggaggcctcgctgcaggcgaaggagccgtccacgccgctggcgccggtctgcgagaaagacgaggaggagcgccagagggccggagagcgacgtcgcgccttcttgcagccggaggaaagcgcaagcgcgcttccggggtggcgcccgtggtggcgccacgcgtcggtcgtgatcgtcgtggatgtggtgctgtgcctcgtgctgttcgccgtgtggatgggggtttgcaaaggcttcgggtgtctgacgcgatgaaaatcgcccgagagcatgcaattgtaaatttgtaatcacatccatgctgtgtgcatggttcgcgttctttatgttaatttgcttgtcagatatcacatctacaatttgaaggaaaaaaacggtttaagaaacgaagacgcatgccttcaatgcacaca

SEQ ID NO: 78037 - DNA, 1695 bp, Zea Mays
ataagatctttacctttgaaaatggagaacattggcctactgtttactcaactggccgtccaatcaaaatggcttcagttttagatacagggattttctagctaccatcctaattaaaaccttagtattttaaaacaaatagtaaaatatttctttctagttattatatactaataaaatatacatgcaatgtttatcttctgtttcttttttctattcttcctcttctcttttcaacttgtctcccacatctctactgctctaccgtacctatcctcttcttcaacctccaccacaccatacatgttctttggtcatgctaggatgcctccaacacgaagaagctatttcagccaaccatttgatcttttcgttgccatcagtggttgaattgcccatccaaattataagtatatccaacagaaaagtcattttaccttctatatttatatcaaatagtactgatattgagttggtggatagttgactgtctgccattgagatacgtataaaaatagttgtccttgctagcattcattttaacttttctctatcatcttatccaaaatggttgctctttttatcggtacagagaaactcggttctgaacctttgtaattgtgttttttagagccgccggtattataggccggttgaaataactatatgtaccacggataattgagaaccatcgatttccacctacggtcgagtagcgaaaacagaagaaaaaaaaaccaccgggttttggtgatttcccagcgagaagttgttccatggttgaaggcggcatctacaagggttaactctatatttcaatgtaaacaatgaggttcatacatgctgtatggattgtctggacaccaatagacgagatgatcttcgggaagggtttatgccctggagtcaccaaaaccctcgccattggagcggactgttcttggtggccactacaagtacaaccgtgcataccaggctccactacagttctgtccattgaaagttgttcctgaacagtgacccgaagctgagtcctgaaaggtgacggttgaagacagcgatcgatactgtccatctgcgccagcaaatgcatcatgcattgtgatctctacatggactgttcgattgagaagcgccaacgaacctgccatgacgcatggaggagatccgatgcacatgaaactgttcagaactggcatcccctttcgttatgaacatcatcagatcgcactaaatgcagcccatctaaacgctcccccttcattcatgttgtgtcgcgtacgtcatgaactctctggattagccagtgacaacgatgctgcataaattctagatcggaaagatggctcgtcgtttcctcaagatcggggacacagatgagctgcccactgtgatactgataccaccatggttacagcgtggggctgtaggttgaggaagacgaaaccttcagcttcccattatttggcttgtcattttgccgtagcttctgggttatgagcttgaaagcgcccgtgctgtacggacattggattggagcgtgcagtagtaaaatttcattcggctcttagagagctgctccggttttatttgagccggtgcagtggcgaagctagagcaaatttgacgggtgcaattgcttcatgggtgcatagatatcaagtaatgtgagtgcatatatggtgaaattttgcg

SEQ ID NO: 78038 - DNA, 2189 bp, Zea Mays
ctcgagataagatctttacctttgaaaatggagaacattggcctactgtttactcaactggccgtccaatcaaaatggcttcagttttagatacagggattttctagctaccatcctaattaaaaccttagtattttaaaacaaatagtaaaatatttctttctagttattatatactaataaaatatacatgcaatgtttatcttctgtttcttttttctattcttcctcttctcttttcaacttgtctcccacatctctactgctctaccgtacctatcctcttcttcaacctccaccacaccatacatgttctttggtcatgctaggatgcctccaacacgaagaagctatttcagccaaccatttgatcttttcgttgccatcagtggttgaattgcccatccaaattataagtatatccaacagaaaagtcattttaccttctatatttatatcaaatagtactgatattgagttggtggatagttgactgtctgccattgagatacgtataaaaatagttgtccttgctagcattcattttaacttttctctatcatcttatccaaaatggttgctctttttatcggtacagagaaactcggttctgaacctttgtaattgtgttttttagagccgccggtattataggccggttgaaataactatatgtaccacggataattgagaaccatcgatttccacctacggtcgaggtaataaaaactttagtgaaaatcttttctggataaagcacaattgtcttgccctggggcaaaaataaatctttcataaagtttgggaacccccgtggaacttgtagaccataccaaaagggacgcccgaactccttatctgttgttgagaaggtaaatttcgcacggaattttgacaaatgctcacatgaaaatgaaatagaccccggtatcagagagaaccaatggaccagatatcagttcttaattttttgagatgtgttgatgcatgtggacttggatcgatgcactcaagcacatggacttagtcttgtatgagtctgagttcttactatgcaatgttgtcgctactggggttatattatggtttacaatccgggggtgggttgaaggcagggttcacagtttcgtattgggtcaaccgaatttcgttttgttaactaaaatttgacatttatatttttatattttgaatcgaaattcatttgaaaccttgctgaaattcgtttttcgcttagtagcgaaaacagaagaaaaaaaaaccaccgggttttggtgatttcccagcgagaagttgttccatggttgaaggcggcatctacaagggttaactctatatttcaatgattgtctggacaccaatagacgagatgatcttcgggaagggtttatgccctggagtcaccaaaaccctcgccattggagcggactgttcttggtggccactacaagtacaaccgtgcataccaggctccactacagttctgtccattgaaagttgttcctgaacagtgacccgaagctgagtcctgaaaggtgacggttgaagacagcgatcgatactgtccatctgcgccagcaaatgcatcatgcattgtgatctctacatggactgttcgattgagaagcgccaacgaacctgccatgacgcatggaggagatccgatgcacatgaaactgttcagaactggcatcccctttcgttatgaacatcatcagatcgcactaaatgcagcccatctaaacgctcccccttcattcatgttgtgtcgcgtacgtcatgaactctctggattagccagtgacaacgatgctgcataaattctagatcggaaagatggctcgtcgtttcctcaagatcggggacacagatgagctgcccactgtgatactgataccaccatggttacagcgtggggctgtaggttgaggaagacgaaaccttcagcttcccattatttggcttgtcattttgccgtagcttctgggttatgagcttgaaagcgcccgtgctgtacggacattggattggagcgtgcagtagtaaaatttcattcggctcttagagagctgctccggttttatttgagccggtgcagtggcgaagctagagcaaatttgacgggtgcaattgcttcatgggtgcatagatatcaagtaatgtgagtgcatatatggtgaaattttgcg

SEQ ID NO: 78039 - DNA, 2234 bp, Zea Mays
gacggcggcggagaactcgagataagatctttacctttgaaaatggagaacattggcctactgtttactcaactggccgtccaatcaaaatggcttcagttttagatacagggattttctagctaccatcctaattaaaaccttagtattttaaaacaaatagtaaaatatttctttctagttattatatactaataaaatatacatgcaatgtttatcttctgtttcttttttctattcttcctcttctcttttcaacttgtctcccacatctctactgctctaccgtacctatcctcttcttcaacctccaccacaccatacatgttctttggtcatgctaggatgcctccaacacgaagaagctatttcagccaaccatttgatcttttcgttgccatcagtggttgaattgcccatccaaattataagtatatccaacagaaaagtcattttaccttctatatttatatcaaatagtactgatattgagttggtggatagttgactgtctgccattgagatacgtataaaaatagttgtccttgctagcattcattttaacttttctctatcatcttatccaaaatggttgctctttttatcggtacagagaaactcggttctgaacctttgtaattgtgttttttagagccgccggtattataggccggttgaaataactatatgtaccacggataattgagaaccatcgatttccacctacggtcgaggtaataaaaactttagtgaaaatcttttctggataaagcacaattgtcttgccctggggcaaaaataaatctttcataaagtttgggaacccccgtggaacttgtagaccataccaaaagggacgcccgaactccttatctgttgttgagaaggtaaatttcgcacggaattttgacaaatgctcacatgaaaatgaaatagaccccggtatcagagagaaccaatggaccagatatcagttcttaattttttgagatgtgttgatgcatgtggacttggatcgatgcactcaagcacatggacttagtcttgtatgagtctgagttcttactatgcaatgttgtcgctactggggttatattatggtttacaatccgggggtgggttgaaggcagggttcacagtttcgtattgggtcaaccgaatttcgttttgttaactaaaatttgacatttatatttttatattttgaatcgaaattcatttgaaaccttgctgaaattcgtttttcgcttagtagcgaaaacagaagaaaaaaaaaccaccgggttttggtgatttcccagcgagaagttgttccatggttgaaggcggcatctacaagggttaactctatatttcaatgtaaacaatgaggttcatacatgctgtatggattgtctggacaccaatagacgagatgatcttcgggaagggtttatgccctggagtcaccaaaaccctcgccattggagcggactgttcttggtggccactacaagtacaaccgtgcataccaggctccactacagttctgtccattgaaagttgttcctgaacagtgacccgaagctgagtcctgaaaggtgacggttgaagacagcgatcgatactgtccatctgcgccagcaaatgcatcatgcattgtgatctctacatggactgttcgattgagaagcgccaacgaacctgccatgacgcatggaggagatccgatgcacatgaaactgttcagaactggcatcccctttcgttatgaacatcatcagatcgcactaaatgcagcccatctaaacgctcccccttcattcatgttgtgtcgcgtacgtcatgaactctctggattagccagtgacaacgatgctgcataaattctagatcggaaagatggctcgtcgtttcctcaagatcggggacacagatgagctgcccactgtgatactgataccaccatggttacagcgtggggctgtaggttgaggaagacgaaaccttcagcttcccattatttggcttgtcattttgccgtagcttctgggttatgagcttgaaagcgcccgtgctgtacggacattggattggagcgtgcagtagtaaaatttcattcggctcttagagagctgctccggttttatttgagccggtgcagtggcgaagctagagcaaatttgacgggtgcaattgcttcatgggtgcatagatatcaagtaatgtgagtgcatatatggtgaaattttgcg

SEQ ID NO: 78040 - DNA, 1031 bp, Zea Mays
ggtcccctaaaatctgaaaccataaaccccatcattatgaaacgcaatctctttcgctctgctgtcctgtttttgtttgcttcgatcaaaagccatgcatagttattttcttgtctgtgcacctgcctgcctgcttaagtgtgacaaacagcagaggtggaggttgaagccctggtgatccaaggccccaagctgggcaccgtgctcagccaggtgaagaagctggaggcctccgtgctggtgctcggccagggcaggccgtctccctgctaccgctggctaagctgtttcttgcggagcagcagcgaggagttcgtggagcagtgcatcgaccaggcggagtgcctgacgctggcggtgaggaagcagagcaaggccgtcggcgggtacctcgtcagcacccggtggcagaagaacttctggctcctggcctgacagccattttacttgctacacgatcgatcatattttattactcccacatatctctgctaccatttcgtgtaaccaagtgcgtcacaactgttctctatctctctgtgccatgccgtgtatgcgtccgccatggatcgtcctgccagcctcctcccgttgtaaagccaaaaagagccccagatctctgaccgccctcctataaacctgtattctttcttcattttccctgcgacgagtcttgacttcttgagcgtgcgcgtgtctgtacgggtaaccatcatgtaatgctgcatctgcatatctgttgtacacggtgcttcttttgtttgctggagactggagttggctttaggctctcaagtttgtgccgattacgctaccggatggacgaacctctggttgcttaaccacgggagaggagaagggcagcgcagattcaggataacagcgtcgacaagaccacggcgacgtttccgatgccgtgacacgatttttttttttgggaatgcgactcgcactcaaatcttgaaggaaaggaagtgcggtggcagcctgttattaccagtggggcaccgattgatggtcgcggggttggg

SEQ ID NO: 78041 - DNA, 1004 bp, Zea Mays
agactgtcattttttttacacttgtagccagtttgagagatcacagatgagatcaggatccactttcgtgtatgcatggatcaggatctagatccgagacagaccaaaacacaaaagaagaagtgagcggtggaggttgaagccctggtgatccaaggccccaagctgggcaccgtgctcagccaggtgaagaagctggaggcctccgtgctggtgctcggccagggcaggccgtctccctgctaccgctggctaagctgtttcttgcggagcagcagcgaggagttcgtggagcagtgcatcgaccaggcggagtgcctgacgctggcggtgaggaagcagagcaaggccgtcggcgggtacctcgtcagcacccggtggcagaagaacttctggctcctggcctgacagccattttacttgctacacgatcgatcatattttattactcccacatatctctgctaccatttcgtgtaaccaagtgcgtcacaactgttctctatctctctgtgccatgccgtgtatgcgtccgccatggatcgtcctgccagcctcctcccgttgtaaagccaaaaagagccccagatctctgaccgccctcctataaacctgtattctttcttcattttccctgcgacgagtcttgacttcttgagcgtgcgcgtgtctgtacgggtaaccatcatgtaatgctgcatctgcatatctgttgtacacggtgcttcttttgtttgctggagactggagttggctttaggctctcaagtttgtgccgattacgctaccggatggacgaacctctggttgcttaaccacgggagaggagaagggcagcgcagattcaggataacagcgtcgacaagaccacggcgacgtttccgatgccgtgacacgatttttttttttgggaatgcgactcgcactcaaatcttgaaggaaaggaagtgcggtggcagcctgttattaccagtggggcaccgattgatggtcgcggggttggg

SEQ ID NO: 78042 - DNA, 900 bp, Zea Mays
cacatgcacttgcgtttgctgactagtggaggttgaagccctggtgatccaaggccccaagctgggcaccgtgctcagccaggtgaagaagctggaggcctccgtgctggtgctcggccagggcaggccgtctccctgctaccgctggctaagctgtttcttgcggagcagcagcgaggagttcgtggagcagtgcatcgaccaggcggagtgcctgacgctggcggtgaggaagcagagcaaggccgtcggcgggtacctcgtcagcacccggtggcagaagaacttctggctcctggcctgacagccattttacttgctacacgatcgatcatattttattactcccacatatctctgctaccatttcgtgtaaccaagtgcgtcacaactgttctctatctctctgtgccatgccgtgtatgcgtccgccatggatcgtcctgccagcctcctcccgttgtaaagccaaaaagagccccagatctctgaccgccctcctataaacctgtattctttcttcattttccctgcgacgagtcttgacttcttgagcgtgcgcgtgtctgtacgggtaaccatcatgtaatgctgcatctgcatatctgttgtacacggtgcttcttttgtttgctggagactggagttggctttaggctctcaagtttgtgccgattacgctaccggatggacgaacctctggttgcttaaccacgggagaggagaagggcagcgcagattcaggataacagcgtcgacaagaccacggcgacgtttccgatgccgtgacacgatttttttttttgggaatgcgactcgcactcaaatcttgaaggaaaggaagtgcggtggcagcctgttattaccagtggggcaccgattgatggtcgcggggttggg

SEQ ID NO: 78043 - DNA, 2782 bp, Zea Mays
cgacaccgtctctggccggttccccgtccaggttcttcctccggatcgtcgcattaccccgatcctgtattcccatcgaccacacctcatggctcacgcgaataccacaccacacctcacggcgtccattcgttcccgtctcgtcttccgctgcttgcctccgactcccccacgcgtcgtctcgtgcttcccaatccccatagagccggttgatccccaaaggcccatggttttctccgacgccgcgtcgcctctcgtagccactgccgctgactctgcttcctcctgcgtcgcccacctccgctgctgctgtcgcgttagttgttgctgttgttgttgaagacgcgttgctcgctagggttcgtgatttctcgccgatcgattcgggaactggtaagctatggatctctcgcggcccgcatcgtcagacctctcgctcgggctgcactcgcatgcccacgcccacgctcgcgtgcacgcggcagccgcgccgctgcgcctgttcgacgacgcgaagccggagcgcctcgtggccggtgaggccgacgcggagagggacgacggggacgggggcgaccagcacttctccctcctcgggcactccctctgcgtcaagcgcccgcgccgcgccgtcaacggcggtgggggtgggggcggagagacgtcatcctgctcgtccacgtccccggcgctgcgccccgccaagcggcaggcggcgggggaagatagcggcgcggatctggagacccgccgcgccgcggtccgctcctggggcaaccagtcgctggcggaggccgacccggatgtgcactcgctgatggagcaggagctggcccgccaggtgcggggcatcgagctcatagcgtcggagaacttcgtctgccgcgcggtgctcgatgcgctcggcagccacctcaccaacaagtactctgagggggccccgggtgctcgctactacggcgggaatcagcacatcgatgccatcgagcggctctgccatgagcgcgccctcactgccttcggtctcgaccctgcctgctggggcgtcaacgtgcagccgtactcgtgcacgtctgccaatttggctgtctacactggtcttcttcaacccaaggaccgcatcatggggctggagccaccgtcgggcggccatgttagccatggttactacacgcccagtggcaagaaggtgtcaggtgcctctattttcttcgagagcatgtcgtacaaggtgaacccacagactgggtatattgattacgacaagctcgaggagagagcaatggatttccacccgaaaattctcatatgtggtgggagctcttaccccagagagtgggactttgctcggatgagattggttgctgataagtgtggtgcagtgcttctttgcgatatggcacatatcagtgggcttgttgcagcaaaggaatgtcgtagccctttcgactactgtgatgttgttacgtcaactactcacaagaatcttaggggccctagaggtggtataatattcttcaggaaagggaaaaatttaaggaaacgagctggatctttttctcaaggagatgagaatgaatacgacttcgaggataggataaattttggtgtttttccttcaatgcaagggggaccccataataatcatattgctgccttggctattactctgaagcaagtcgcaactcctgagtataaagcgtacattcaacaagtcaagaaaaatgctcaggctctggcatcagcgttgctcagaagaaaatgcagattggttactggtggcacagataatcacttaatactttgggatctcagaactcttggcttgactggtaagatctttgagaaggtctgtgaggcatgccacatatctatcaacaagacaccaatttatggggataatggctcaatatcccctggtggtgtgcggatcggaacacctgcaatgactactagaggttgcctagaagaggacttcgagtcgattgcagacttcctcataaggtctactcagattgctagcaatgttctgaaagaacatggcaaagtgcaaaaggagtttctaagaggcctaatgaacaataaggatgttatggaactccgaaatcaggttgaggcatttgcgtcacagtttgctatgccaggttttgatgtatgaatgtgcatatatactgtagtcagcaattatccagattcacagcaacattgtcatccgctcagttcctcgaatactagcaagtcttgctctcgactgcacaacgattaggagagtttttattaggttgtagagggtcttgactcttgattttgattcaaacaggaaagttgtgatgagttatgtatgtcaaccttggtatcacgagttactatagtctataggagacctgttgtggccttcggagacctgttgctgccgagactgaataagcttaccatatgatttctggctaactattaggcgaagggatgaggttaattgtactggggcgtaccgtcagtttcgtatgtttgcaaacacatcaagaatcaggtgctcatggcttgttgcatcaactgtttagatttattaggcgaagtgatgctgcactgtttagatttatttttctgctttattgttgctttcatggccatgttggatgccccgccgactagcgcagggacgggatttgtactggtggtagagtttgatctttactgacgatgatttcattcgcctagcgaaaggtgtttgcaccggtgccacttcgaaatctgtaatttacactggcgacacttaaaaaac

SEQ ID NO: 78044 - DNA, 2777 bp, Zea Mays
cgacaccgtctctggccggttccccgtccaggttcttcctccggatcgtcgcattaccccgatcctgtattcccatcgaccacacctcatggctcacgcgaataccacaccacacctcacggcgtccattcgttcccgtctcgtcttccgctgcttgcctccgactcccccacgcgtcgtctcgtgcttcccaatccccatagagccggttgatccccaaaggcccatggttttctccgacgccgcgtcgcctctcgtagccactgccgctgactctgcttcctcctgcgtcgcccacctccgctgctgctgtcgcgttagttgttgctgttgttgttgaagacgcgttgctcgctagggttcgtgatttctcgccgatcgattcgggaactggtaagctatggatctctcgcggcccgcatcgtcagacctctcgctcgggctgcactcgcatgcccacgcccacgctcgcgtgcacgcggcagccgcgccgctgcgcctgttcgacgacgcgaagccggagcgcctcgtggccggtgaggccgacgcggagagggacgacggggacgggggcgaccagcacttctccctcctcgggcactccctctgcgtcaagcgcccgcgccgcgccgtcaacggcggtgggggtgggggcggagagacgtcatcctgctcgtccacgtccccggcgctgcgccccgccaagcggcaggcggcgggggaagatagcggcgcggatctggagacccgccgcgccgcggtccgctcctggggcaaccagtcgctggcggaggccgacccggatgtgcactcgctgatggagcaggagctggcccgccaggtgcggggcatcgagctcatagcgtcggagaacttcgtctgccgcgcggtgctcgatgcgctcggcagccacctcaccaacaagtactctgagggggccccgggtgctcgctactacggcgggaatcagcacatcgatgccatcgagcggctctgccatgagcgcgccctcactgccttcggtctcgaccctgcctgctggggcgtcaacgtgcagccgtactcgtgcacgtctgccaatttggctgtctacactggtcttcttcaacccaaggaccgcatcatggggctggagccaccgtcgggcggccatgttagccatggttactacacgcccagtggcaagaaggtgtcaggtgcctctattttcttcgagagcatgtcgtacaaggtgaacccacagactgggtatattgattacgacaagctcgaggagagagcaatggatttccacccgaaaattctcatatgtggtgggagctcttaccccagagagtgggactttgctcggatgagattggttgctgataagtgtggtgcagtgcttctttgcgatatggcacatatcagtgggcttgttgcagcaaaggaatgtcgtagccctttcgactactgtgatgttgttacgtcaactactcacaagaatcttaggggccctagaggtggtataatattcttcaggaaagggaaaaatttaaggaaacgagctggatctttttctcaaggagatgagaatgaatacgacttcgaggataggataaattttggtgtttttccttcaatgcaagggggaccccataataatcatattgctgccttggctattactctgaagcaagtcgcaactcctgagtataaagcgtacattcaacaagtcaagaaaaatgctcaggctctggcatcagcgttgctcagaagaaaatgcagattggttactggtggcacagataatcacttaatactttgggatctcagaactcttggcttgactgatctttgagaaggtctgtgaggcatgccacatatctatcaacaagacaccaatttatggggataatggctcaatatcccctggtggtgtgcggatcggaacacctgcaatgactactagaggttgcctagaagaggacttcgagtcgattgcagacttcctcataaggtctactcagattgctagcaatgttctgaaagaacatggcaaagtgcaaaaggagtttctaagaggcctaatgaacaataaggatgttatggaactccgaaatcaggttgaggcatttgcgtcacagtttgctatgccaggttttgatgtatgaatgtgcatatatactgtagtcagcaattatccagattcacagcaacattgtcatccgctcagttcctcgaatactagcaagtcttgctctcgactgcacaacgattaggagagtttttattaggttgtagagggtcttgactcttgattttgattcaaacaggaaagttgtgatgagttatgtatgtcaaccttggtatcacgagttactatagtctataggagacctgttgtggccttcggagacctgttgctgccgagactgaataagcttaccatatgatttctggctaactattaggcgaagggatgaggttaattgtactggggcgtaccgtcagtttcgtatgtttgcaaacacatcaagaatcaggtgctcatggcttgttgcatcaactgtttagatttattaggcgaagtgatgctgcactgtttagatttatttttctgctttattgttgctttcatggccatgttggatgccccgccgactagcgcagggacgggatttgtactggtggtagagtttgatctttactgacgatgatttcattcgcctagcgaaaggtgtttgcaccggtgccacttcgaaatctgtaatttacactggcgacacttaaaaaac

SEQ ID NO: 78045 - DNA, 1707 bp, Zea Mays
gtcttctccctctcccctagatccttcgacgccgccctccctcagctcattccctgccgccgctcatctgctggccttgtctcactgccgcccaaccattttcctccctcaagctagcacgcagcctcaactcctctcccacctcacgcacgtctctcccagccgttccttcatttctctggctcgtccttctccatggggtcgcgccctgctgcgccgtcgtgctggtcgccggctgagcccccttcagtgcctgacgccgcatctccctgccacctcccatggacgccagccctcagccatggatgccgaaccccctctctttagtgcctttctttacagcccctgcgtcgccgtgcgtgtaaggtgtttgtataaatgctcaagaggagtgccgtgtcatggccaactcttttggcgtcgtcggatgtttgatgttttgtgcatcccgtctacgacgccgtcgaccatcggtgaggattcgttcttgctttgtcatttcatcgatcgacgtctatttgctaatatgaattgtgtttatgtgcctatgtgtgttgaggagcgaaatccgtgaaatctaggtgaagaagagatggagcacgtcgtcgtcatggttgcagctttgcttttgtcgtcgtggagcctccaccagcgccgtgtagcagaacaatggaaccaaaatacaggacattttcctacttcacgtctggatgccatccaattaatatcttctctacgatattgcaatggaagggactgctcttatgtgttattggtgctattccgcttgtacggccaacgaaataggtcctactacacaagggaaatagaggataccatactcttagcttcacagaagcctgaagtgtatgatgacattgctcgcgatacgtgctgcaaatttgggatagatagacctcaagttgtacctgtgcaaggactacctcaggtttgaaccatacttatggaatgcatgtaagaggtttgtgttggagcaccgggctggcgagaaccgtgctccaatcatttcagatgatagccccaacaaagatatcaacaatgccttctataatatcgtgatgatgaaaaagtcaaaggtcagttttgtggaaaacatacaatatgttggtatcttcaatagtataagatcatgtaccacacgtcgacatcaatattgactaatttctttcaataggatgggagaatgttgaatgcttcttcagatactatttcttggtctgtcaaatctgcttgacccaaatgcaagttttgttcaaatgtggcaaaaaatgattgtctcaccaattgtcagcacgttttcttccagcacgtttgcttccagcaaagttgtcagttcttatgattagatgaaaaatctagaattattctatcatttacacatccatatgacctttgtgatatgtgatgatgtgaggtattcaaccgtgtctaactactaattattgccttcttctatttgttgtataggaaaagatgaaatggaactcaaattttagtggtcgcacaagtgtggagccagttgatgaccaagtttttcaattagtattttagtttgaatttagagtacacatatgtatgagttatttgacaatgcttgtttatgagagattgaatgatacctatctatattatattaattataatgttattaaataaatgtgtgtatgtatatttctctttcaaatt

SEQ ID NO: 78046 - DNA, 1966 bp, Zea Mays
gtcttctccctctcccctagatccttcgacgccgccctccctcagctcattccctgccgccgctcatctgctggccttgtctcactgccgcccaaccattttcctccctcaagctagcacgcagcctcaactcctctcccacctcacgcacgtctctcccagccgttccttcatttctctggctcgtccttctccatggggtcgcgccctgctgcgccgtcgtgctggtcgccggctgagcccccttcagtgcctgacgccgcatctccctgccacctcccatggacgccagccctcagccatggatgccgaaccccctctctttagtgcctttctttacagcccctgcgtcgccgtgcgtgtaaggtgtttgtataaatgctcaagaggagtgccgtgtcatggccaactcttttggcgtcgtcggatgtttgatgttttgtgcatcccgtctacgacgccgtcgaccatcggtgaggattcgttcttgctttgtcatttcatcgatcgacgtctatttgctaatatgaattgtgtttatgtgcctatgtgtgttgaggagcgaaatccgtgaaatctaggtgaagaagagatggagcacgtcgtcgtcatggttgcagctttgcttttgtcgtcgtggagcctccaccagcgccgtgtagcagaacaatggaaccaaaatacaggacattttcctacttcacgtctggatgccatccaattaatatcttctctacgatattgcaatggaaggtgtagatagatgcaagtatacattcaatgttcttatgatagaggaaaggcatagctgcagatgggtttgatgttttatcttttcattcatgcatttcatcccatgcgcataaacaatttccaagtagcttgtgtatccaaacttggttcttttgttcactcagccaggttgtactgtctcattcagaattcggatttttcagccattaacccgcattttctattggatcgttttagattcatttgttttatctattagaccgtactctatattgtttcatttgaggacatttcaaatggttgttgtaggtatgtgatagatgactagaagaaaattataaaaggatgttgaataagattgtgcttattttctcgtgacgaaggttttttctatgcttagggactgctcttatgtgttattggtgctattccgcttgtacggccaacgaaataggtcctactacacaagggaaatagaggataccatactcttagcttcacagaagcctgaagtgtatgatgacattgctcgcgatacgtgctgcaaatttgggatagatagacctcaagttgtacctgtgcaaggactacctcaggtcaaaggtcagttttgtggaaaacatacaatatgttggtatcttcaatagtataagatcatgtaccacacgtcgacatcaatattgactaatttctttcaataggatgggagaatgttgaatgcttcttcagatactatttcttggtctgtcaaatctgcttgacccaaatgcaagttttgttcaaatgtggcaaaaaatgattgtctcaccaattgtcagcacgttttcttccagcacgtttgcttccagcaaagttgtcagttcttatgattagatgaaaaatctagaattattctatcatttacacatccatatgacctttgtgatatgtgatgatgtgaggtattcaaccgtgtctaactactaattattgccttcttctatttgttgtataggaaaagatgaaatggaactcaaattttagtggtcgcacaagtgtggagccagttgatgaccaagtttttcaattagtattttagtttgaatttagagtacacatatgtatgagttatttgacaatgcttgtttatgagagattgaatgatacctatctatattatattaattataatgttattaaataaatgtgtgtatgtatatttctctttcaaatt

SEQ ID NO: 78047 - DNA, 2012 bp, Zea Mays
gtcttctccctctcccctagatccttcgacgccgccctccctcagctcattccctgccgccgctcatctgctggccttgtctcactgccgcccaaccattttcctccctcaagctagcacgcagcctcaactcctctcccacctcacgcacgtctctcccagccgttccttcatttctctggctcgtccttctccatggggtcgcgccctgctgcgccgtcgtgctggtcgccggctgagcccccttcagtgcctgacgccgcatctccctgccacctcccatggacgccagccctcagccatggatgccgaaccccctctctttagtgcctttctttacagcccctgcgtcgccgtgcgtgtaaggtgtttgtataaatgctcaagaggagtgccgtgtcatggccaactcttttggcgtcgtcggatgtttgatgttttgtgcatcccgtctacgacgccgtcgaccatcggtgaggattcgttcttgctttgtcatttcatcgatcgacgtctatttgctaatatgaattgtgtttatgtgcctatgtgtgttgaggagcgaaatccgtgaaatctaggtgaagaagagatggagcacgtcgtcgtcatggttgcagctttgcttttgtcgtcgtggagcctccaccagcgccgtgtagcagaacaatggaaccaaaatacaggacattttcctacttcacgtctggatgccatccaattaatatcttctctacgatattgcaatggaagggactgctcttatgtgttattggtgctattccgcttgtacggccaacgaaataggtcctactacacaagggaaatagaggataccatactcttagcttcacagaagcctgaagtgtatgatgacattgctcgcgatacgtgctgcaaatttgggatagatagacctcaagttgtacctgtgcaaggactacctcaggtttgaaccatacttatggaatgcatgtaagaggtttgtgttggagcaccgggctggcgagaaccgtgctccaatcatttcagatgatagccccaacaaagatatcaacaatgccttctataatatcgtgatgatgaaaaagtagatactactaccccaatatatcttatatttctcttctttatttccttttcagttttagtagaagaaaatgttgttggcttgtgatttagcatggttcttggattctacaaagtgattgtcttcaccaatcctttgataaattctatgagaatgcttaattgcaagatatgcaatgatgtaattcttgctccagtcctaatgaaccagttgttcacaataggctaaaccatcagaaagttaactactaactacaatcaaactattttttacgaagcagttattattttgttacaactttcaatacagaagacaaaacacatgaaatttgataaatgtaatcctcacatttgaaccatagtattgcagtgccacaagaatagtttcattttatctgcaaagtcattccttatagttgtcaatgaactatcatgcgaagatagaataagaactttgtgattgcttgtttatttatgagattgaataagagggttactacaaaatatttgtcatatcttttcaatttcctttcttgtgtaatcatggcctagatgtttagattactgattagcagtttttctatgtattattttgagtttgtagacaacagacattgagtgtcttttgatattaattttcaggtcaaaggtcagttttgtggaaaacatacaatatgttggtatcttcaatagtataagatcatgaaaagatgaaatggaactcaaattttagtggtcgcacaagtgtggagccagttgatgaccaagtttttcaattagtattttagtttgaatttagagtacacatatgtatgagttatttgacaatgcttgtttatgagagattgaatgatacctatctatattatattaattataatgttattaaataaatgtgtgtatgtatatttctctttcaaatt

SEQ ID NO: 78048 - DNA, 1714 bp, Zea Mays
gtcttctccctctcccctagatccttcgacgccgccctccctcagctcattccctgccgccgctcatctgctggccttgtctcactgccgcccaaccattttcctccctcaagctagcacgcagcctcaactcctctcccacctcacgcacgtctctcccagccgttccttcatttctctggctcgtccttctccatggggtcgcgccctgctgcgccgtcgtgctggtcgccggctgagcccccttcagtgcctgacgccgcatctccctgccacctcccatggacgccagccctcagccatggatgccgaaccccctctctttagtgcctttctttacagcccctgcgtcgccgtgcgtgtaaggtgtttgtataaatgctcaagaggagtgccgtgtcatggccaactcttttggcgtcgtcggatgtttgatgttttgtgcatcccgtctacgacgccgtcgaccatcggtgaggattcgttcttgctttgtcatttcatcgatcgacgtctatttgctaatatgaattgtgtttatgtgcctatgtgtgttgaggagcgaaatccgtgaaatctaggtgaagaagagatggagcacgtcgtcgtcatggttgcagctttgcttttgtcgtcgtggagcctccaccagcgccgtgtagcattcaggaacaatggaaccaaaatacaggacattttcctacttcacgtctggatgccatccaattaatatcttctctacgatattgcaatggaaggtgtagatagatgcaagtatacattcaatgttcttatgatagaggaaaggcatagctgcagatgggtttgatgttttatcttttcattcatgcatttcatcccatgcgcataaacaatttccaagtagcttgtgtatccaaacttggttcttttgttcactcagccaggttgtactgtctcattcagaattcggatttttcagccattaacccgcattttctattggatcgttttagattcatttgttttatctattagaccgtactctatattgtttcatttgaggacatttcaaatggttgttgtaggtatgtgatagatgactagaagaaaattataaaaggatgttgaataagattgtgcttattttctcgtgacgaaggttttttctatgcttagggactgctcttatgtgttattggtgctattccgcttgtacggccaacgaaataggtcctactacacaagggaaatagaggataccatactcttagcttcacagaagcctgaagtgtatgatgacattgctcgcgatacgtgctgcaaatttgggatagatagacctcaagttgtacctgtgcaaggactacctcaggtttgaaccatacttatggaatgcatgtaagaggtttgtgttggagcaccgggctggcgagaaccgtgctccaatcatttcagatgatagccccaacaaagatatcaacaatgccttctataatatcgtgatgatgaaaaagaaaagatgaaatggaactcaaattttagtggtcgcacaagtgtggagccagttgatgaccaagtttttcaattagtattttagtttgaatttagagtacacatatgtatgagttatttgacaatgcttgtttatgagagattgaatgatacctatctatattatattaattataatgttattaaataaatgtgtgtatgtatatttctctttcaaatt

SEQ ID NO: 78049 - DNA, 2259 bp, Zea Mays
gtcttctccctctcccctagatccttcgacgccgccctccctcagctcattccctgccgccgctcatctgctggccttgtctcactgccgcccaaccattttcctccctcaagctagcacgcagcctcaactcctctcccacctcacgcacgtctctcccagccgttccttcatttctctggctcgtccttctccatggggtcgcgccctgctgcgccgtcgtgctggtcgccggctgagcccccttcagtgcctgacgccgcatctccctgccacctcccatggacgccagccctcagccatggatgccgaaccccctctctttagtgcctttctttacagcccctgcgtcgccgtgcgtgtaaggtgtttgtataaatgctcaagaggagtgccgtgtcatggccaactcttttggcgtcgtcggatgtttgatgttttgtgcatcccgtctacgacgccgtcgaccatcggtgaggattcgttcttgctttgtcatttcatcgatcgacgtctatttgctaatatgaattgtgtttatgtgcctatgtgtgttgaggagcgaaatccgtgaaatctaggtgaagaagagatggagcacgtcgtcgtcatggttgcagctttgcttttgtcgtcgtggagcctccaccagcgccgtgtagcaggactgctcttatgtgttattggtgctattccgcttgtacggccaacgaaataggtcctactacacaagggaaatagaggataccatactcttagcttcacagaagcctgaagtgtatgatgacattgctcgcgatacgtgctgcaaatttgggatagatagacctcaagttgtacctgtgcaaggactacctcaggtttgaaccatacttatggaatgcatgtaagaggtttgtgttggagcaccgggctggcgagaaccgtgctccaatcatttcagatgatagccccaacaaagatatcaacaatgccttctataatatcgtgatgatgaaaaagtagatactactaccccaatatatcttatatttctcttctttatttccttttcagttttagtagaagaaaatgttgttggcttgtgatttagcatggttcttggattctacaaagtgattgtcttcaccaatcctttgataaattctatgagaatgcttaattgcaagatatgcaatgatgtaattcttgctccagtcctaatgaaccagttgttcacaataggctaaaccatcagaaagttaactactaactacaatcaaactattttttacgaagcagttattattttgttacaactttcaatacagaagacaaaacacatgaaatttgataaatgtaatcctcacatttgaaccatagtattgcagtgccacaagaatagtttcattttatctgcaaagtcattccttatagttgtcaatgaactatcatgcgaagatagaataagaactttgtgattgcttgtttatttatgagattgaataagagggttactacaaaatatttgtcatatcttttcaatttcctttcttgtgtaatcatggcctagatgtttagattactgattagcagtttttctatgtattattttgagtttgtagacaacagacattgagtgtcttttgatattaattttcaggtcaaaggtcagttttgtggaaaacatacaatatgttggtatcttcaatagtataagatcatgtaccacacgtcgacatcaatattgactaatttctttcaataggatgggagaatgttgaatgcttcttcagatactatttcttggtctgtcaaatctgcttgacccaaatgcaagttttgttcaaatgtggcaaaaaatgattgtctcaccaattgtcagcacgttttcttccagcacgtttgcttccagcaaagttgtcagttcttatgattagatgaaaaatctagaattattctatcatttacacatccatatgacctttgtgatatgtgatgatgtgaggtattcaaccgtgtctaactactaattattgccttcttctatttgttgtataggaaaagatgaaatggaactcaaattttagtggtcgcacaagtgtggagccagttgatgaccaagtttttcaattagtattttagtttgaatttagagtacacatatgtatgagttatttgacaatgcttgtttatgagagattgaatgatacctatctatattatattaattataatgttattaaataaatgtgtgtatgtatatttctctttcaaatt

SEQ ID NO: 78050 - DNA, 1072 bp, Zea Mays
gtcttctccctctcccctagatccttcgacgccgccctccctcagctcattccctgccgccgctcatctgctggccttgtctcactgccgcccaaccattttcctccctcaagctagcacgcagccacctcccatggacgccagccctcagccatggatgccgaaccccctctctttagtgcctttctttacagcccctgcgtcgccgtgcgtgtaaggtgtttgtataaatgctcaagaggagtgccgtgtcatggccaactcttttggcgtcgtcggatgtttgatgttttgtgcatcccgtctacgacgccgtcgaccatcggtgaggattcgttcttgctttgtcatttcatcgatcgacgtctatttgctaatatgaattgtgtttatgtgcctatgtgtgttgaggagcgaaatccgtgaaatctaggtgaagaagagatggagcacgtcgtcgtcatggttgcagctttgcttttgtcgtcgtggagcctccaccagcgccgtgtagcaggactgctcttatgtgttattggtgctattccgcttgtacggccaacgaaataggtcctactacacaagggaaatagaggataccatactcttagcttcacagaagcctgaagtgtatgatgacattgctcgcgatacgtgctgcaaatttgggatagatagacctcaagttgtacctgtgcaaggactacctcaggtttgaaccatacttatggaatgcatgtaagaggtttgtgttggagcaccgggctggcgagaaccgtgctccaatcatttcagatgatagccccaacaaagatatcaacaatgccttctataatatcgtgatgatgaaaaagaaaagatgaaatggaactcaaattttagtggtcgcacaagtgtggagccagttgatgaccaagtttttcaattagtattttagtttgaatttagagtacacatatgtatgagttatttgacaatgcttgtttatgagagattgaatgatacctatctatattatattaattataatgttattaaataaatgtgtgtatgtatatttctctttcaaatt

SEQ ID NO: 78051 - DNA, 2353 bp, Zea Mays
gtcttctccctctcccctagatccttcgacgccgccctccctcagctcattccctgccgccgctcatctgctggccttgtctcactgccgcccaaccattttcctccctcaagctagcacgcagcctcaactcctctcccacctcacgcacgtctctcccagccgttccttcatttctctggctcgtccttctccatggggtcgcgccctgctgcgccgtcgtgctggtcgccggctgagcccccttcagtgcctgacgccgcatctccctgccacctcccatggacgccagccctcagccatggatgccgaaccccctctctttagtgcctttctttacagcccctgcgtcgccgtgcgtgtaaggtgtttgtataaatgctcaagaggagtgccgtgtcatggccaactcttttggcgtcgtcggatgtttgatgttttgtgcatcccgtctacgacgccgtcgaccatcggtgaggattcgttcttgctttgtcatttcatcgatcgacgtctatttgctaatatgaattgtgtttatgtgcctatgtgtgttgaggagcgaaatccgtgaaatctaggtgaagaagagatggagcacgtcgtcgtcatggttgcagctttgcttttgtcgtcgtggagcctccaccagcgccgtgtagcattcaggaacaatggaaccaaaatacaggacattttcctacttcacgtctggatgccatccaattaatatcttctctacgatattgcaatggaagggactgctcttatgtgttattggtgctattccgcttgtacggccaacgaaataggtcctactacacaagggaaatagaggataccatactcttagcttcacagaagcctgaagtgtatgatgacattgctcgcgatacgtgctgcaaatttgggatagatagacctcaagttgtacctgtgcaaggactacctcaggtttgaaccatacttatggaatgcatgtaagaggtttgtgttggagcaccgggctggcgagaaccgtgctccaatcatttcagatgatagccccaacaaagatatcaacaatgccttctataatatcgtgatgatgaaaaagtagatactactaccccaatatatcttatatttctcttctttatttccttttcagttttagtagaagaaaatgttgttggcttgtgatttagcatggttcttggattctacaaagtgattgtcttcaccaatcctttgataaattctatgagaatgcttaattgcaagatatgcaatgatgtaattcttgctccagtcctaatgaaccagttgttcacaataggctaaaccatcagaaagttaactactaactacaatcaaactattttttacgaagcagttattattttgttacaactttcaatacagaagacaaaacacatgaaatttgataaatgtaatcctcacatttgaaccatagtattgcagtgccacaagaatagtttcattttatctgcaaagtcattccttatagttgtcaatgaactatcatgcgaagatagaataagaactttgtgattgcttgtttatttatgagattgaataagagggttactacaaaatatttgtcatatcttttcaatttcctttcttgtgtaatcatggcctagatgtttagattactgattagcagtttttctatgtattattttgagtttgtagacaacagacattgagtgtcttttgatattaattttcaggtcaaaggtcagttttgtggaaaacatacaatatgttggtatcttcaatagtataagatcatgtaccacacgtcgacatcaatattgactaatttctttcaataggatgggagaatgttgaatgcttcttcagatactatttcttggtctgtcaaatctgcttgacccaaatgcaagttttgttcaaatgtggcaaaaaatgattgtctcaccaattgtcagcacgttttcttccagcacgtttgcttccagcaaagttgtcagttcttatgattagatgaaaaatctagaattattctatcatttacacatccatatgacctttgtgatatgtgatgatgtgaggtattcaaccgtgtctaactactaattattgccttcttctatttgttgtataggaaaagatgaaatggaactcaaattttagtggtcgcacaagtgtggagccagttgatgaccaagtttttcaattagtattttagtttgaatttagagtacacatatgtatgagttatttgacaatgcttgtttatgagagattgaatgatacctatctatattatattaattataatgttattaaataaatgtgtgtatgtatatttctctttcaaatt

SEQ ID NO: 78052 - DNA, 1712 bp, Zea Mays
gtcttctccctctcccctagatccttcgacgccgccctccctcagctcattccctgccgccgctcatctgctggccttgtctcactgccgcccaaccattttcctccctcaagctagcacgcagcctcaactcctctcccacctcacgcacgtctctcccagccgttccttcatttctctggctcgtccttctccatggggtcgcgccctgctgcgccgtcgtgctggtcgccggctgagcccccttcagtgcctgacgccgcatctccctgccacctcccatggacgccagccctcagccatggatgccgaaccccctctctttagtgcctttctttacagcccctgcgtcgccgtgcgtgtaaggtgtttgtataaatgctcaagaggagtgccgtgtcatggccaactcttttggcgtcgtcggatgtttgatgttttgtgcatcccgtctacgacgccgtcgaccatcggtgaggattcgttcttgctttgtcatttcatcgatcgacgtctatttgctaatatgaattgtgtttatgtgcctatgtgtgttgaggagcgaaatccgtgaaatctaggtgaagaagagatggagcacgtcgtcgtcatggttgcagctttgcttttgtcgtcgtggagcctccaccagcgccgtgtagcattcaggaacaatggaaccaaaatacaggacattttcctacttcacgtctggatgccatccaattaatatcttctctacgatattgcaatggaagggactgctcttatgtgttattggtgctattccgcttgtacggccaacgaaataggtcctactacacaagggaaatagaggataccatactcttagcttcacagaagcctgaagtgtatgatgacattgctcgcgatacgtgctgcaaatttgggatagatagacctcaagttgtacctgtgcaaggactacctcaggtttgaaccatacttatggaatgcatgtaagaggtttgtgttggagcaccgggctggcgagaaccgtgctccaatcatttcagatgatagccccaacaaagatatcaacaatgccttctataatatcgtgatgatgaaaaagtcaaaggtcagttttgtggaaaacatacaatatgttggtatcttcaatagtataagatcatgtaccacacgtcgacatcaatattgactaatttctttcaataggatgggagaatgttgaatgcttcttcagatactatttcttggtctgtcaaatctgcttgacccaaatgcaagttttgttcaaatgtggcaaaaaatgattgtctcaccaattgtcagcacgttttcttccagcacgtttgcttccagcaaagttgtcagttcttatgattagatgaaaaatctagaattattctatcatttacacatccatatgacctttgtgatatgtgatgatgtgaggtattcaaccgtgtctaactactaattattgccttcttctatttgttgtataggaaaagatgaaatggaactcaaattttagtggtcgcacaagtgtggagccagttgatgaccaagtttttcaattagtattttagtttgaatttagagtacacatatgtatgagttatttgacaatgcttgtttatgagagattgaatgatacctatctatattatattaattataatgttattaaataaatgtgtgtatgtatatttctctttcaaatt

SEQ ID NO: 78053 - DNA, 1618 bp, Zea Mays
gtcttctccctctcccctagatccttcgacgccgccctccctcagctcattccctgccgccgctcatctgctggccttgtctcactgccgcccaaccattttcctccctcaagctagcacgcagcctcaactcctctcccacctcacgcacgtctctcccagccgttccttcatttctctggctcgtccttctccatggggtcgcgccctgctgcgccgtcgtgctggtcgccggctgagcccccttcagtgcctgacgccgcatctccctgccacctcccatggacgccagccctcagccatggatgccgaaccccctctctttagtgcctttctttacagcccctgcgtcgccgtgcgtgtaaggtgtttgtataaatgctcaagaggagtgccgtgtcatggccaactcttttggcgtcgtcggatgtttgatgttttgtgcatcccgtctacgacgccgtcgaccatcggtgaggattcgttcttgctttgtcatttcatcgatcgacgtctatttgctaatatgaattgtgtttatgtgcctatgtgtgttgaggagcgaaatccgtgaaatctaggtgaagaagagatggagcacgtcgtcgtcatggttgcagctttgcttttgtcgtcgtggagcctccaccagcgccgtgtagcaggactgctcttatgtgttattggtgctattccgcttgtacggccaacgaaataggtcctactacacaagggaaatagaggataccatactcttagcttcacagaagcctgaagtgtatgatgacattgctcgcgatacgtgctgcaaatttgggatagatagacctcaagttgtacctgtgcaaggactacctcaggtttgaaccatacttatggaatgcatgtaagaggtttgtgttggagcaccgggctggcgagaaccgtgctccaatcatttcagatgatagccccaacaaagatatcaacaatgccttctataatatcgtgatgatgaaaaagtcaaaggtcagttttgtggaaaacatacaatatgttggtatcttcaatagtataagatcatgtaccacacgtcgacatcaatattgactaatttctttcaataggatgggagaatgttgaatgcttcttcagatactatttcttggtctgtcaaatctgcttgacccaaatgcaagttttgttcaaatgtggcaaaaaatgattgtctcaccaattgtcagcacgttttcttccagcacgtttgcttccagcaaagttgtcagttcttatgattagatgaaaaatctagaattattctatcatttacacatccatatgacctttgtgatatgtgatgatgtgaggtattcaaccgtgtctaactactaattattgccttcttctatttgttgtataggaaaagatgaaatggaactcaaattttagtggtcgcacaagtgtggagccagttgatgaccaagtttttcaattagtattttagtttgaatttagagtacacatatgtatgagttatttgacaatgcttgtttatgagagattgaatgatacctatctatattatattaattataatgttattaaataaatgtgtgtatgtatatttctctttcaaatt

SEQ ID NO: 78054 - DNA, 2107 bp, Zea Mays
gtcttctccctctcccctagatccttcgacgccgccctccctcagctcattccctgccgccgctcatctgctggccttgtctcactgccgcccaaccattttcctccctcaagctagcacgcagcctcaactcctctcccacctcacgcacgtctctcccagccgttccttcatttctctggctcgtccttctccatggggtcgcgccctgctgcgccgtcgtgctggtcgccggctgagcccccttcagtgcctgacgccgcatctccctgccacctcccatggacgccagccctcagccatggatgccgaaccccctctctttagtgcctttctttacagcccctgcgtcgccgtgcgtgtaaggtgtttgtataaatgctcaagaggagtgccgtgtcatggccaactcttttggcgtcgtcggatgtttgatgttttgtgcatcccgtctacgacgccgtcgaccatcggtgaggattcgttcttgctttgtcatttcatcgatcgacgtctatttgctaatatgaattgtgtttatgtgcctatgtgtgttgaggagcgaaatccgtgaaatctaggtgaagaagagatggagcacgtcgtcgtcatggttgcagctttgcttttgtcgtcgtggagcctccaccagcgccgtgtagcagaacaatggaaccaaaatacaggacattttcctacttcacgtctggatgccatccaattaatatcttctctacgatattgcaatggaaggtgtagatagatgcaagtatacattcaatgttcttatgatagaggaaaggcatagctgcagatgggtttgatgttttatcttttcattcatgcatttcatcccatgcgcataaacaatttccaagtagcttgtgtatccaaacttggttcttttgttcactcagccaggttgtactgtctcattcagaattcggatttttcagccattaacccgcattttctattggatcgttttagattcatttgttttatctattagaccgtactctatattgtttcatttgaggacatttcaaatggttgttgtaggtatgtgatagatgactagaagaaaattataaaaggatgttgaataagattgtgcttattttctcgtgacgaaggttttttctatgcttagggactgctcttatgtgttattggtgctattccgcttgtacggccaacgaaataggtcctactacacaagggaaatagaggataccatactcttagcttcacagaagcctgaagtgtatgatgacattgctcgcgatacgtgctgcaaatttgggatagatagacctcaagttgtacctgtgcaaggactacctcaggtttgaaccatacttatggaatgcatgtaagaggtttgtgttggagcaccgggctggcgagaaccgtgctccaatcatttcagatgatagccccaacaaagatatcaacaatgccttctataatatcgtgatgatgaaaaagtcaaaggtcagttttgtggaaaacatacaatatgttggtatcttcaatagtataagatcatgtaccacacgtcgacatcaatattgactaatttctttcaataggatgggagaatgttgaatgcttcttcagatactatttcttggtctgtcaaatctgcttgacccaaatgcaagttttgttcaaatgtggcaaaaaatgattgtctcaccaattgtcagcacgttttcttccagcacgtttgcttccagcaaagttgtcagttcttatgattagatgaaaaatctagaattattctatcatttacacatccatatgacctttgtgatatgtgatgatgtgaggtattcaaccgtgtctaactactaattattgccttcttctatttgttgtataggaaaagatgaaatggaactcaaattttagtggtcgcacaagtgtggagccagttgatgaccaagtttttcaattagtattttagtttgaatttagagtacacatatgtatgagttatttgacaatgcttgtttatgagagattgaatgatacctatctatattatattaattataatgttattaaataaatgtgtgtatgtatatttctctttcaaatt

SEQ ID NO: 78055 - DNA, 1622 bp, Zea Mays
gtcttctccctctcccctagatccttcgacgccgccctccctcagctcattccctgccgccgctcatctgctggccttgtctcactgccgcccaaccattttcctccctcaagctagcacgcagcctcaactcctctcccacctcacgcacgtctctcccagccgttccttcatttctctggctcgtccttctccatggggtcgcgccctgctgcgccgtcgtgctggtcgccggctgagcccccttcagtgcctgacgccgcatctccctggtgctcacctctgtttccccctgcgttggacgacctcgcactccctccctgctctagatttctccatggccgcccctttccttgccccgggtggcgagctcgcccctgcattcctgctcgcctaatctccacttccctattccagccacctcccatggacgccagccctcagccatggatgccgaaccccctctctttagtgcctttctttacagcccctgcgtcgccgtgcgtgtaaggtgtttgtataaatgctcaagaggagtgccgtgtcatggccaactcttttggcgtcgtcggatgtttgatgttttgtgcatcccgtctacgacgccgtcgaccatcggtgaggattcgttcttgctttgtcatttcatcgatcgacgtctatttgctaatatgaattgtgtttatgtgcctatgtgtgttgaggagcgaaatccgtgaaatctaggtgaagaagagatggagcacgtcgtcgtcatggttgcagctttgcttttgtcgtcgtggagcctccaccagcgccgtgtagcaggactgctcttatgtgttattggtgctattccgcttgtacggccaacgaaataggtcctactacacaagggaaatagaggataccatactcttagcttcacagaagcctgaagtgtatgatgacattgctcgcgatacgtgctgcaaatttgggatagatagacctcaagttgtacctgtgcaaggactacctcaggtcaaaggtcagttttgtggaaaacatacaatatgttggtatcttcaatagtataagatcatgtaccacacgtcgacatcaatattgactaatttctttcaataggatgggagaatgttgaatgcttcttcagatactatttcttggtctgtcaaatctgcttgacccaaatgcaagttttgttcaaatgtggcaaaaaatgattgtctcaccaattgtcagcacgttttcttccagcacgtttgcttccagcaaagttgtcagttcttatgattagatgaaaaatctagaattattctatcatttacacatccatatgacctttgtgatatgtgatgatgtgaggtattcaaccgtgtctaactactaattattgccttcttctatttgttgtataggaaaagatgaaatggaactcaaattttagtggtcgcacaagtgtggagccagttgatgaccaagtttttcaattagtattttagtttgaatttagagtacacatatgtatgagttatttgacaatgcttgtttatgagagattgaatgatacctatctatattatattaattataatgttattaaataaatgtgtgtatgtatatttctctttcaaatt

SEQ ID NO: 78056 - DNA, 2017 bp, Zea Mays
gtcttctccctctcccctagatccttcgacgccgccctccctcagctcattccctgccgccgctcatctgctggccttgtctcactgccgcccaaccattttcctccctcaagctagcacgcagcctcaactcctctcccacctcacgcacgtctctcccagccgttccttcatttctctggctcgtccttctccatggggtcgcgccctgctgcgccgtcgtgctggtcgccggctgagcccccttcagtgcctgacgccgcatctccctgccacctcccatggacgccagccctcagccatggatgccgaaccccctctctttagtgcctttctttacagcccctgcgtcgccgtgcgtgtaaggtgtttgtataaatgctcaagaggagtgccgtgtcatggccaactcttttggcgtcgtcggatgtttgatgttttgtgcatcccgtctacgacgccgtcgaccatcggtgaggattcgttcttgctttgtcatttcatcgatcgacgtctatttgctaatatgaattgtgtttatgtgcctatgtgtgttgaggagcgaaatccgtgaaatctaggtgaagaagagatggagcacgtcgtcgtcatggttgcagctttgcttttgtcgtcgtggagcctccaccagcgccgtgtagcattcaggaacaatggaaccaaaatacaggacattttcctacttcacgtctggatgccatccaattaatatcttctctacgatattgcaatggaagggactgctcttatgtgttattggtgctattccgcttgtacggccaacgaaataggtcctactacacaagggaaatagaggataccatactcttagcttcacagaagcctgaagtgtatgatgacattgctcgcgatacgtgctgcaaatttgggatagatagacctcaagttgtacctgtgcaaggactacctcaggtttgaaccatacttatggaatgcatgtaagaggtttgtgttggagcaccgggctggcgagaaccgtgctccaatcatttcagatgatagccccaacaaagatatcaacaatgccttctataatatcgtgatgatgaaaaagtagatactactaccccaatatatcttatatttctcttctttatttccttttcagttttagtagaagaaaatgttgttggcttgtgatttagcatggttcttggattctacaaagtgattgtcttcaccaatcctttgataaattctatgagaatgcttaattgcaagatatgcaatgatgtaattcttgctccagtcctaatgaaccagttgttcacaataggctaaaccatcagaaagttaactactaactacaatcaaactattttttacgaagcagttattattttgttacaactttcaatacagaagacaaaacacatgaaatttgataaatgtaatcctcacatttgaaccatagtattgcagtgccacaagaatagtttcattttatctgcaaagtcattccttatagttgtcaatgaactatcatgcgaagatagaataagaactttgtgattgcttgtttatttatgagattgaataagagggttactacaaaatatttgtcatatcttttcaatttcctttcttgtgtaatcatggcctagatgtttagattactgattagcagtttttctatgtattattttgagtttgtagacaacagacattgagtgtcttttgatattaattttcaggtcaaaggtcagttttgtggaaaacatacaatatgttggtatcttcaatagtataagatcatgaaaagatgaaatggaactcaaattttagtggtcgcacaagtgtggagccagttgatgaccaagtttttcaattagtattttagtttgaatttagagtacacatatgtatgagttatttgacaatgcttgtttatgagagattgaatgatacctatctatattatattaattataatgttattaaataaatgtgtgtatgtatatttctctttcaaatt

SEQ ID NO: 78057 - DNA, 2112 bp, Zea Mays
gtcttctccctctcccctagatccttcgacgccgccctccctcagctcattccctgccgccgctcatctgctggccttgtctcactgccgcccaaccattttcctccctcaagctagcacgcagcctcaactcctctcccacctcacgcacgtctctcccagccgttccttcatttctctggctcgtccttctccatggggtcgcgccctgctgcgccgtcgtgctggtcgccggctgagcccccttcagtgcctgacgccgcatctccctgccacctcccatggacgccagccctcagccatggatgccgaaccccctctctttagtgcctttctttacagcccctgcgtcgccgtgcgtgtaaggtgtttgtataaatgctcaagaggagtgccgtgtcatggccaactcttttggcgtcgtcggatgtttgatgttttgtgcatcccgtctacgacgccgtcgaccatcggtgaggattcgttcttgctttgtcatttcatcgatcgacgtctatttgctaatatgaattgtgtttatgtgcctatgtgtgttgaggagcgaaatccgtgaaatctaggtgaagaagagatggagcacgtcgtcgtcatggttgcagctttgcttttgtcgtcgtggagcctccaccagcgccgtgtagcattcaggaacaatggaaccaaaatacaggacattttcctacttcacgtctggatgccatccaattaatatcttctctacgatattgcaatggaaggtgtagatagatgcaagtatacattcaatgttcttatgatagaggaaaggcatagctgcagatgggtttgatgttttatcttttcattcatgcatttcatcccatgcgcataaacaatttccaagtagcttgtgtatccaaacttggttcttttgttcactcagccaggttgtactgtctcattcagaattcggatttttcagccattaacccgcattttctattggatcgttttagattcatttgttttatctattagaccgtactctatattgtttcatttgaggacatttcaaatggttgttgtaggtatgtgatagatgactagaagaaaattataaaaggatgttgaataagattgtgcttattttctcgtgacgaaggttttttctatgcttagggactgctcttatgtgttattggtgctattccgcttgtacggccaacgaaataggtcctactacacaagggaaatagaggataccatactcttagcttcacagaagcctgaagtgtatgatgacattgctcgcgatacgtgctgcaaatttgggatagatagacctcaagttgtacctgtgcaaggactacctcaggtttgaaccatacttatggaatgcatgtaagaggtttgtgttggagcaccgggctggcgagaaccgtgctccaatcatttcagatgatagccccaacaaagatatcaacaatgccttctataatatcgtgatgatgaaaaagtcaaaggtcagttttgtggaaaacatacaatatgttggtatcttcaatagtataagatcatgtaccacacgtcgacatcaatattgactaatttctttcaataggatgggagaatgttgaatgcttcttcagatactatttcttggtctgtcaaatctgcttgacccaaatgcaagttttgttcaaatgtggcaaaaaatgattgtctcaccaattgtcagcacgttttcttccagcacgtttgcttccagcaaagttgtcagttcttatgattagatgaaaaatctagaattattctatcatttacacatccatatgacctttgtgatatgtgatgatgtgaggtattcaaccgtgtctaactactaattattgccttcttctatttgttgtataggaaaagatgaaatggaactcaaattttagtggtcgcacaagtgtggagccagttgatgaccaagtttttcaattagtattttagtttgaatttagagtacacatatgtatgagttatttgacaatgcttgtttatgagagattgaatgatacctatctatattatattaattataatgttattaaataaatgtgtgtatgtatatttctctttcaaatt

SEQ ID NO: 78058 - DNA, 1125 bp, Zea Mays
cttatccccacacgtcttctccctctcccctagatccttcgacgccgccctccctcagctcattccctgccgccgctcatctgctggccttgtctcactgccgcccaaccattttcctccctcaagctagcacgcagcctcaactcctctcccacctcacgcacgtctctcccagccgttccttcatttctctggctcgtccttctccatggggtcgcgccctgctgcgccgtcgtgctggtcgccggctgagcccccttcagtgcctgacgccgcatctccctgccacctcccatggacgccagccctcagccatggatgccgaaccccctctctttagtgcctttctttacagcccctgcgtcgccgtgcgtgtaaggtgtttgtataaatgctcaagaggagtgccgtgtcatggccaactcttttggcgtcgtcggatgtttgatgttttgtgcatcccgtctacgacgccgtcgaccatcggtgaagaagagatggagcacgtcgtcgtcatggttgcagctttgcttttgtcgtcgtggagcctccaccagcgccgtgtagcaggactgctcttatgtgttattggtgctattccgcttgtacggccaacgaaataggtcctactacacaagggaaatagaggataccatactcttagcttcacagaagcctgaagtgtatgatgacattgctcgcgatacgtgctgcaaatttgggatagatagacctcaagttgtacctgtgcaaggactacctcaggtttgaaccatacttatggaatgcatgtaagaggtttgtgttggagcaccgggctggcgagaaccgtgctccaatcatttcagatgatagccccaacaaagatatcaacaatgccttctataatatcgtgatgatgaaaaagaaaagatgaaatggaactcaaattttagtggtcgcacaagtgtggagccagttgatgaccaagtttttcaattagtattttagtttgaatttagagtacacatatgtatgagttatttgacaatgcttgtttatgagagattgaatgatacctatctatattatattaattataatgttattaaataaatgtgtgtatgtatatttctctttcaaatt

SEQ ID NO: 78059 - DNA, 1480 bp, Zea Mays
tctcgaatatttgttgctcgatactttatttttgaactaaaatgtgacagataaaaaaatgagggaatagtaaaacaatatccgatgccagtaaatatacattataatgatctagcctggattcatgaaaccctggagtcgctaatgatttaaagatgcttcctgacaaatacattgggacatatattgtttctaaattgcatgcaatatacatcaacgagttgctactgaagcatgaagcatccatctgtaatctcctggcaaggtgtctgtgcagtttacaggctacagctagtagtagtaccatgacagcttgtttttggctgttcataactttgttccggacaccatgtacgcatgtatccaccaaagacagaccctccaaacctctattttccacccagcttcaacacaggtaggctacttcagtgtccagttccacaacacaagcaagaatttgtcatgtactcatgtgtgatgagtgatggctactactttggagcaaggatatatagtatgttgtatgcacattttttccagcaactgccccctccaacctttatgcatctgtcttcttgttaaatcatgtgtctggtgaggaacagtccagcttgttcaaatatttcagtgtaccagctgtttagcttctgccttcgccattaagtttaagaatgaagtccgctagaacataggtgtcattgcttgtgttcctcgtggatagccaactatcatcaaactgaacatttacatccctgagacaggaaaaagaataagttgagttgttcatatccatccagcatcattgctaaatatagatctctctgtatctccagtgaatatttttgcactattgcttggtgagtggtgaacaatatgcttgactatcaagaatgacttgagcatgcagagatagcatgcattaaccacggcacaagcgtagtgcatgaatggtcgactttttgcggattttttatcattgcaaattggagattccgtacctcttcaggctaagaacttcataatttcacctagtttaagtgcagtctttctgccaaatcccagaaccaagtgctggattcctggaacaccatctgcttcatcacccatgaagcaccctgtgcagcatagatagcaagttgctcaaatataacagagtcccaatggttacagaaaccatggatcgataccgaagaaatgtactcactaaggcttaagtctgcagttggatcacacttgtattgagcaacatactgccttaatgtatagaaacagtggcggagcacgacccaaaaataagggcagcaggctttgcaagcagccgaatttgcaagcaggcggagcagtggagcacggactgcacatccgaagcaggcggagcaaagcaaagcaagcagcaaagcaggcaagcagccgtggagcagtggaggtggagcacggtcgtgcggccgccagccggccaacgcgcaacgggccaaccggc

SEQ ID NO: 78060 - DNA, 2059 bp, Zea Mays
cacgagcgagcgtgcctgcggatgccgcgcgcatgcggcaacgtttctgccggaaagcaaagtgcagtcagccacctggatcgacctgagctgtcgattgtgccggcgccgcggcctacctataaaaccctaacgaccttcgacgacggcaggcaccatgtgtcatcggactagcaagggtcctctccctcgcgctgtgcagtgtcaacaagccatggtcgacaccgtcgccggcgccaccgactaccgcggtcagccagcctcgcgggccgccaccggcggctggaaaccgtcggttttcgtcatggcgatggagatcgcggagcggttcgcgtacaagggcgtggccgcgaacctcatcacgtacctgacggggccgctggggcagccgatggcgcgcgccgccgcgtccatcgacgcctggaagggcgtctcccagatgctgcctctgccgctcgcgtgcgtcgccgacgcctggctcggccggtaccgggccatcgtcctcgcctccctcatcttcgccgtgagcatgggcgcgctgtcgctgtcgtcggcgctcccggcgctgcgcggcggccacgtggccatcttctacgtggcgctgtacctggtggccctcggcgagggcgcgcacaagccgtgcgcgcaggcgttcgcggcggaccagttcgacgagaaggaccccagggagagcgtggcgcggagctccttcttcaactggtggtacttcggcatgtgcgccggcaccgccgtcaccaccatggtctccagctacgtgcaggacaacgtcggctggggcctcggcttcggcatcccctgcatcgtcatcgtcgcctcgctcgccctgttcctgctcgggaccaggtcgtaccgcttctacacgaccgcggcggccagccccttctctcgcgtcgggaaggcgttgctggcgttggtccagagctgggcgccgaagcatcgcaccaggcgacagcgacggcgacgccgtcgccgtcgaggaagtgaagagcgtgctccgcctgctgcccatatgggcgtcgtgcataatctacgcgatcatcttctcccagacatcgacgttcttcacgaagcaggccgcgacgctggaccgccggatcggcgcgaggttcaaggtgccggcggcggcgctgcagacgttcatcagcgtcagcatcgtcgtcttcatcccggtgtacgaccggctcttcgtgcccctggcgcggcgctacacggggaggccgacggggatcaccatgctgcagagggtcggcgccggcctggcgctcgccctcgtcgccgtggccctgtcggcgctcgtggagatgaagcggctccgggttgcggcggaagccggcctggtgaatacccccaaggcgcagctccccatggcgctctggtggatggtcccgcagtacgtcctcatcggcgtcgccgacgtgttcgccatgatcgggctgcaggagttcttctacgaccaggtccccaacgcggtgcggagccttgggctggccctgttcctgagcatcttcggaatcggccacctcctcagcagcttcctcatctccgtcattgacaagacgacagcaaagagcgggacgagctggttctctaacaacctcaaccgcgcccacctcgactacttctactggcttctcactgggctctgcgccgtggagctcgtcgcctttgtgatcttctcgcgagtgtatgtttacaagagaaaggttggcaatgatggcggcaatggtgatttcgtataatagtatatgcaatttgagccgtactgatcacttgaggggtgccggtagctgtagttgtttgtacagtacccgtcttggaaaaaaacgtacgaagtaaggtgtgaccgtgtgactacgggattctgtgttaacgcatattttttcatcttcgactggttctatcttagacctttgaatgcatggggatcagaggagattagaccttgtttaaataatctagtattcatctcaaattatatgtactatcaaacatagcctaaatctcgttatattcaactttaatgaataagagatttaat

SEQ ID NO: 78061 - DNA, 2146 bp, Zea Mays
acgggacctcgcagtctcgctctcgcacaacggaaagtgaggagggggagagcgagagcgagagagagagagagagagaggagagagagagagagagaggagggagggagctcgagaggtcaacgagggggagctggcacgaaagctcagggctccttgctcctcctataaacccagcgcacccgccttccaggctcccattttctcgcccgggagccgcaattccatcctgctgctcgatcatactgaagcagaactcgagcggtgttgaatcgaaatggaaggcaggatgacaagtttggaagccaccatgaaagtttcctcatcgatggcaagcagcatatcaaggaatgctgaccctgaccaacagactctacgccccaattcggtggagcagttttattttccaagacctggtcaatctttgccaggcattcctccattctttgggcctccctcctccagtttgtatcttcctaatgacaatgaagctaaatttggcaatcagtttgaatcaaatccttcacagaatacagattgggatccgcaggctatagtgagcaacctaaccttccttgagcagaagatcaagcaggtaaaagatattgtgcagtctatgagtaatcgagagaaccaattagctggcggttccagtgagctagccgcaaagcagcatcttgtaactgctgatctcactagcattataatccagctcatatctactgctggttccctgctcccttcaatgaagaatccacttcttagcagcaatccagcagttaggcagcttggcaacactcttggttctcctatgggccttggcatgaatgctaatcagagaccaagtgtagacagcaagactgatattcctgacacaggaaaaacttctgattatgatgaactgatgaatagccttaatcctgcccaagatgaaagagatgagatgatcaaatgtccaaatccctgtggtggggaagggtctgaaccgactcccatggaggaccatgatgtgaaggaaagtgatgatggtggtgagggagagaatctcccccctggttcatatgtagtcttgcaattggaaaaggaggagattttagcaccacatactcatttctgcttgatctgtggtaagggtttcaagagagatgctaaccttaggatgcacatgaggggccatggagatgagtacaaaactccagctgctcttgccaaacccacaaaggattcaggtgcagatcatgcacctgttacaaggtactcatgcccatttgtgggttgcaaacggaacaaagagcacaagaagttccaacctctcaaaacaatcttgtgcgtgaagaaccactacaagcgaagccactgtgacaagagttacacctgcagccgttgcaacaccaagaagttctctgtcatcgcggacttgaagactcatgagaagcactgtggtcgtgataaatggctctgttcttgtggaacaaccttctccaggaaggacaagctttttgggcacgttgcccttttccaaggccacacacctgcgcttcccatggaagatgtgaaggtatcagaagcatcagagcaacctcaggacagtgagccgatgaatgaaatggcgaggagtaatatgtatagcttcccctgtagttcgtctgatggtatatcgaacctcgacatgaaaatggctgatgatgtgcgtggttatttctcgccgctgaactttgatccttgctttggcgcgctcgacgatttcactcgccctgggtttgacatctctgagaaccccttctcattcctgccttcaggatcttgcagttatgggcagcagaacggagatagctgatggatgccgccatcgatgatgacgacaacagcactgccaacctttatttatgttgttgcatgatgctagcttggttcttcctctgttcaagagccatttgagattatgcctttatattttccctaaatgtacttacgtttgtggtcattaataatgatcaaggacttctagcatttcttagacccagatagccccaattttcagtatacatacgcaagtattgcttgttcattttgtctgaatcggcgtgatgcttgtagcactgacaatttatcataacaagctgctcagctattaatctggttctcc

SEQ ID NO: 78062 - DNA, 2135 bp, Zea Mays
ctcatattgtggcctcacggccccacaccaaaccggatagtagaatcaactggtgcacgtcacggcgccgcgggtggcagccgtggggggcgcaccgcacgggacctcgcagtctcgctctcgcacaacggaaagtgaggagggggagagcgagagcgagagagagagagagagagaggagagagagagagagagaggagggagggagctcgagaggtcaacgagggggagctggcacgaaagctcagggctccttgctcctcctataaacccagcgcacccgccttccaggctcccattttctcgcccgggagccgcaattccatcctgctgctcgaagatcatactgaagcagaactcgagcggtgttgaatcgaaatggaaggcaggatgacaagtttggaagccaccatgaaagtttcctcatcgatggcaagcagcatatcaaggaatgctgaccctgaccaacagactctacgccccaattcggtggagcagttttattttccaagacctggtcaatctttgccaggcattcctccattctttgggcctccctcctccagtttgtatcttcctaatgacaatgaagctaaatttggcaatcagtttgaatcaaatccttcacagaatacagattgggatccgcaggctatagtgagcaacctaaccttccttgagcagaagatcaagcaggtaaaagatattgtgcagtctatgagtaatcgagagaaccaattagctggcggttccagtgagctagccgcaaagcagcatcttgtaactgctgatctcactagcattataatccagctcatatctactgctggttccctgctcccttcaatgaagaatccacttcttagcagcaatccagcagttaggcagcttggcaacactcttggttctcctatgggccttggcatgaatgctaatcagagaccaagtgtagacagcaagactgatattcctgacacaggaaaaacttctgattatgatgaactgatgaatagccttaatcctgcccaagatgaaagagatgagatgatcaaatgtccaaatccctgtggtggggaagggtctgaaccgactcccatggaggaccatgatgtgaaggaaagtgatgatggtggtgagggagagaatctcccccctggttcatatgtagtcttgcaattggaaaaggaggagattttagcaccacatactcatttctgcttgatctgtggtaagggtttcaagagagatgctaaccttaggatgcacatgaggggccatggagatgagtacaaaactccagctgctcttgccaaacccacaaaggattcaggtgcagatcatgcacctgttacaaggtactcatgcccatttgtgggttgcaaacggaacaaagagcacaagaagttccaacctctcaaaacaatcttgtgcgtgaagaaccactacaagcgaagccactgtgacaagagttacacctgcagccgttgcaacaccaagaagttctctgtcatcgcggacttgaagactcatgagaagcactgtggtcgtgataaatggctctgttcttgtggaacaaccttctccaggaaggacaagctttttgggcacgttgcccttttccaaggccacacacctgcgcttcccatggaagatgtgaaggtatcagaagcatcagagcaacctcaggacagtgagccgatgaatgaaatggcgaggagtaatatgtatagcttcccctgtagttcgtctgatggtatatcgaacctcgacatgaaaatggctgatgatgatcttgcagttatgggcagcagaacggagatagctgatggatgccgccatcgatgatgacgacaacagcactgccaacctttatttatgttgttgcatgatgctagcttggttcttcctctgttcaagagccatttgagattatgcctttatattttccctaaatgtacttacgtttgtggtcattaataatgatcaaggacttctagcatttcttagacccagatagccccaattttcagtatacatacgcaagtattgcttgttcattttgtctgaatcggcgtgatgcttgtagcactgacaatttatcataacaagctgctcagctattaatctggttctcc

SEQ ID NO: 78063 - DNA, 3236 bp, Zea Mays
tgccagtttagcacaaaatataaacagcacttgcagacgtatggtcctgtggggtgactctttacgtcatgcttgtgggagcatacccatttgaagacccagatgaccccaagaatatacgcaagaccattcaggtgaatgctatacgccaatactttagatatcttacccaatttctgctattattttctttttcaacatcactttaccctcattccagtcactcttcgcctgcagcaaataatgcaagtgcagtacaagataccagattatgtccacatatctacggaatgccagcaacttattgcccgtatctttgttgccaatccagtgaggagaatcacaatgaaggaaataaagagccatccatggtttttgaagaacctaccacgggaactcacggagactgcacaaggcatgtactacaggagggataacaaggtgccttcttattcagaccaaacgtcggaagaaatcatgaagatagttcgtgatgcaaggaccatgccgaaatcatccagatcaggctatgggtggagcgctgagtattcggatgaagaagagaaggaagaggaacacagactagaggaagatgaatacgataggagggtgaaggaggtccatgcaagcggagaactccgatccagtgggatgtatgcagttttggcttctgaattgcttgtgctcggtcaattttcatgtaacataattcaatacactgaggcagactaccatgtccttgtgttgacgtccaccacggagcgccgcacggccgtagccctagccgccaggcaccagcggccagccagaggcccggacgactggactgccaaagccgtcgtcgccacagggaagcgccggtacgccgctcggcccttctacaggatttggtagcaccatggtccatgtatgtaaatcacatcactgagatggaggatggtttaaatgatgatggaatggaatatccatttgagggtgatgctaataccagtaacaatgatcagatagtagaggaccatgctgatgatgcccctattgctagtggtgataatgccatcgtccaacagcaagttggtctgagaaagaagaaatacatgtatgtgaattaccatcgtgttgagcaacctgatggttccagtgttaagcaaaagtgggcaaaatgtcttcgatgttcacataaagctaagtctgatgcttcaaatggtacaaaggcttttagtaaccacttaaaattgaaacattgtcttgtgaagggtcaacaacagctaattcagagtggaaatgacatagcaacatataaatatgatgagaaagctagtgtgagacttctatattatgccatcattatgcatgaatatccattcactgttgccgaacacaagtattttgtgaaatttatcaaatcactacggccatcatttcctttcaagtctcgtatcactgttcgtaaagagatcatgcaactttataaagaggaaaagaatatgttgtatgcacagttcaaaaagctgacatgtcgtgttagttttactatggatgcatggacatctatacaaaacaaatcgtacttatgtgtcacagcacattggattgatgataattggaacatgcaaaaaaggattatcaattttatgcatgtagaagacagccatggtgggataaaattgagtgatattttttttgtaaatgtgctcaattggaaccttgataagaaaatgtttgctctttctttggataatgctgcggcaaacaaggttgcagttgatatagtgatagataatgctaaagacttgctcatatgtggtggaaagttctttcatgttagatgtgcaaatcatatattgaaccttgttgctaaagatggcttagcagtaatgggaaatgctattgcaaacattagaatgttcataacagctatcaagaggtcacctttgcaatttgaggcatttcaaaaatgtgctaaagaatgtgatctagacactaagaaagtcctttccttagatgttgctacaagatggaattctacatatattatggttagagatgctatttactataaggatgcttttgatcgtcttgctaaaaaagataaggatagatttggtcatatggctccttcaagtgatgattggttgaatgcaataaatatcaacaagtgtttgaaaaagttctatgatgtcacattacttttttctggcacttcatatcccactgcaaatcatttctttcgcaagttttctgagattaagatggctattgcaagatggtgtgagagcagtgatgtcataatttgtacaatggcattctctatgaaagagaagttcaataaatattgggacatgaacaatatggctttagcagtgggggcatttcttgatcctaggtacaaacacaaaatggtggagttgtacatgtctaagatgtatgatagtgagagggctgagctagagaagttgtctttcattaatgtcatcaatgagttatttgctttgtattcatcaaacatcaatgcaaaaacaaccaatatggcttctacctccaaggagagtgaacttgttccacacaaaaatggttctttcatggatgatgaggatgaggatgaggttgatcttgatgagttgtatgcagcagcaaacaatgtgaagaaggtttcagaattggatgtgtatatgagtgagggtttggtgaaggtcaatgaaggtgatgctccatttgatatcctatcttggtggagggggcaagtgacaaatcttcctatcctttcgacccttgctcgtgatgtgttatctatgcaagtttctactgttgcttcggagtcagcatttagctctagtggacgtattgttgatgcctttcgttcaaaacttaaacctgaaattattgaggccttggtttgtaccaaggattggaagattgcttcagagaaagatttagaaactgaaattagaaccataagtgaagatatgaatgcaatggacttggacgaagatgctattgcggcgacttgatacattgaaattagactcttcgctatgttgtttgcgcttttgtaataaactatgtagcatgttgtgtatctcttttaatgttgcggtgaacttgtgtgaaatatctactatctattatatatttgtggacttgtgaacttgtggattatacataaaagaggggatatgctgctgatttatttttaaaactgtgttgtttcttctataatgaacttgtgtcaactatct

SEQ ID NO: 78064 - DNA, 3297 bp, Zea Mays
gtcacttgcaatcttcatctagacactgttcatgactttgtgcaaaaattctcatgtaggattagtgatttttcgaagctttgccagtttagcacaaaatataaacagcagtaagtcttatcaagtgcaaggaacagattattgctgaaaatgtatatcttgaccttcttgcagacgtatggtcctgtggggtgactctttacgtcatgcttgtgggagcatacccatttgaagacccagatgaccccaagaatatacgcaagaccattcagcaaataatgcaagtgcagtacaagataccagattatgtccacatatctacggaatgccagcaacttattgcccgtatctttgttgccaatccagtgaggagaatcacaatgaaggaaataaagagccatccatggtttttgaagaacctaccacgggaactcacggagactgcacaaggcatgtactacaggagggataacaaggtgccttcttattcagaccaaacgtcggaagaaatcatgaagatagttcgtgatgcaaggaccatgccgaaatcatccagatcaggctatgggtggagcgctgagtattcggatgaagaagagaaggaagaggaacacagactagaggaagatgaatacgataggagggtgaaggaggtccatgcaagcggagaactccgatccagtgggatgtatgcagttttggcttctgaattgcttgtgctcggtcaattttcatgtaacataattcaatacactgaggcagactaccatgtccttgtgttgacgtccaccacggagcgccgcacggccgtagccctagccgccaggcaccagcggccagccagaggcccggacgactggactgccaaagccgtcgtcgccacagggaagcgccggtacgccgctcggcccttctacaggtgttcatgtggcaaatggaatttaggatttggtagcaccatggtccatgtatgtaaatcacatcactgagatggaggatggtttaaatgatgatggaatggaatatccatttgagggtgatgctaataccagtaacaatgatcagatagtagaggaccatgctgatgatgcccctattgctagtggtgataatgccatcgtccaacagcaagttggtctgagaaagaagaaatacatgtatgtgaattaccatcgtgttgagcaacctgatggttccagtgttaagcaaaagtgggcaaaatgtcttcgatgttcacataaagctaagtctgatgcttcaaatggtacaaaggcttttagtaaccacttaaaattgaaacattgtcttgtgaagggtcaacaacagctaattcagagtggaaatgacatagcaacatataaatatgatgagaaagctagtgtgagacttctatattatgccatcattatgcatgaatatccattcactgttgccgaacacaagtattttgtgaaatttatcaaatcactacggccatcatttcctttcaagtctcgtatcactgttcgtaaagagatcatgcaactttataaagaggaaaagaatatgttgtatgcacagttcaaaaagctgacatgtcgtgttagttttactatggatgcatggacatctatacaaaacaaatcgtacttatgtgtcacagcacattggattgatgataattggaacatgcaaaaaaggattatcaattttatgcatgtagaagacagccatggtgggataaaattgagtgatattttttttgtaaatgtgctcaattggaaccttgataagaaaatgtttgctctttctttggataatgctgcggcaaacaaggttgcagttgatatagtgatagataatgctaaagacttgctcatatgtggtggaaagttctttcatgttagatgtgcaaatcatatattgaaccttgttgctaaagatggcttagcagtaatgggaaatgctattgcaaacattagaatgttcataacagctatcaagaggtcacctttgcaatttgaggcatttcaaaaatgtgctaaagaatgtgatctagacactaagaaagtcctttccttagatgttgctacaagatggaattctacatatattatggttagagatgctatttactataaggatgcttttgatcgtcttgctaaaaaagataaggatagatttggtcatatggctccttcaagtgatgattggttgaatgcaataaatatcaacaagtgtttgaaaaagttctatgatgtcacattacttttttctggcacttcatatcccactgcaaatcatttctttcgcaagttttctgagattaagatggctattgcaagatggtgtgagagcagtgatgtcataatttgtacaatggcattctctatgaaagagaagttcaataaatattgggacatgaacaatatggctttagcagtgggggcatttcttgatcctaggtacaaacacaaaatggtggagttgtacatgtctaagatgtatgatagtgagagggctgagctagagaagttgtctttcattaatgtcatcaatgagttatttgctttgtattcatcaaacatcaatgcaaaaacaaccaatatggcttctacctccaaggagagtgaacttgttccacacaaaaatggttctttcatggatgatgaggatgaggatgaggttgatcttgatgagttgtatgcagcagcaaacaatgtgaagaaggtttcagaattggatgtgtatatgagtgagggtttggtgaaggtcaatgaaggtgatgctccatttgatatcctatcttggtggagggggcaagtgacaaatcttcctatcctttcgacccttgctcgtgatgtgttatctatgcaagtttctactgttgcttcggagtcagcatttagctctagtggacgtattgttgatgcctttcgttcaaaacttaaacctgaaattattgaggccttggtttgtaccaaggattggaagattgcttcagagaaagatttagaaactgaaattagaaccataagtgaagatatgaatgcaatggacttggacgaagatgctattgcggcgacttgatacattgaaattagactcttcgctatgttgtttgcgcttttgtaataaactatgtagcatgttgtgtatctcttttaatgttgcggtgaacttgtgtgaaatatctactatctattatatatttgtggacttgtgaacttgtggattatacataaaagaggggatatgctgctgatttatttttaaaactgtgttgtttcttctataatgaacttgtgtcaactatct

SEQ ID NO: 78065 - DNA, 3296 bp, Zea Mays
cccattgattctttcatgaactacatgtttttttttgtttcaggatattctgttaggtcacttgcaatcttcatctagacactgttcatgactttgtgcaaaaattctcatgtaggattagtgatttttcgaagctttgccagtttagcacaaaatataaacagcacttgcagacgtatggtcctgtggggtgactctttacgtcatgcttgtgggagcatacccatttgaagacccagatgaccccaagaatatacgcaagaccattcagcaaataatgcaagtgcagtacaagataccagattatgtccacatatctacggaatgccagcaacttattgcccgtatctttgttgccaatccagtgaggagaatcacaatgaaggaaataaagagccatccatggtttttgaagaacctaccacgggaactcacggagactgcacaaggcatgtactacaggagggataacaaggtgccttcttattcagaccaaacgtcggaagaaatcatgaagatagttcgtgatgcaaggaccatgccgaaatcatccagatcaggctatgggtggagcgctgagtattcggatgaagaagagaaggaagaggaacacagactagaggaagatgaatacgataggagggtgaaggaggtccatgcaagcggagaactccgatccagtgggatgtatgcagttttggcttctgaattgcttgtgctcggtcaattttcatgtaacataattcaatacactgaggcagactaccatgtccttgtgttgacgtccaccacggagcgccgcacggccgtagccctagccgccaggcaccagcggccagccagaggcccggacgactggactgccaaagccgtcgtcgccacagggaagcgccggtacgccgctcggcccttctacaggtgttcatgtggcaaatggaatttaggatttggtagcaccatggtccatgtatgtaaatcacatcactgagatggaggatggtttaaatgatgatggaatggaatatccatttgagggtgatgctaataccagtaacaatgatcagatagtagaggaccatgctgatgatgcccctattgctagtggtgataatgccatcgtccaacagcaagttggtctgagaaagaagaaatacatgtatgtgaattaccatcgtgttgagcaacctgatggttccagtgttaagcaaaagtgggcaaaatgtcttcgatgttcacataaagctaagtctgatgcttcaaatggtacaaaggcttttagtaaccacttaaaattgaaacattgtcttgtgaagggtcaacaacagctaattcagagtggaaatgacatagcaacatataaatatgatgagaaagctagtgtgagacttctatattatgccatcattatgcatgaatatccattcactgttgccgaacacaagtattttgtgaaatttatcaaatcactacggccatcatttcctttcaagtctcgtatcactgttcgtaaagagatcatgcaactttataaagaggaaaagaatatgttgtatgcacagttcaaaaagctgacatgtcgtgttagttttactatggatgcatggacatctatacaaaacaaatcgtacttatgtgtcacagcacattggattgatgataattggaacatgcaaaaaaggattatcaattttatgcatgtagaagacagccatggtgggataaaattgagtgatattttttttgtaaatgtgctcaattggaaccttgataagaaaatgtttgctctttctttggataatgctgcggcaaacaaggttgcagttgatatagtgatagataatgctaaagacttgctcatatgtggtggaaagttctttcatgttagatgtgcaaatcatatattgaaccttgttgctaaagatggcttagcagtaatgggaaatgctattgcaaacattagaatgttcataacagctatcaagaggtcacctttgcaatttgaggcatttcaaaaatgtgctaaagaatgtgatctagacactaagaaagtcctttccttagatgttgctacaagatggaattctacatatattatggttagagatgctatttactataaggatgcttttgatcgtcttgctaaaaaagataaggatagatttggtcatatggctccttcaagtgatgattggttgaatgcaataaatatcaacaagtgtttgaaaaagttctatgatgtcacattacttttttctggcacttcatatcccactgcaaatcatttctttcgcaagttttctgagattaagatggctattgcaagatggtgtgagagcagtgatgtcataatttgtacaatggcattctctatgaaagagaagttcaataaatattgggacatgaacaatatggctttagcagtgggggcatttcttgatcctaggtacaaacacaaaatggtggagttgtacatgtctaagatgtatgatagtgagagggctgagctagagaagttgtctttcattaatgtcatcaatgagttatttgctttgtattcatcaaacatcaatgcaaaaacaaccaatatggcttctacctccaaggagagtgaacttgttccacacaaaaatggttctttcatggatgatgaggatgaggatgaggttgatcttgatgagttgtatgcagcagcaaacaatgtgaagaaggtttcagaattggatgtgtatatgagtgagggtttggtgaaggtcaatgaaggtgatgctccatttgatatcctatcttggtggagggggcaagtgacaaatcttcctatcctttcgacccttgctcgtgatgtgttatctatgcaagtttctactgttgcttcggagtcagcatttagctctagtggacgtattgttgatgcctttcgttcaaaacttaaacctgaaattattgaggccttggtttgtaccaaggattggaagattgcttcagagaaagatttagaaactgaaattagaaccataagtgaagatatgaatgcaatggacttggacgaagatgctattgcggcgacttgatacattgaaattagactcttcgctatgttgtttgcgcttttgtaataaactatgtagcatgttgtgtatctcttttaatgttgcggtgaacttgtgtgaaatatctactatctattatatatttgtggacttgtgaacttgtggattatacataaaagaggggatatgctgctgatttatttttaaaactgtgttgtttcttctataatgaacttgtgtcaactatct

SEQ ID NO: 78066 - DNA, 3508 bp, Zea Mays
atgctttctgtctcagattgttcacacaagtctcaaagctataaggtgatacttacaccaacacatcttatgattgtgatggagttcgcagcaggtggagagcttttcgatcagatctgtgatcgtgggcggtttagtgaggatgaggcccggtatttctttcagcagttgatctgtggcgtgagctactgccattacatgcaaatatgccatagagatctgaagctggagaatgttctcttggatggcagtccagctccacggcttaagatatgcgattttggctattccaagtcatcagtgttgcattcaagacccaaatcagctgtgggaacaccagcatatattgcacccgaggtgctatcccgtcacgaatacgatggaaagcttgcagacgtatggtcctgtggggtgactctttacgtcatgcttgtgggagcatacccatttgaagacccagatgaccccaagaatatacgcaagaccattcagtcactcttcgcctgcagcaaataatgcaagtgcagtacaagataccagattatgtccacatatctacggaatgccagcaacttattgcccgtatctttgttgccaatccagtgaggagaatcacaatgaaggaaataaagagccatccatggtttttgaagaacctaccacgggaactcacggagactgcacaaggcatgtactacaggagggataacaaggtgccttcttattcagaccaaacgtcggaagaaatcatgaagatagttcgtgatgcaaggaccatgccgaaatcatccagatcaggctatgggtggagcgctgagtattcggatgaagaagagaaggaagaggaacacagactagaggaagatgaatacgataggagggtgaaggaggtccatgcaagcggagaactccgatccagtgggatgtatgcagttttggcttctgaattgcttgtgctcggtcaattttcatgtaacataattcaatacactgaggcagactaccatgtccttgtgttgacgtccaccacggagcgccgcacggccgtagccctagccgccaggcaccagcggccagccagaggcccggacgactggactgccaaagccgtcgtcgccacagggaagcgccggtacgccgctcggcccttctacaggatttggtagcaccatggtccatgtatgtaaatcacatcactgagatggaggatggtttaaatgatgatggaatggaatatccatttgagggtgatgctaataccagtaacaatgatcagatagtagaggaccatgctgatgatgcccctattgctagtggtgataatgccatcgtccaacagcaagttggtctgagaaagaagaaatacatgtatgtgaattaccatcgtgttgagcaacctgatggttccagtgttaagcaaaagtgggcaaaatgtcttcgatgttcacataaagctaagtctgatgcttcaaatggtacaaaggcttttagtaaccacttaaaattgaaacattgtcttgtgaagggtcaacaacagctaattcagagtggaaatgacatagcaacatataaatatgatgagaaagctagtgtgagacttctatattatgccatcattatgcatgaatatccattcactgttgccgaacacaagtattttgtgaaatttatcaaatcactacggccatcatttcctttcaagtctcgtatcactgttcgtaaagagatcatgcaactttataaagaggaaaagaatatgttgtatgcacagttcaaaaagctgacatgtcgtgttagttttactatggatgcatggacatctatacaaaacaaatcgtacttatgtgtcacagcacattggattgatgataattggaacatgcaaaaaaggattatcaattttatgcatgtagaagacagccatggtgggataaaattgagtgatattttttttgtaaatgtgctcaattggaaccttgataagaaaatgtttgctctttctttggataatgctgcggcaaacaaggttgcagttgatatagtgatagataatgctaaagacttgctcatatgtggtggaaagttctttcatgttagatgtgcaaatcatatattgaaccttgttgctaaagatggcttagcagtaatgggaaatgctattgcaaacattagaatgttcataacagctatcaagaggtcacctttgcaatttgaggcatttcaaaaatgtgctaaagaatgtgatctagacactaagaaagtcctttccttagatgttgctacaagatggaattctacatatattatggttagagatgctatttactataaggatgcttttgatcgtcttgctaaaaaagataaggatagatttggtcatatggctccttcaagtgatgattggttgaatgcaataaatatcaacaagtgtttgaaaaagttctatgatgtcacattacttttttctggcacttcatatcccactgcaaatcatttctttcgcaagttttctgagattaagatggctattgcaagatggtgtgagagcagtgatgtcataatttgtacaatggcattctctatgaaagagaagttcaataaatattgggacatgaacaatatggctttagcagtgggggcatttcttgatcctaggtacaaacacaaaatggtggagttgtacatgtctaagatgtatgatagtgagagggctgagctagagaagttgtctttcattaatgtcatcaatgagttatttgctttgtattcatcaaacatcaatgcaaaaacaaccaatatggcttctacctccaaggagagtgaacttgttccacacaaaaatggttctttcatggatgatgaggatgaggatgaggttgatcttgatgagttgtatgcagcagcaaacaatgtgaagaaggtttcagaattggatgtgtatatgagtgagggtttggtgaaggtcaatgaaggtgatgctccatttgatatcctatcttggtggagggggcaagtgacaaatcttcctatcctttcgacccttgctcgtgatgtgttatctatgcaagtttctactgttgcttcggagtcagcatttagctctagtggacgtattgttgatgcctttcgttcaaaacttaaacctgaaattattgaggccttggtttgtaccaaggattggaagattgcttcagagaaagatttagaaactgaaattagaaccataagtgaagatatgaatgcaatggacttggacgaagatgctattgcggcgacttgatacattgaaattagactcttcgctatgttgtttgcgcttttgtaataaactatgtagcatgttgtgtatctcttttaatgttgcggtgaacttgtgtgaaatatctactatctattatatatttgtggacttgtgaacttgtggattatacataaaagaggggatatgctgctgatttatttttaaaactgtgttgtttcttctataatgaacttgtgtcaactatct

SEQ ID NO: 78067 - DNA, 3563 bp, Zea Mays
agcttataattcgggactgattcctcttaactgcatatagtgggggaatcttttgattgctgctgtttgattcggtgatacttacaccaacacatcttatgattgtgatggagttcgcagcaggtggagagcttttcgatcagatctgtgatcgtgggcggtttagtgaggatgaggcccggtatttctttcagcagttgatctgtggcgtgagctactgccattacatgcaaatatgccatagagatctgaagctggagaatgttctcttggatggcagtccagctccacggcttaagatatgcgattttggctattccaagtcatcagtgttgcattcaagacccaaatcagctgtgggaacaccagcatatattgcacccgaggtgctatcccgtcacgaatacgatggaaagcttgcagacgtatggtcctgtggggtgactctttacgtcatgcttgtgggagcatacccatttgaagacccagatgaccccaagaatatacgcaagaccattcagtcactcttcgcctgcagcaaataatgcaagtgcagtacaagataccagattatgtccacatatctacggaatgccagcaacttattgcccgtatctttgttgccaatccagtgaggagaatcacaatgaaggaaataaagagccatccatggtttttgaagaacctaccacgggaactcacggagactgcacaaggcatgtactacaggagggataacaaggtgccttcttattcagaccaaacgtcggaagaaatcatgaagatagttcgtgatgcaaggaccatgccgaaatcatccagatcaggctatgggtggagcgctgagtattcggatgaagaagagaaggaagaggaacacagactagaggaagatgaatacgataggagggtgaaggaggtccatgcaagcggagaactccgatccagtgggatgtatgcagttttggcttctgaattgcttgtgctcggtcaattttcatgtaacataattcaatacactgaggcagactaccatgtccttgtgttgacgtccaccacggagcgccgcacggccgtagccctagccgccaggcaccagcggccagccagaggcccggacgactggactgccaaagccgtcgtcgccacagggaagcgccggtacgccgctcggcccttctacaggtgttcatgtggcaaatggaatttaggatttggtagcaccatggtccatgtatgtaaatcacatcactgagatggaggatggtttaaatgatgatggaatggaatatccatttgagggtgatgctaataccagtaacaatgatcagatagtagaggaccatgctgatgatgcccctattgctagtggtgataatgccatcgtccaacagcaagttggtctgagaaagaagaaatacatgtatgtgaattaccatcgtgttgagcaacctgatggttccagtgttaagcaaaagtgggcaaaatgtcttcgatgttcacataaagctaagtctgatgcttcaaatggtacaaaggcttttagtaaccacttaaaattgaaacattgtcttgtgaagggtcaacaacagctaattcagagtggaaatgacatagcaacatataaatatgatgagaaagctagtgtgagacttctatattatgccatcattatgcatgaatatccattcactgttgccgaacacaagtattttgtgaaatttatcaaatcactacggccatcatttcctttcaagtctcgtatcactgttcgtaaagagatcatgcaactttataaagaggaaaagaatatgttgtatgcacagttcaaaaagctgacatgtcgtgttagttttactatggatgcatggacatctatacaaaacaaatcgtacttatgtgtcacagcacattggattgatgataattggaacatgcaaaaaaggattatcaattttatgcatgtagaagacagccatggtgggataaaattgagtgatattttttttgtaaatgtgctcaattggaaccttgataagaaaatgtttgctctttctttggataatgctgcggcaaacaaggttgcagttgatatagtgatagataatgctaaagacttgctcatatgtggtggaaagttctttcatgttagatgtgcaaatcatatattgaaccttgttgctaaagatggcttagcagtaatgggaaatgctattgcaaacattagaatgttcataacagctatcaagaggtcacctttgcaatttgaggcatttcaaaaatgtgctaaagaatgtgatctagacactaagaaagtcctttccttagatgttgctacaagatggaattctacatatattatggttagagatgctatttactataaggatgcttttgatcgtcttgctaaaaaagataaggatagatttggtcatatggctccttcaagtgatgattggttgaatgcaataaatatcaacaagtgtttgaaaaagttctatgatgtcacattacttttttctggcacttcatatcccactgcaaatcatttctttcgcaagttttctgagattaagatggctattgcaagatggtgtgagagcagtgatgtcataatttgtacaatggcattctctatgaaagagaagttcaataaatattgggacatgaacaatatggctttagcagtgggggcatttcttgatcctaggtacaaacacaaaatggtggagttgtacatgtctaagatgtatgatagtgagagggctgagctagagaagttgtctttcattaatgtcatcaatgagttatttgctttgtattcatcaaacatcaatgcaaaaacaaccaatatggcttctacctccaaggagagtgaacttgttccacacaaaaatggttctttcatggatgatgaggatgaggatgaggttgatcttgatgagttgtatgcagcagcaaacaatgtgaagaaggtttcagaattggatgtgtatatgagtgagggtttggtgaaggtcaatgaaggtgatgctccatttgatatcctatcttggtggagggggcaagtgacaaatcttcctatcctttcgacccttgctcgtgatgtgttatctatgcaagtttctactgttgcttcggagtcagcatttagctctagtggacgtattgttgatgcctttcgttcaaaacttaaacctgaaattattgaggccttggtttgtaccaaggattggaagattgcttcagagaaagatttagaaactgaaattagaaccataagtgaagatatgaatgcaatggacttggacgaagatgctattgcggcgacttgatacattgaaattagactcttcgctatgttgtttgcgcttttgtaataaactatgtagcatgttgtgtatctcttttaatgttgcggtgaacttgtgtgaaatatctactatctattatatatttgtggacttgtgaacttgtggattatacataaaagaggggatatgctgctgatttatttttaaaactgtgttgtttcttctataatgaacttgtgtcaactatct

SEQ ID NO: 78068 - DNA, 4025 bp, Zea Mays
cggttcaggcgaaacgggggctcacacgtcggatccgacggcgaatcgcagccagccaggcacggatgccccccgcttccgggtgcggtcacggacaccgacggcgggcccacccgacatcccctccggcctcctccccgtccctgtcctccggtcctccccttccctccttcacctcgcagtctcgcacacgctggcgcgggcaggcccccaccctgcgctcctaccacccaccagtccaccactataaaatccccgatcgcctcacgcacacgcaccgacccaccgtccgccgaggcgcaaccgccgcaacgcaaacccacaaaccctccgccgccgccgccgccgccgtaccacgtaccgtcccgcttctcctccgcccttgtgcgagcaggcaacggcagcagagcccgcacaggttgctcccggacggagggagaacgcgcggggctgggctagccgggggcggccggaggagattgacgagaatgtgtacagggagatcatcaaccaccgctccctgcgccatcctaacattattcgcttcaaggaggtgatacttacaccaacacatcttatgattgtgatggagttcgcagcaggtggagagcttttcgatcagatctgtgatcgtgggcggtttagtgaggatgaggcccggtatttctttcagcagttgatctgtggcgtgagctactgccattacatgcaaatatgccatagagatctgaagctggagaatgttctcttggatggcagtccagctccacggcttaagatatgcgattttggctattccaagtcatcagtgttgcattcaagacccaaatcagctgtgggaacaccagcatatattgcacccgaggtgctatcccgtcacgaatacgatggaaagcttgcagacgtatggtcctgtggggtgactctttacgtcatgcttgtgggagcatacccatttgaagacccagatgaccccaagaatatacgcaagaccattcagcaaataatgcaagtgcagtacaagataccagattatgtccacatatctacggaatgccagcaacttattgcccgtatctttgttgccaatccagtgaggagaatcacaatgaaggaaataaagagccatccatggtttttgaagaacctaccacgggaactcacggagactgcacaaggcatgtactacaggagggataacaaggtgccttcttattcagaccaaacgtcggaagaaatcatgaagatagttcgtgatgcaaggaccatgccgaaatcatccagatcaggctatgggtggagcgctgagtattcggatgaagaagagaaggaagaggaacacagactagaggaagatgaatacgataggagggtgaaggaggtccatgcaagcggagaactccgatccagtgggatgtatgcagttttggcttctgaattgcttgtgctcggtcaattttcatgtaacataattcaatacactgaggcagactaccatgtccttgtgttgacgtccaccacggagcgccgcacggccgtagccctagccgccaggcaccagcggccagccagaggcccggacgactggactgccaaagccgtcgtcgccacagggaagcgccggtacgccgctcggcccttctacaggtgttcatgtggcaaatggaatttaggatttggtagcaccatggtccatgtatgtaaatcacatcactgagatggaggatggtttaaatgatgatggaatggaatatccatttgagggtgatgctaataccagtaacaatgatcagatagtagaggaccatgctgatgatgcccctattgctagtggtgataatgccatcgtccaacagcaagttggtctgagaaagaagaaatacatgtatgtgaattaccatcgtgttgagcaacctgatggttccagtgttaagcaaaagtgggcaaaatgtcttcgatgttcacataaagctaagtctgatgcttcaaatggtacaaaggcttttagtaaccacttaaaattgaaacattgtcttgtgaagggtcaacaacagctaattcagagtggaaatgacatagcaacatataaatatgatgagaaagctagtgtgagacttctatattatgccatcattatgcatgaatatccattcactgttgccgaacacaagtattttgtgaaatttatcaaatcactacggccatcatttcctttcaagtctcgtatcactgttcgtaaagagatcatgcaactttataaagaggaaaagaatatgttgtatgcacagttcaaaaagctgacatgtcgtgttagttttactatggatgcatggacatctatacaaaacaaatcgtacttatgtgtcacagcacattggattgatgataattggaacatgcaaaaaaggattatcaattttatgcatgtagaagacagccatggtgggataaaattgagtgatattttttttgtaaatgtgctcaattggaaccttgataagaaaatgtttgctctttctttggataatgctgcggcaaacaaggttgcagttgatatagtgatagataatgctaaagacttgctcatatgtggtggaaagttctttcatgttagatgtgcaaatcatatattgaaccttgttgctaaagatggcttagcagtaatgggaaatgctattgcaaacattagaatgttcataacagctatcaagaggtcacctttgcaatttgaggcatttcaaaaatgtgctaaagaatgtgatctagacactaagaaagtcctttccttagatgttgctacaagatggaattctacatatattatggttagagatgctatttactataaggatgcttttgatcgtcttgctaaaaaagataaggatagatttggtcatatggctccttcaagtgatgattggttgaatgcaataaatatcaacaagtgtttgaaaaagttctatgatgtcacattacttttttctggcacttcatatcccactgcaaatcatttctttcgcaagttttctgagattaagatggctattgcaagatggtgtgagagcagtgatgtcataatttgtacaatggcattctctatgaaagagaagttcaataaatattgggacatgaacaatatggctttagcagtgggggcatttcttgatcctaggtacaaacacaaaatggtggagttgtacatgtctaagatgtatgatagtgagagggctgagctagagaagttgtctttcattaatgtcatcaatgagttatttgctttgtattcatcaaacatcaatgcaaaaacaaccaatatggcttctacctccaaggagagtgaacttgttccacacaaaaatggttctttcatggatgatgaggatgaggatgaggttgatcttgatgagttgtatgcagcagcaaacaatgtgaagaaggtttcagaattggatgtgtatatgagtgagggtttggtgaaggtcaatgaaggtgatgctccatttgatatcctatcttggtggagggggcaagtgacaaatcttcctatcctttcgacccttgctcgtgatgtgttatctatgcaagtttctactgttgcttcggagtcagcatttagctctagtggacgtattgttgatgcctttcgttcaaaacttaaacctgaaattattgaggccttggtttgtaccaaggattggaagattgcttcagagaaagatttagaaactgaaattagaaccataagtgaagatatgaatgcaatggacttggacgaagatgctattgcggcgacttgatacattgaaattagactcttcgctatgttgtttgcgcttttgtaataaactatgtagcatgttgtgtatctcttttaatgttgcggtgaacttgtgtgaaatatctactatctattatatatttgtggacttgtgaacttgtggattatacataaaagaggggatatgctgctgatttatttttaaaactgtgttgtttcttctataatgaacttgtgtcaactatct

SEQ ID NO: 78069 - DNA, 4125 bp, Zea Mays
cggttcaggcgaaacgggggctcacacgtcggatccgacggcgaatcgcagccagccaggcacggatgccccccgcttccgggtgcggtcacggacaccgacggcgggcccacccgacatcccctccggcctcctccccgtccctgtcctccggtcctccccttccctccttcacctcgcagtctcgcacacgctggcgcgggcaggcccccaccctgcgctcctaccacccaccagtccaccactataaaatccccgatcgcctcacgcacacgcaccgacccaccgtccgccgaggcgcaaccgccgcaacgcaaacccacaaaccctccgccgccgccgccgccgccgtaccacgtaccgtcccgcttctcctccgcccttgtgcgagcaggcaacggcagcagagcccgcacaggttgctcccggacggagggagaacgcgcggggctgggctagccgggggcggccggaggaggtacgtatggacaagtacgaggcggtgcgggacatcgggtcggggaacttcggggtggcgcgcctgatgcgcaacagcgagacccgggagctcgtcgcagtcaagtgcatcgagcgcggctaccggattgacgagaatgtgtacagggagatcatcaaccaccgctccctgcgccatcctaacattattcgcttcaaggaggtgatacttacaccaacacatcttatgattgtgatggagttcgcagcaggtggagagcttttcgatcagatctgtgatcgtgggcggtttagtgaggatgaggcccggtatttctttcagcagttgatctgtggcgtgagctactgccattacatgcaaatatgccatagagatctgaagctggagaatgttctcttggatggcagtccagctccacggcttaagatatgcgattttggctattccaagtcatcagtgttgcattcaagacccaaatcagctgtgggaacaccagcatatattgcacccgaggtgctatcccgtcacgaatacgatggaaagcttgcagacgtatggtcctgtggggtgactctttacgtcatgcttgtgggagcatacccatttgaagacccagatgaccccaagaatatacgcaagaccattcagcaaataatgcaagtgcagtacaagataccagattatgtccacatatctacggaatgccagcaacttattgcccgtatctttgttgccaatccagtgaggagaatcacaatgaaggaaataaagagccatccatggtttttgaagaacctaccacgggaactcacggagactgcacaaggcatgtactacaggagggataacaaggtgccttcttattcagaccaaacgtcggaagaaatcatgaagatagttcgtgatgcaaggaccatgccgaaatcatccagatcaggctatgggtggagcgctgagtattcggatgaagaagagaaggaagaggaacacagactagaggaagatgaatacgataggagggtgaaggaggtccatgcaagcggagaactccgatccagtgggatgtatgcagttttggcttctgaattgcttgtgctcggtcaattttcatgtaacataattcaatacactgaggcagactaccatgtccttgtgttgacgtccaccacggagcgccgcacggccgtagccctagccgccaggcaccagcggccagccagaggcccggacgactggactgccaaagccgtcgtcgccacagggaagcgccggtacgccgctcggcccttctacaggatttggtagcaccatggtccatgtatgtaaatcacatcactgagatggaggatggtttaaatgatgatggaatggaatatccatttgagggtgatgctaataccagtaacaatgatcagatagtagaggaccatgctgatgatgcccctattgctagtggtgataatgccatcgtccaacagcaagttggtctgagaaagaagaaatacatgtatgtgaattaccatcgtgttgagcaacctgatggttccagtgttaagcaaaagtgggcaaaatgtcttcgatgttcacataaagctaagtctgatgcttcaaatggtacaaaggcttttagtaaccacttaaaattgaaacattgtcttgtgaagggtcaacaacagctaattcagagtggaaatgacatagcaacatataaatatgatgagaaagctagtgtgagacttctatattatgccatcattatgcatgaatatccattcactgttgccgaacacaagtattttgtgaaatttatcaaatcactacggccatcatttcctttcaagtctcgtatcactgttcgtaaagagatcatgcaactttataaagaggaaaagaatatgttgtatgcacagttcaaaaagctgacatgtcgtgttagttttactatggatgcatggacatctatacaaaacaaatcgtacttatgtgtcacagcacattggattgatgataattggaacatgcaaaaaaggattatcaattttatgcatgtagaagacagccatggtgggataaaattgagtgatattttttttgtaaatgtgctcaattggaaccttgataagaaaatgtttgctctttctttggataatgctgcggcaaacaaggttgcagttgatatagtgatagataatgctaaagacttgctcatatgtggtggaaagttctttcatgttagatgtgcaaatcatatattgaaccttgttgctaaagatggcttagcagtaatgggaaatgctattgcaaacattagaatgttcataacagctatcaagaggtcacctttgcaatttgaggcatttcaaaaatgtgctaaagaatgtgatctagacactaagaaagtcctttccttagatgttgctacaagatggaattctacatatattatggttagagatgctatttactataaggatgcttttgatcgtcttgctaaaaaagataaggatagatttggtcatatggctccttcaagtgatgattggttgaatgcaataaatatcaacaagtgtttgaaaaagttctatgatgtcacattacttttttctggcacttcatatcccactgcaaatcatttctttcgcaagttttctgagattaagatggctattgcaagatggtgtgagagcagtgatgtcataatttgtacaatggcattctctatgaaagagaagttcaataaatattgggacatgaacaatatggctttagcagtgggggcatttcttgatcctaggtacaaacacaaaatggtggagttgtacatgtctaagatgtatgatagtgagagggctgagctagagaagttgtctttcattaatgtcatcaatgagttatttgctttgtattcatcaaacatcaatgcaaaaacaaccaatatggcttctacctccaaggagagtgaacttgttccacacaaaaatggttctttcatggatgatgaggatgaggatgaggttgatcttgatgagttgtatgcagcagcaaacaatgtgaagaaggtttcagaattggatgtgtatatgagtgagggtttggtgaaggtcaatgaaggtgatgctccatttgatatcctatcttggtggagggggcaagtgacaaatcttcctatcctttcgacccttgctcgtgatgtgttatctatgcaagtttctactgttgcttcggagtcagcatttagctctagtggacgtattgttgatgcctttcgttcaaaacttaaacctgaaattattgaggccttggtttgtaccaaggattggaagattgcttcagagaaagatttagaaactgaaattagaaccataagtgaagatatgaatgcaatggacttggacgaagatgctattgcggcgacttgatacattgaaattagactcttcgctatgttgtttgcgcttttgtaataaactatgtagcatgttgtgtatctcttttaatgttgcggtgaacttgtgtgaaatatctactatctattatatatttgtggacttgtgaacttgtggattatacataaaagaggggatatgctgctgatttatttttaaaactgtgttgtttcttctataatgaacttgtgtcaactatct

SEQ ID NO: 78070 - DNA, 2081 bp, Zea Mays
cggttcaggcgaaacgggggctcacacgtcggatccgacggcgaatcgcagccagccaggcacggatgccccccgcttccgggtgcggtcacggacaccgacggcgggcccacccgacatcccctccggcctcctccccgtccctgtcctccggtcctccccttccctccttcacctcgcagtctcgcacacgctggcgcgggcaggcccccaccctgcgctcctaccacccaccagtccaccactataaaatccccgatcgcctcacgcacacgcaccgacccaccgtccgccgaggcgcaaccgccgcaacgcaaacccacaaaccctccgccgccgccgccgccgccgtaccacgtaccgtcccgcttctcctccgcccttgtgcgagcaggcaacggcagcagagcccgcacaggttgctcccggacggagggagaacgcgcggggctgggctagccgggggcggccggaggaggtacgtatggacaagtacgaggcggtgcgggacatcgggtcggggaacttcggggtggcgcgcctgatgcgcaacagcgagacccgggagctcgtcgcagtcaagtgcatcgagcgcggctaccggattgacgagaatgtgtacagggagatcatcaaccaccgctccctgcgccatcctaacattattcgcttcaaggaggtgatacttacaccaacacatcttatgattgtgatggagttcgcagcaggtggagagcttttcgatcagatctgtgatcgtgggcggtttagtgaggatgaggcccggtatttctttcagcagttgatctgtggcgtgagctactgccattacatgcaaatatgccatagagatctgaagctggagaatgttctcttggatggcagtccagctccacggcttaagatatgcgattttggctattccaagtcatcagtgttgcattcaagacccaaatcagctgtgggaacaccagcatatattgcacccgaggtgctatcccgtcacgaatacgatggaaagcttgcagacgtatggtcctgtggggtgactctttacgtcatgcttgtgggagcatacccatttgaagacccagatgaccccaagaatatacgcaagaccattcagcaaataatgcaagtgcagtacaagataccagattatgtccacatatctacggaatgccagcaacttattgcccgtatctttgttgccaatccagtgaggagaatcacaatgaaggaaataaagagccatccatggtttttgaagaacctaccacgggaactcacggagactgcacaaggcatgtactacaggagggataacaaggtgccttcttattcagaccaaacgtcggaagaaatcatgaagatagttcgtgatgcaaggaccatgccgaaatcatccagatcaggctatgggtggagcgctgagtattcggatgaagaagagaaggaagaggaacacagactagaggaagatgaatacgataggagggtgaaggaggtccatgcaagcggagaactccgatccagtgggatgtatgcagttttggcttctgaattgcttgtgctcggtcaattttcatgtaacataattcaatacactgaggcagactaccatgtccttgtgttgacgtccaccacggagcgccgcacggccgtagccctagccgccaggcaccagcggccagccagaggcccggacgactggactgccaaagccgtcgtcgccacagggaagcgccggtacgccgctcggcccttctacagatttagaaactgaaattagaaccataagtgaagatatgaatgcaatggacttggacgaagatgctattgcggcgacttgatacattgaaattagactcttcgctatgttgtttgcgcttttgtaataaactatgtagcatgttgtgtatctcttttaatgttgcggtgaacttgtgtgaaatatctactatctattatatatttgtggacttgtgaacttgtggattatacataaaagaggggatatgctgctgatttatttttaaaactgtgttgtttcttctataatgaacttgtgtcaactatct

SEQ ID NO: 78071 - DNA, 4219 bp, Zea Mays
cggttcaggcgaaacgggggctcacacgtcggatccgacggcgaatcgcagccagccaggcacggatgccccccgcttccgggtgcggtcacggacaccgacggcgggcccacccgacatcccctccggcctcctccccgtccctgtcctccggtcctccccttccctccttcacctcgcagtctcgcacacgctggcgcgggcaggcccccaccctgcgctcctaccacccaccagtccaccactataaaatccccgatcgcctcacgcacacgcaccgacccaccgtccgccgaggcgcaaccgccgcaacgcaaacccacaaaccctccgccgccgccgccgccgccgtaccacgtaccgtcccgcttctcctccgcccttgtgcgagcaggcaacggcagcagagcccgcacaggttgctcccggacggagggagaacgcgcggggctgggctagccgggggcggccggaggaggtacgtatggacaagtacgaggcggtgcgggacatcgggtcggggaacttcggggtggcgcgcctgatgcgcaacagcgagacccgggagctcgtcgcagtcaagtgcatcgagcgcggctaccggattgacgagaatgtgtacagggagatcatcaaccaccgctccctgcgccatcctaacattattcgcttcaaggaggtgatacttacaccaacacatcttatgattgtgatggagttcgcagcaggtggagagcttttcgatcagatctgtgatcgtgggcggtttagtgaggatgaggcccggtatttctttcagcagttgatctgtggcgtgagctactgccattacatgcaaatatgccatagagatctgaagctggagaatgttctcttggatggcagtccagctccacggcttaagatatgcgattttggctattccaagtcatcagtgttgcattcaagacccaaatcagctgtgggaacaccagcatatattgcacccgaggtgctatcccgtcacgaatacgatggaaagacgtatggtcctgtggggtgactctttacgtcatgcttgtgggagcatacccatttgaagacccagatgaccccaagaatatacgcaagaccattcagcaaataatgcaagtgcagtacaagataccagattatgtccacatatctacggaatgccagcaacttattgcccgtatctttgttgccaatccagtgaggagaatcacaatgaaggaaataaagagccatccatggtttttgaagaacctaccacgggaactcacggagactgcacaaggcatgtactacaggagggataacaaggtgccttcttattcagaccaaacgtcggaagaaatcatgaagatagttcgtgatgcaaggaccatgccgaaatcatccagatcaggctatgggtggagcgctgagtattcggatgaagaagagaaggaagaggaacacagactagaggaagatgaatacgataggagggtgaaggaggtccatgcaagcggagaactccgtatggacactcttcacatatgaaagctagtggaagaaagttacatgtagataacttgttgttgttgatctgaaggatccagtgggatgtatgcagttttggcttctgaattgcttgtgctcggtcaattttcatgtaacataattcaatacactgaggcagactaccatgtccttgtgttgacgtccaccacggagcgccgcacggccgtagccctagccgccaggcaccagcggccagccagaggcccggacgactggactgccaaagccgtcgtcgccacagggaagcgccggtacgccgctcggcccttctacaggtgttcatgtggcaaatggaatttaggatttggtagcaccatggtccatgtatgtaaatcacatcactgagatggaggatggtttaaatgatgatggaatggaatatccatttgagggtgatgctaataccagtaacaatgatcagatagtagaggaccatgctgatgatgcccctattgctagtggtgataatgccatcgtccaacagcaagttggtctgagaaagaagaaatacatgtatgtgaattaccatcgtgttgagcaacctgatggttccagtgttaagcaaaagtgggcaaaatgtcttcgatgttcacataaagctaagtctgatgcttcaaatggtacaaaggcttttagtaaccacttaaaattgaaacattgtcttgtgaagggtcaacaacagctaattcagagtggaaatgacatagcaacatataaatatgatgagaaagctagtgtgagacttctatattatgccatcattatgcatgaatatccattcactgttgccgaacacaagtattttgtgaaatttatcaaatcactacggccatcatttcctttcaagtctcgtatcactgttcgtaaagagatcatgcaactttataaagaggaaaagaatatgttgtatgcacagttcaaaaagctgacatgtcgtgttagttttactatggatgcatggacatctatacaaaacaaatcgtacttatgtgtcacagcacattggattgatgataattggaacatgcaaaaaaggattatcaattttatgcatgtagaagacagccatggtgggataaaattgagtgatattttttttgtaaatgtgctcaattggaaccttgataagaaaatgtttgctctttctttggataatgctgcggcaaacaaggttgcagttgatatagtgatagataatgctaaagacttgctcatatgtggtggaaagttctttcatgttagatgtgcaaatcatatattgaaccttgttgctaaagatggcttagcagtaatgggaaatgctattgcaaacattagaatgttcataacagctatcaagaggtcacctttgcaatttgaggcatttcaaaaatgtgctaaagaatgtgatctagacactaagaaagtcctttccttagatgttgctacaagatggaattctacatatattatggttagagatgctatttactataaggatgcttttgatcgtcttgctaaaaaagataaggatagatttggtcatatggctccttcaagtgatgattggttgaatgcaataaatatcaacaagtgtttgaaaaagttctatgatgtcacattacttttttctggcacttcatatcccactgcaaatcatttctttcgcaagttttctgagattaagatggctattgcaagatggtgtgagagcagtgatgtcataatttgtacaatggcattctctatgaaagagaagttcaataaatattgggacatgaacaatatggctttagcagtgggggcatttcttgatcctaggtacaaacacaaaatggtggagttgtacatgtctaagatgtatgatagtgagagggctgagctagagaagttgtctttcattaatgtcatcaatgagttatttgctttgtattcatcaaacatcaatgcaaaaacaaccaatatggcttctacctccaaggagagtgaacttgttccacacaaaaatggttctttcatggatgatgaggatgaggatgaggttgatcttgatgagttgtatgcagcagcaaacaatgtgaagaaggtttcagaattggatgtgtatatgagtgagggtttggtgaaggtcaatgaaggtgatgctccatttgatatcctatcttggtggagggggcaagtgacaaatcttcctatcctttcgacccttgctcgtgatgtgttatctatgcaagtttctactgttgcttcggagtcagcatttagctctagtggacgtattgttgatgcctttcgttcaaaacttaaacctgaaattattgaggccttggtttgtaccaaggattggaagattgcttcagagaaagatttagaaactgaaattagaaccataagtgaagatatgaatgcaatggacttggacgaagatgctattgcggcgacttgatacattgaaattagactcttcgctatgttgtttgcgcttttgtaataaactatgtagcatgttgtgtatctcttttaatgttgcggtgaacttgtgtgaaatatctactatctattatatatttgtggacttgtgaacttgtggattatacataaaagaggggatatgctgctgatttatttttaaaactgtgttgtttcttctataatgaacttgtgtcaactatct

SEQ ID NO: 78072 - DNA, 3031 bp, Zea Mays
cggttcaggcgaaacgggggctcacacgtcggatccgacggcgaatcgcagccagccaggcacggatgccccccgcttccgggtgcggtcacggacaccgacggcgggcccacccgacatcccctccggcctcctccccgtccctgtcctccggtcctccccttccctccttcacctcgcagtctcgcacacgctggcgcgggcaggcccccaccctgcgctcctaccacccaccagtccaccactataaaatccccgatcgcctcacgcacacgcaccgacccaccgtccgccgaggcgcaaccgccgcaacgcaaacccacaaaccctccgccgccgccgccgccgccgtaccacgtaccgtcccgcttctcctccgcccttgtgcgagcaggcaacggcagcagagcccgcacaggttgctcccggacggagggagaacgcgcggggctgggctagccgggggcggccggaggaggtacgtatggacaagtacgaggcggtgcgggacatcgggtcggggaacttcggggtggcgcgcctgatgcgcaacagcgagacccgggagctcgtcgcagtcaagtgcatcgagcgcggctaccggattgacgagaatgtgtacagggagatcatcaaccaccgctccctgcgccatcctaacattattcgcttcaaggaggtgatacttacaccaacacatcttatgattgtgatggagttcgcagcaggtggagagcttttcgatcagatctgtgatcgtgggcggtttagtgaggatgaggcccggtatttctttcagcagttgatctgtggcgtgagctactgccattacatgcaaatatgccatagagatctgaagctggagaatgttctcttggatggcagtccagctccacggcttaagatatgcgattttggctattccaagtcatcagtgttgcattcaagacccaaatcagctgtgggaacaccagcatatattgcacccgaggtgctatcccgtcacgaatacgatggaaagcttgcagacgtatggtcctgtggggtgactctttacgtcatgcttgtgggagcatacccatttgaagacccagatgaccccaagaatatacgcaagaccattcagtcactcttcgcctgcagcaaataatgcaagtgcagtacaagataccagattatgtccacatatctacggaatgccagcaacttattgcccgtatctttgttgccaatccagtgaggagaatcacaatgaaggaaataaagagccatccatggtttttgaagaacctaccacgggaactcacggagactgcacaaggcatgtactacaggagggataacaaggtgccttcttattcagaccaaacgtcggaagaaatcatgaagatagttcgtgatgcaaggaccatgccgaaatcatccagatcaggctatgggtggagcgctgagtattcggatgaagaagagaaggaagaggaacacagactagaggaagatgaatacgataggagggtgaaggaggtccatgcaagcggagaactccgatccagtgggatgtatgcagttttggcttctgaattgcttgtgctcggtcaattttcatgtaacataattcaatacactgaggcagactaccatgtccttgtgttgacgtccaccacggagcgccgcacggccgtagccctagccgccaggcaccagcggccagccagaggcccggacgactggactgccaaagccgtcgtcgccacagggaagcgccggtacgccgctcggcccttctacaggtgttcatgtggcaaatggaatttaggatttggtagcaccatggtccatgtatgtaaatcacatcactgagatggaggatggtttaaatgatgatggaatggaatatccatttgagggtgatgctaataccagtaacaatgatcagatagtagaggaccatgctgatgatgcccctattgctagtggtgataatgccatcgtccaacagcaagttggtctgagaaagaagaaatacatgtatgtgaattaccatcgtgttgagcaacctgatggttccagtgttaagcaaaagtgggcaaaatgtcttcgatgttcacataaagctaagtctgatgcttcaaatggtacaaaggcttttagtaaccacttaaaattgaaacattgtcttgtgaagggtcaacaacagctaattcagagtggaaatgacatagcaacatataaatatgatgagaaagctagtgtgagacttctatattatgccatcattatgcatgaatatccattcactgttgccgaacacaagtattttgtgaaatttatcaaatcactacggccatcatttcctttcaagtctcgtatcactgttcgtaaagagatcatgcaactttataaagaggaaaagaatatgttgtatgcacagttcaaaaagctgacatgtcgtgttagttttactatggatgcatggacatctatacaaaacaaatcgtacttatgtgtcacagcacattggattgatgataattggaacatgcaaaaaaggattatcaattttatgcatgtagaagacagccatggtgggataaaattgagtgatattttttttgtaaatgtgctcaattggaaccttgataagaaaatgtttgctctttctttggataatgctgcggcaaacaaggttgcagttgatatagtgatagataatgctaaagacttgctcatatgtggtggaaagttctttcatgttagatgtgcaaatcatatattgaaccttgttgctaaagatggcttagcagtaatgggaaatgctattgcaaacattagaatgttcataacagctatcaagaggtcacctttgcaatttgaggcatttcaaaaatgtgctaaagaatgtgatctagacactaagaaagtcctttccttagatgttgctacaagatggaattctacatatattatggttagagatgctatttactataaggatgcttttgatcgtcttgctaaaaaagataaggataga

SEQ ID NO: 78073 - DNA, 2406 bp, Zea Mays
tggagcttcatgtaaacccaatcgccaactgagaaggagcgttcagagcggtgtttatctgcctgttttttcatccgagtttgggcgcgaataaggtgctggtggatgagattttgcatcacagatctttcttgtaaccaggctgacagggcaactggggcagcagcatcaaaagaaagacccaaggaacgtggcttgcggccataaagcacttcaaacggagaacaacccaaagctgaatgcagacttgtgttataccaatattcagctgctggcagccaagaggaccactttttaggacacgcgctgacaaagcatcgcaggaacgtttccaagcattggttcagacgctctgtctgaccatctgactgggggtgataggaggaactgaggcgtaattccgtaccagccagttggaacagctgacgccaaaaggcgctggtgaagatggggtctctgtcagatacaatggccgctggaaaaccatggagcctgtatatgtgagataggaacagctgcgcaacagagtgtgctgtatatggatgagataatggaacaaaatggccaaatttggagaacttgtcaacaacaacaaggatgcagtcccacgagccagaacgaggtaacccttccacgaaatccatggagatggtgtgccaggcagagggtggaacaggtaatggttggagcttaccaggataagctgccctgtcaggtttggcttgcaggcaaatctgacattgctgcacaaatgaacggacgaacgacttcatattcttccacgcaaatatgcttttgacacggctgtaggtaaccggcacaccagagtgaccaccgatcggagaggaatgcagtgctgaaacaatcttagcctggaggtggggatcctcgcctatccaaagacggttcttgtaacggatcagaccatccttcagtgagaagtgggcaacagctgctggatcgatagctagtttagccactaactctttagtcttgctgtccgaatcgtaagtctgttggatatcagtcagccattgagggataacaacagaaaccgcattgatttcagcaggaccatagcgcgagagggcgtcagctgcccggttttctgtccctggacgatactgcactctatattgaaggcccaataatttggtgaacactttgtgctgccaaggagtatggagacgttgctcatttaattgtgatagacttttgtggtcagttataatcacgaatttctggtgttgaaggtaagcacgccattgttggacagctagatactctttttcataagtcgagagaccacgagatttaactccaagggccttactcaggaatgccagagggtgaccttgctgtgaaagaacagcccctacaccattggcgctggcatcagtttcaatctgaaatatgacattaaaatctggtagagccaacaccggagccgatgacatcgcttgtttgagagtgcagaatgcagtatcatgatcagctgtccaaacgtacagagcgcccttttttaacagtgctgtcaggggttggcagatcacgccgtaatgccgtatgaattttctgtaatatccagagagtcctaggaagctccgcaattccttcacacacttgggaacaggccatgccacaatagcttggatctttgctgggtcggtagcgacaccggctgagctgataatgtggcctaagtaagttacttggggctgagcgaaactgcacttagacattttaatcttccagtgatcagacgacagcagctcgaatacttgttgtaggtgagtgaagtggtcttgaagggagcggctgtagactaaaatatcatcaaagaacacaatagtgcatttacgaagaagaggagccaaagtatgattcatggctttttgaaatgtgccaggcgccccagtgagaccgaatgccatgacccggaattcatagtgtcctgtgtgggtttgaaatgctgttttgtactcttccccaggcttgagcaatatttgatggaatccagctcgcaaatccaatatagagaaccaacaggcgccagctagttcatccaataattcatcgatgatgggaactgggtacttagatttaactgtgagggcattcaagtgcctataatcgacacagaacctccatgaattgtcctttttcttgaccatgaggacaggcgaggaaaaggcactggaactgttttgaattatgccattttgaagcatttcagccacttgggattccacttcgtccttcagtgcaggggacaaccgataaggtcgtatattaactgggcgagcaccatccactaatggaatggagtgatcacatgcacggctcggtggcaacgttgtaggagaaccagaggagttctattccaggatactaagttttccttac

SEQ ID NO: 78074 - DNA, 768 bp, Zea Mays
gttttaaccccaactttgtcgcaatgaacctgaaatacaacacaagtgctgcactccatatttttgcatgtaaggaaagtgaggcgaatggttggatttcgagatttcgacagaacaatggtgaagctggaatggttactcaactggactacctttgtgacagcaagggtgatatgtcatatcttgataacttacaagctcgtcgctgatgctcacaaatttgggaagggcattgagcttccactagctcttcttggtatggcaggaatgaatctgctcaacatatttctagggcttgatctacttaaagcattcacacgagaaagaaaccagcagagccatcaggattgaatgtgcttttcttgatggtggtgtactcaaaattttgagaaggctgtagttccgttcaagtagggcagagagatatgtttaagtcttaattagcaactacactggaggcaatttttgtatgcattctttatgtataccaaaatgtactaatgctaagatctctaccagaaagggttgttgctagtattttcatccatgtaggtataatattcattagcagaatgcaggcgggtacctggatgcaggatttacatacatattgcaattagaaagaagtgtgtcaaaacctttggtctcaactccctaacctcatgtaaagtaaacccgaaagcaaaaccttgtggattggccctgtgaggctacaatgctcttatttatctttttaatagttgataatttcttgctgcaaagcaaata

SEQ ID NO: 78075 - DNA, 1111 bp, Zea Mays
gattgaaagagggagtcgccataggtgcaaacgcagttgctgtcgggccacggaagctctagcggtcggtgtagcgttggtgaagcttcccctccctaattgtgctagtgcagttatctttgttcttgtcaatcaatggcgtaataagggccttgagaacatgtttgagcatgaagaactatttggtggcagttggattggagcatattctgctttgtgcttttcttgtggctactttgcatatgaccaactggacatgctccgttaccggctgtacaatggatggattcctggaattctcatgcatcacttgatcctactcatttgctttacactagctctgtataggaatgtcacaatcaactacctaattctctcccttgtatgcgagctgcactccatatttttgcatgtaaggaaagtgaggcgaatggttggatttcgagatttcgacagaacaatggtgaagctggaatggttactcaactggactacctttgtgacagcaagggtgatatgtcatatcttgataacttacaagctcgtcgctgatgctcacaaatttgggaagggcattgagcttccactagctcttcttggtatggcaggaatgaatctgctcaacatatttctagggcttgatctacttaaagcattcacacgagaaagaaaccagcagagccatcaggattgaatgtgcttttcttgatggtggtgtactcaaaattttgagaaggctgtagttccgttcaagtagggcagagagatatgtttaagtcttaattagcaactacactggaggcaatttttgtatgcattctttatgtataccaaaatgtactaatgctaagatctctaccagaaagggttgttgctagtattttcatccatgtaggtataatattcattagcagaatgcaggcgggtacctggatgcaggatttacatacatattgcaattagaaagaagtgtgtcaaaacctttggtctcaactccctaacctcatgtaaagtaaacccgaaagcaaaaccttgtggattggccctgtgaggctacaatgctcttatttatctttttaatagttgataatttcttgctgcaaagcaaata

SEQ ID NO: 78076 - DNA, 1061 bp, Zea Mays
attccagcttcagacgaggttgggaaatagaagcgcacagaggattaacaacagacaaaccagttatctttgttcttgtcaatcaatggcgtaataagggccttgagaacatgtttgagcatgaagaactatttggtggcagttggattggagcatattctgctttgtgcttttcttgtggctactttgcatatgaccaactggacatgctccgttaccggctgtacaatggatggattcctggaattctcatgcatcacttgatcctactcatttgctttacactagctctgtataggaatgtcacaatcaactacctaattctctcccttgtatgcgagctgcactccatatttttgcatgtaaggaaagtgaggcgaatggttggatttcgagatttcgacagaacaatggtgaagctggaatggttactcaactggactacctttgtgacagcaagggtgatatgtcatatcttgataacttacaagctcgtcgctgatgctcacaaatttgggaagggcattgagcttccactagctcttcttggtatggcaggaatgaatctgctcaacatatttctagggcttgatctacttaaagcattcacacgagaaagaaaccagcagagccatcaggattgaatgtgcttttcttgatggtggtgtactcaaaattttgagaaggctgtagttccgttcaagtagggcagagagatatgtttaagtcttaattagcaactacactggaggcaatttttgtatgcattctttatgtataccaaaatgtactaatgctaagatctctaccagaaagggttgttgctagtattttcatccatgtaggtataatattcattagcagaatgcaggcgggtacctggatgcaggatttacatacatattgcaattagaaagaagtgtgtcaaaacctttggtctcaactccctaacctcatgtaaagtaaacccgaaagcaaaaccttgtggattggccctgtgaggctacaatgctcttatttatctttttaatagttgataatttcttgctgcaaagcaaata

SEQ ID NO: 78077 - DNA, 1376 bp, Zea Mays
cgctaggaggctagcgctagcgcaactcagacgctgcaggcaggtcggcactcggtgcgcacccgcaattcgcaaacccgcacaacctccccaccccccaaacccatccctcccgcgagatctctcaccggagtcaccgccccccagatccgcctcccctcgccggcgcgctcgcgtgttttccgctcgtccgccgccatgtcgcacaaccacggcgacacgatcccgctccacccctcgtcggcgcagtccgacatggacgagatcgagagcctcatccacgccgcgccatctccggccaccgttctccccgcgcggccaccgtctccgacgcgggcctccattcccgtatcctcctctccggcgttggcgccggcgcccgtccccacgaagccgcctctccccgccgcctccattccgatctccgtctctgtctcccccgttctaacgtccgtctccgttcccatcggcgctgacgggtttggacctccacccaacacgctcacagagccggtatgggacaccgtaaagcgagacttagcacgcatcgtcagcaatctcaagctcgtcgtcttccccaatccctaccgcgaggaccccggcaaggcgctcagggactgggacctgtggggtcccttcttcttcatcgtcttccttggcctcacgctctcctggtcagcttccgttaagaagctggggctataattctgaccttgaatgttctgcttctgggtggacacatcatcttcttccaaagccttagtcttcttggttattgcctgtttccactggacgttggtgctctactttgcatgctgaaggacaacgtgatacttaagattgtcgtggtgacaatcacattggcatggagctcctgggctgcctatccattcatgagtgctgctgttaacccaaggagaaaagctctggccctatatcctgtcttcctcatgtatatctcagttggtttcctcataattgccattgattaacgggggggcaagcttcctagtaacatctgaatagttgtgactttcctcgtggatggttgaaccaccagaaaacatacaagtttgagtagacaatgcttctaccctgtagtctgaatcgtctcgtggggatttcggtctttacatgatccggaggcttaaggttgtaaaattagttgaaaatctatacctgttgtaaagggctgaacttttgaccactgaattgactgccaagcttcttatactgtgtgagagaaaatactgtgttaaatgaggtgttgagaggtgcatcgtgtgttaaagggctgaacttttgaccactaagtgctagtttgggaacctcaattttttaagggatttctatttttccataagaaaataaactaa

SEQ ID NO: 78078 - DNA, 283 bp, Zea Mays
tccctttcaggtaggtcatttaacgtcggagacatgatactgcgaagggtaatgaccaccaaggacaaacataagctctcgacgccttgggagggaccttacatcattgcccagatcatgcgcccgggagcctaccgactcaagaacagcgacgacaaccttctgactaacacatggaacatcgagaacctaagaaaattttacccgtgggtaagctagatcagtccaccttgttttcaggatcaagaaagcggaacatgtcgaccaaactgccacatcccgc

SEQ ID NO: 78079 - DNA, 1776 bp, Zea Mays
cataagatattgccatctccacgtgacacacaggccccccgtggatgtctctagagcgggacccttcccttcgtattccagccaagcagaacgcaggaatctccttcccacggatcactctgccacgatccgcgtgctcacccgcaaaactaatccacaccgtccgtcctcctccaatccaacgcacgaaacctcatttccctcacgaagtccccgctgctgttccaaaatttcactctctctcccgcccaccacccgtcccttatttaatcaccccgcctccgcactcaatctcacaccgcaatcttcaatctccccagcaatccctagcagaagccttccatcctcactcgctcgatggcccgcacgaagcagacggcgaggaagtccaccggcggcaaggcgccgaggaagcagctggcgactaaggcggcccgcaagtctgcccctgcgaccggcggagtgaagaagccccaccgcttccgccccggcaccgtcgcgctccgggagatccgcaagtaccagaagagcacggagctgctgatccgcaagctgccgttccagcgcctggtgcgggagatcgcgcaggacttcaagaccgacctacgcttccagagctctgctgtctccgcgctgcaggaggcggctgaggcctaccttgtcgggctcttcgaggacaccaacctctgcgccatccacgccaagcgcgtcaccatcatgcccaaggacatccagcttgcccgccgcatccgcgggtccatccagccgagaggtcgtgtgcgcgtggatctctgcgtggaagcgatgaagattacggcgctcctggtgctgaagccgtcgacctctggagccgggagctcctcgtccggcggcgagtcgggcccggaggcggtggtgctcgcgaacgcgatagacgtcagccacttcggctacttccagcgcagcgccgcccgcgagttcatcgtcttcgttgcccgcaccgtcgctcagcgcacccagccaggccagcggcagtccgtccagcacgaagaatacaaggtccactcccacaatagaaatgggctttgtgcggttgcattcatggatgatcattatccggttcttgatgagtaccagaaggcttatggggactcctggaaatctgtgactgcagatgaaactcaacagtgggctttcctgacagacgccttgacaaaatttcaggatcctgcggaagctgacaaattaatgaaaattcagagggacttggatgaaacaaaaattatcctacataaaactattgagagtgtccttgccagaggagagagattggatagcttggttgagaaaagctctgatctgagtgctgcttctcagatgttctacaagcaggcaaagaagacaaaccaatgctgcacaatactgtaaattttggctcttcactcatggttgcaagaaacaaaaacggtcgatatcgtgctaatttatttactgtaagttaagtcgccagtgaagcgtggacacgtggttgcaaggcccgagctcagtaaaggctatactgttcttcaagacctgccagaattggactgttttcttgtgagaattccagctctccaaacaggccatggagtaccatcaacattctttagtgactatgaaacctcgtagtaccagctaacaccatttactctactactactatataaggcttgcgtcaaactgcagaaatcaccaatatggttaaattctcaaagcttgctggagcacattttgtgtccacaacacaacctatgtcac

SEQ ID NO: 78080 - DNA, 2234 bp, Zea Mays
cataagatattgccatctccacgtgacacacaggccccccgtggatgtctctagagcgggacccttcccttcgtattccagccaagcagaacgcaggaatctccttcccacggatcactctgccacgatccgcgtgctcacccgcaaaactaatccacaccgtccgtcctcctccaatccaacgcacgaaacctcatttccctcacgaagtccccgctgctgttccaaaatttcactctctctcccgcccaccacccgtcccttatttaatcaccccgcctccgcactcaatctcacaccgcaatcttcaatctccccagcaatccctagcagaagccttccatcctcactcgctcgatggcccgcacgaagcagacggcgaggaagtccaccggcggcaaggcgccgaggaagcagctggcgactaaggcggcccgcaagtctgcccctgcgaccggcggagtgaagaagccccaccgcttccgccccggcaccgtcgcgctccgggagatccgcaagtaccagaagagcacggagctgctgatccgcaagctgccgttccagcgcctggtgcgggagatcgcgcaggacttcaagaccgacctacgcttccagagctctgctgtctccgcgctgcaggaggcggctgaggcctaccttgtcgggctcttcgaggacaccaacctctgcgccatccacgccaagcgcgtcaccatcatgcccaaggacatccagcttgcccgccgcatccgcggggagagggcctaagcgtcatattttctgtcatcagtgcccgatcagaagatgtagagatatgctgggttctgtagtttgggttactgtcgaatcatcgagtgttggctgttcactgctgtaacttaattatcatgatgcatatgaaatggcaatgaactctgttatcagttctcgaattttccgtttggatcccttcttgttcctctgtgcataatcattttatatttgtggggataacgggatgaatggtgagaaggatgaatcagcgttcaggccgagcgttctttcacaagtggtcgtgtaggcgtgctgggctgtcaactgggcccactggcaggctaatcttccccttgtgaatcgtcttgtactgttctcgtgctaggcagtgggctgcgaccgaatccaacataagaggaaaggggcgtttgctttatattcgttctaacctgcgatctccgtccatccagccgagaggtcgtgtgcgcgtggatctctgcgtggaagcgatgaagattacggcgctcctggtgctgaagccgtcgacctctggagccgggagctcctcgtccggcggcgagtcgggcccggaggcggtggtgctcgcgaacgcgatagacgtcagccacttcggctacttccagcgcagcgccgcccgcgagttcatcgtcttcgttgcccgcaccgtcgctcagcgcacccagccaggccagcggcagtccgtccagcacgaagaatacaaggtccactcccacaatagaaatgggctttgtgcggttgcattcatggatgatcattatccggttcttgatgagtaccagaaggcttatggggactcctggaaatctgtgactgcagatgaaactcaacagtgggctttcctgacagacgccttgacaaaatttcaggatcctgcggaagctgacaaattaatgaaaattcagagggacttggatgaaacaaaaattatcctacataaaactattgagagtgtccttgccagaggagagagattggatagcttggttgagaaaagctctgatctgagtgctgcttctcagatgttctacaagcaggcaaagaagacaaaccaatgctgcacaatactgtaaattttggctcttcactcatggttgcaagaaacaaaaacggtcgatatcgtgctaatttatttactgtaagttaagtcgccagtgaagcgtggacacgtggttgcaaggcccgagctcagtaaaggctatactgttcttcaagacctgccagaattggactgttttcttgtgagaattccagctctccaaacaggccatggagtaccatcaacattctttagtgactatgaaacctcgtagtaccagctaacaccatttactctactactactatataaggcttgcgtcaaactgcagaaatcaccaatatggttaaattctcaaagcttgctggagcacattttgtgtccacaacacaacctatgtcac

SEQ ID NO: 78081 - DNA, 1255 bp, Zea Mays
cataagatattgccatctccacgtgacacacaggccccccgtggatgtctctagagcgggacccttcccttcgtattccagccaagcagaacgcaggaatctccttcccacggatcactctgccacgatccgcgtgctcacccgcaaaactaatccacaccgtccgtcctcctccaatccaacgcacgaaacctcatttccctcacgaagtccccgctgctgttccaaaatttcactctctctcccgcccaccacccgtcccttatttaatcaccccgcctccgcactcaatctcacaccgcaatcttcaatctccccagcaatccctagcagaagccttccatcctcactcgctcgatggcccgcacgaagcagacggcgaggaagtccaccggcggcaaggcgccgaggaagcagctggcgactaaggcggcccgcaagtctgcccctgcgaccggcggagtgaagaagccccaccgcttccgccccggcaccgtcgcgctccgggagatccgcaagtaccagaagagcacggagctgctgatccgcaagctgccgttccagcgcctggtgcgggagatcgcgcaggacttcaagaccgacctacgcttccagagctctgctgtctccgcgctgcaggaggcggctgaggcctaccttgtcgggctcttcgaggacaccaacctctgcgccatccacgccaagcgcgtcaccatcatgcccaaggacatccagcttgcccgccgcatccgcgggtccatccagccgagaggtcgtgtgcgcgtggatctctgcgtggaagcgatgaagattacggcgctcctggtgctgaagccgtcgacctctggagccgggagctcctcgtccggcggcgagtcgggcccggaggcggtggtgctcgcgaacgcgatagacgtcagccacttcggctacttccagcgcagcgccgcccgcgagttcatcgtcttcgttgcccgcaccgtcgctcagcgcacccagccaggccagcggcagtccgtccagcacgaagaatacaaggtccactcccacaatagaaatgggctttgtgcggttgcattcatggatgatcattatccggtacggagtgcattttctcttctgaatcaggttcttgatgagtaccagaaggcttatggggactcctggaaatctgtgactgcagatgaaactcaacagtgggctttcctgacagacgccttgacaaaatttcaggtcagataaatgggttggattc

SEQ ID NO: 78082 - DNA, 1728 bp, Zea Mays
aagcgatccgttgtagacagtcggttcgatagatccccgctcgaccttcccaacactttgaggaatggctgaagaggatgtccagccccttgtgtgtgacaatggcactggaatggtcaaggcgggtttcgctggtgacgacgcaccgagagctgtctttcctagcattgtaggcaggccacgccacactggtgtgatggtgggcatgggccaaaaggatgcatatgtgggcgatgaagctcagtccaaaagaggtattctgacactgaagtacccaattgagcacggcattgtcggcaactgggatgacatggagaagatctggcaccacaccttctacaatgagcttcgtgtggcacctgaggagcaccctatactgctgaccgaggctcctctgaaccccaaggcaaacaggggagaagatgacccagattatgttcgagacattcaactgcccagcaatgtatgtggccatccaggccgtttctttccctgtacgccagtggtcgaacaacgggtattgtgctcgactctggtgatggtgtgagccacaccgtccctatctacgaagggtacacgcttcctcatgctattcttcgattggaccttgctggtcgtgaccttaccgacaacctgatgaagatccttactgagaggggttactccttcactacgactgccgagcgagaaattgtcagggacatcaaggaaaaacttgcctacgttgcccttgattatgaacaggagctggagactgccaggaccagctctagtgttgagaagagctacgagctgcccgatggccaggttatcacaatcggtgcagaaaggtttaggtgccctgaggttctattccagccatccttcattggcatggaatctgctggcatccatgaagccacgtacaactccatcatgaagtgcgacgtcgatatcagaaaggatctgtacggtaatgttgtcctcagtggtggctccactatgttccctggtattggtgaccgcatgagcaaggagattactgcacttgcccccagcagcatgaaggtgaaggtggttgctccgccggagaggaagtacagtgtttggattggtggttccattctggcctccctcagtacctttcagcagatgtggatctccaaggaagagtatgacgaatctggtccgggcatagtccacatgaaatgcttctgaatttctggagcagtatatctgttgcttgcattttcagttagttgggatgcaagtttgtcccgtggtctcgctagcattcttcgttctttctggatattgaagagctgttggccatggagcattgtgcaaggtggtaaagtcgattgatggtactacatgaagaaacatgtgcagtacttcagcagtatagatcgtcagggtgtcggctgtcgcccgtgcagtttgcgtctttgtgagatctgggtccgtttctgcactccagtacgtggaacaggtttcgcatttggtggccagtgccccagcgtggcgtgagtgttgatgatttgaacttggagctgtttgttctattcctttcatgaaacagatattatcgtttgtacagggataaataataaattgtttatccttcaaatgttttagatactgttggaacaaacttcgtttaattataatctcttggatttaattcgagtaccatgcgagtttcggagttggccaaaagaagattagcatgcttgcatgactcggtta

SEQ ID NO: 78083 - DNA, 509 bp, Zea Mays
gtgaggaggtgaggccgccgagccattcgcttcagccttcaggcccatcagcttatccattctctccctcacgagtcacgaatgaatagtacacggcgctccctccctcctcgagagcgtgtatgcgcagctgcagctccgcaaggcagatgttgctgactcgtctgtccagcgtttcttgctcgtcaacagcgcagcagttgcatgcgggcgtcggcaagttcgccgccgccgcatgctggagctggaagaagaagcgcgaggagctcccctgcttcagggccagactggccggcaagccgccgcgcgcctcaccggcgaagggcggcattgtcccggccagcgacgatgacgacggcgttagcctcggcaccgtgaagctgccgggcaacatcgacaccgctcggttggagtccttgctcttccagtgggggaacagcctctgccaaggcgccaacctgccacttccggtgcctctcaagatttcttcacctgatgcgatcgaccag

SEQ ID NO: 78084 - DNA, 463 bp, Zea Mays
cacaccttgtgaggaggtgaggccgccgagccattcgcttcagccttcaggcccatcagcttatccattctctccctcacgagtcacgaatgaatagtacacggcgctccctccctcctcgagagcgtgtatgcgcagctgcagctccgcaaggcagatgttgctgactcgtctgtccagcgtttcttgctcgtcaacagcgcagcagttgcatgcgggcgtcggcaagttcgccgccgccgcatgctggagctggaagaagaagcgcgaggagctcccctgcttcagggccagactggccggcaagccgccgcgcgcctcaccggcgaagggcggcattgtcccggccagcgacgatgacgacggcgttagcctcggcaccgtgaagctgccgggcaacatcgacaccgctcggttggagtccttgctcttccagatttcttcacctgatgcgatcgaccag

SEQ ID NO: 78085 - DNA, 1070 bp, Zea Mays
gtgctcattacagctggccctatctcacatgttcttaccaagcttttgaaaagaatttgacgtaggtccggaggccatttaccataaatggtgcaatcgtagcgagcactctcattccatggatgcttcatctctgtggtcaccagacagtccttgttgcaaactgtaaatttggtgattgcattcagtgtgtgggcttatgttgatttgagctggttactgatagcatgggttaacaaatggtcaggcaaaattagccagcaatttatctctgaaccagctaagaaactttaggctcttaacggcctttgaagtttgttttgatattttttgttaatatagtattgtagactggtgcatacttacatggataatgagaaccttgtctatagaatatcctactagctatttagtaaagaggtctgctgataataccaaacactccatatctggacgcgtcctataaaataaactcaatgagccattgtaactcctaggcagtgagcttgtaaatttatacctctatctgttagcgttcggtgtatctctgatattatcaaaacattggcaggatcgcaccaaagagcacttcaaagaagaagagagcgaccttctcccacggctagaacaagtaagacggatgcagcgggaggaggggaaggtttctggcaggtccagttctgcatgggcttcggaggcagtatctacaatggagatgacacactcgaagctcttccccttcttcatgactggtctccttcctcaggaggccatgcaatacttagacctagtgtgccgatgcacgaagaacacgcgccatctggtctccatgctcagatcccttgccgagcgcctggaagacgcgaacccgtcaattatacacaacaaccctaccaaacttgtagctaatgtatttggggggttttggacgattgtgaaagcgtggcgtgtatagctgattgtgttatccaagcgtgagtaactacacggaaaaaaaggaagtgattgaaatgggcattattgtttctgacctactttactctatttccggatgttctctgctgactgct

SEQ ID NO: 78086 - DNA, 1923 bp, Zea Mays
atggcccgtgctggtgctggcgagcagacggtattggatagggatggcaacgggttaaaaacccgcgggtacaaagattacaaactcatacccgcgagattaatgttaaacccgcacccgcgacaggtagcatatgttacccaaactcgctacccgcgggttgatggcacccgcggtccgtccggcccggtcccacccatccctccgccaacctcgcccgcaccccgacgcctctctcaccacctccgcctctcacattcccacggaagctcccccgcggccccgcgctcccactcgtccgtcgcgccgcacgccgcgcctccccagtcccacccactcccaaactcttctacccacgcactcccactcacttcgtatgggcaactgctccccgtctccgcggcgccgccgcccgacggagccaggctcgccgccgctcggcagcaccgtgtccggcccatcgtgacggtcaactccatctctgtctccccctacccgctcgccagatccccctccgtctccaccgctgcggtggacgccgaggacggcggcgtcgtgcgcgtttacggttccgacgggtgccccgtcgcgtggcgcctccgcgtctcgctcctctacaaggcggcggcgcccctccacttcacgccctcagaggcggctccactcggccgcccggtgctccgcctctccgccgccgacccggaggtatgcggcacccccgacgaactgctgcgccaggtggacgctcggttcgagggcaagccgcgcgtcgcgccgccggagaggccccgcacggggtcgccgtcggcggcggccgcagccgcggctgaggtcgccgagctggtgcggctgcagcaccgcagcgcggagaggcacctcgagggcgtggcggcgaaggtggtggagatggtcaagaaggggaagaagtccgggaaggggaggagcgttgtagagggtgctgaggtcaggagtctcggcaagtggtacggggacgcaatggaggtgatgctggagcacgcaaggatggaggagacccttatcttccctgacatacagagggcatcgtttccaggtcgacttgggtttgatcttatttatttgtgccgcattgcattatgctcttgatgttcatagaggtttagtgcatttgtctgtattgcttgttttcacttctctgtattggcgattttgagaatttatgaacctgcttacctttctgcactcaccgttttctgtcgcaaaatagcagcgcatctgcgtgactgcgtctagacaattggagccctgcttcaattcgtagtgctcattatattgtgggtacgttggttattttgaggagtcgttcacttgcgctggcgacttttcagaaatcatttcttcatgtgttcctgtactctggtccaaaacatgtacggaatattctccctactactgtagctgtacacgtcaccatttattctgattggtaaaaggagttaacagtctagtttggcacctctatttttaagggattctaattttttctagaaaaaatgaactaatttctcttagaaaaataaaaaatcttttaagaaaatattgttgtgaaactagcgctaaggggtgtttttttgaagaatcaggaggggaggcccctactgaggattttattaaagaagcgaaaagaaaacgttaaaacttagtctttttacaaacgttaaaaagcattgaataagggagcactactcctatgcctgccacagactcagccaattcgggatagaggtgtcaaagttcccccgcgctctgtgtatgatcaaccgcaactctttgctgaattcctgcgtacagcgatgcatcgaatgatctttgtttgaaaacaaccactcgtttcggcttttccagatgctccaagtcatgagaataataatctccatagagaag

SEQ ID NO: 78087 - DNA, 1022 bp, Zea Mays
cctgatgcgagctttctacgttcctccagcaccttccccccatcttatcaccgatggccgtttcccgaggccatggcccccagcatcaacttttaaataccgttgcgtgcagcggtgcagagctcgtgtcactgctcatctgttcgcgccgcgctatctcgtctgttcacctcgtgctactggaggagccaaagacgacacacgacatacagccgacaacctctagagcatggcgacggctgctgctgctgcaacagcgatgtgctccgttccaggcccgagcggcagcatgcggcgccgggcattctgcacatggaaaaaagccgatgctccgcgcgtcgcttcttcttccgtcgcgcgggtcgtcagggcgtccgcggcggccgtgcacagggtgaagctggtcgggcccgacgggtcggagagcgagctggaggtggccgaggacacctacgtcctcgacgccgcggaggaggccgggctggagctgccctactcgtgccgtgccgggtcgtgcgcgacgtgcgcggggaagctggcgtccggcgaggtggaccagtcggaggggtcgttcctggacgacgcgcagagggccgaggggtacgtgctcacctgcgtctcctaccccagggcggactgcgtcatctacacccacaaggaggaggaagtgcactagctagactgctgctgctgctgctatagaagataatatatattcgaatccgagattccgagtagcgcaggcaacatttgtaaaattgtagacagtggctactccaaccgtggatgttcagagcgacgtactgtttttatcaagttctacttctacaactgtgtatctagtctaggctcctcttgggtcggttcatttgtcgaacgttttggtttttaaccctcgctctaggttggtgaacgttttggtgacttagcacggagtacttgagagacgggtgacacaagacgaagttcagaattccttgtgtgtttcagtgtttttgtctgtttgatatactgtctacaat

SEQ ID NO: 78088 - DNA, 2125 bp, Zea Mays
gagatgtcacattagcgttgtttcttgtcttggctatactgcgcattggcgtttccaacatcttgaatgacagggcactctcggatcctattctagtgctgtctttctgtcttgtcccagatatattctatcctggacaatcgctgaaagttcccagctgctgcttaagcttaatctaatgaaatgttgttttcagcaaagtttggactttagatagtgtagcaattctttttcctactgatggtgtattgtccttgtcatttccttgtagtgttatatacttctagagcatgaaaaggaatctaaattaagtattagctatacacagcctctatcctgaaaagagagagagagagaaaaaagcgaggctgtggtatatcgtctgtgatcgtgtttattgcaagtctttttcatatgcacctttattgcaatgctttgtgtgaaatgattgctccaatcatgaattaggaagcatacttccccatccttataaaattacatatatatacctttatcaaaagttgcttagagtatctccagcagctccctaatcatgaattaggagagatgctgcagcagatagccaacaatctccttcaaaatatgtggaacctacctatcagatcataatttatttatttattttcctttctctctctaacgcaacgctagaaagtactcttgcgagttgcgacgcgcgccagtccttgttgagcggggacaagggttagggtgcatgccaagttgtagccatggcctttggcctccgttgtgggtagttagcagagagtattgggtgggttccatgctagtgggggagatgtaatttctcgtttatttaaagagagccgaagagttttttatcaccaaaacaaaaagtgagagcaagaaacagagtccatctcccctaatatgacaggtttatggggataatgaatgagagtggacaaaagatgctctattaattgcactttagaaaatggagagtagtaaaacctaccaaaacaaggcggtccatgatctgaaatacttattctagaataaattttaaatgttaaaagtgtacttatttgtaatctgccttctagccaatttctgtccacagaaggaatcaaagctcaggaaagttgaaatcaaactaacaaaatggaggtcgcaatcagcttttacccccatgagagagaagataatccatagaaagccatgctcatttctttaagaacttctggtggaacagcaagcccaatctttatttttaggctacttgttgtccatgggactgaattttaggtgggtgtgtccttttcctgaccactatgcatggattgaaccttaacttttgcaagacatggaacaccatgagtaaggcctctagtattctacttctttagttttaaaataaaaacatcattctagcttcatgtgtttgtcttaagaacaagtgtcattctcacttttgaatacatacttatttttttattaatacatctctacatttcttcatatctttatatgcattatatatttttaattttttttgatcctgtacccaaaactttaaaaagatactcattatttataagacagagggagcagtatgttggttgtgggcgctatgttctgcagaggcagtgaggcaccagcaaacaaaagggagagaataaaaataagttttttttaaaaaaaaggaatataaaagagatggccggcccagagaaaagaagacacacaataaaggcattatttatgcagagtgccaactgtttaagctagctttctgacaaaagattggcctgcccctgccatgcagaaggcaggacaagaccctgtagcttgtaggacgaggaccaggcgaccggcggcattgctactgttatgttgctgtgcagttctgacagggagggaagtactggtgtacttgaaagtttaagctagcttttttttttctctcgccgtgttaattctttttttgtgtgttttaaaaaccctttactgaccatgatctacagtaagaataagatcttaagggtggtgtgtcaatgatacaggaaatggaggagagtaaagaaaaaaagacggtgacctgttgatagaagttttcgaggctggcaatcttgtcaagtgc

SEQ ID NO: 78089 - DNA, 658 bp, Zea Mays
ctctgacctgatgaaggtgctgttacacgagaaatacatgtcattgtcagccacgtccatttctgacttttttcatataatgaattccgaaaacaggtgatcaagcttgtgaaacatactcgccgggacgggaagcccagaggttgctgagagctctaaggcggctgtagtactccccaatagagaggaagcaccgcgcagcctgccgagtggtcaggatgcggcgcatctgatgcaacgtctgctgccttagattgtcggcctgcggttgtagcaacacacatgaaaaagaaaggtttaagctagctttctgacaaaagattggcctgcccctgccatgcagaaggcaggacaagaccctgtagcttgtaggacgaggaccaggcgaccggcggcattgctactgttatgttgctgtgcagttctgacagggagggaagtactggtgtacttgaaagtttaagctagcttttttttttctctcgccgtgttaattctttttttgtgtgttttaaaaaccctttactgaccatgatctacagtaagaataagatcttaagggtggtgtgtcaatgatacaggaaatggaggagagtaaagaaaaaaagacggtgacctgttgatagaagttttcgaggctggcaatcttgtcaagtgc

SEQ ID NO: 78090 - DNA, 644 bp, Zea Mays
agttggggtaccgttttcatccacgcacgcgtggtggacagtactgcgcgccgaccggtcggaccggaaccggaagattctcgcgtccggagtctgcgtctccattctccaccttcttcaaaggttcaactcagagaggagagaactagagaaagatccccacccccaggcgacgcgaccggcgagccccgaaaccctaggtcgcgcgacccgggcagcgcgcttctgcgtgactgcgtgtctttcggggaggggacagcgttaggacgcgacgaggttagcgaggccgtctggccgactataagcggaagaatctcctccgaagccttcctagagctgtgaagagcgcgtggatctcctggatttgcagactcgaggggagctgagacaaggtcatggcagaagtgtctgtgtgatgtgtgcgcttcttgtcgcattagggttcgctgaagattggaaagctgctgcacaaatgatccgtgagaagcgaccttctattagcatgaatactcttcaccgcaaaagcttggaggaatggtcaaaacatttgctctcctctaaaagaagtggggaatcagatgtgatcaagcttgtgaaacatactcgccgggacgggaagcccagaggttgctgagagctctaag

SEQ ID NO: 78091 - DNA, 1211 bp, Zea Mays
aacggagggagtacttcctacagttggggtaccgttttcatccacgcacgcgtggtggacagtactgcgcgccgaccggtcggaccggaaccggaagattctcgcgtccggagtctgcgtctccattctccaccttcttcaaaggttcaactcagagaggagagaactagagaaagatccccacccccaggcgacgcgaccggcgagccccgaaaccctaggtcgcgcgacccgggcagcgcgcttctgcgtgactgcgtgtctttcggggaggggacagcgttaggacgcgacgaggttagcgaggccgtctggccgactataagcggaagaatctcctccgaagccttcctagagctgtgaagagcgcgtggatctcctggatttgcagactcgaggggagctgagacaagacatgggttggggaatatccaggttgattggactgaaggctgctgccctgctttctgtagcatgttttttccaaggactaggagtgacccttatctcatttcctctcatatatgcatccataattgcaatactagtctcgatagcttcccgcccatctattgatcttcctttactccttggcaaggcatccgatggaagttttccattgtggtcatggatcatcttctcaccatttcttcttttcattcacctgttcgtgctgctacggagatttgtgaaaaacgagcccttatacactgaggttgcagatggtgtgtttgttggagggtggccttcttcagttgaacacctgccaccaggtgaccccgcgatcatagattgcacgtgcgagctgccaaaaagctcgactatctctaacaatgcatatttgtgcattgctacctgggacacgagggctcctcagccatcacagattgagtctgccgtgcaatgggctgtgagaaagcggtcacagaacaagcctgtctatgtccactgtgcctatggtcatggcagaagtgtctgtgtgatgtgtgcgcttcttgtcgcattagggttcgctgaagattggaaagctgctgcacaaatgatccgtgagaagcgaccttctattagcatgaatactcttcaccgcaaaagcttggaggaatggtcaaaacatttgctctcctctaaaagaagtggggaatcagatgtgatcaagcttgtgaaacatactcgccgggacgggaagcccagaggttgctgagagctctaag

SEQ ID NO: 78092 - DNA, 1090 bp, Zea Mays
ggaagattctcgcgtccggagtctgcgtctccattctccaccttcttcaaaggttcaactcagagaggagagaactagagaaagatccccacccccaggcgacgcgaccggcgagccccgaaaccctaggtcgcgcgacccgggcagcgcgcttctgcgtgactgcgtgtctttcggggaggggacagcgttaggacgcgacgaggttagcgaggccgtctggccgactataagcggaagaatctcctccgaagccttcctagagctgtgaagagcgcgtggatctcctggatttgcagactcgaggggagctgagacaagacatgggttggggaatatccaggttgattggactgaaggctgctgccctgctttctgtagcatgttttttccaaggactaggagtgacccttatctcatttcctctcatatatgcatccataattgcaatactagtctcgatagcttcccgcccatctattgatcttcctttactccttggcaaggcatccgatggaagttttccattgtggtcatggatcatcttctcaccatttcttcttttcattcacctgttcgtgctgctacggagatttgtgaaaaacgagcccttatacactgaggttgcagatggtgtgtttgttggagggtggccttcttcagttgaacacctgccaccaggtgaccccgcgatcatagattgcacgtgcgagctgccaaaaagctcgactatctctaacaatgcatatttgtgcattgctacctgggacacgagggctcctcagccatcacagattgagtctgccgtgcaatgggctgtgagaaagcggtcacagaacaagcctgtctatgtccactgtgcctatggtcatggcagaagtgtctgtgtgatgtgtgcgcttcttgtcgcattagggttcgctgaagattggaaagctgctgcacaaatgatccgtgagaagcgaccttctattagcatgaatactcttcaccgcaaaagcttggaggaatggtcaaaacatttgctctcctctaaaagaagtggggaatcagatgtgacagattattgtctgcccacgaaaatgtgttc

SEQ ID NO: 78093 - DNA, 1110 bp, Zea Mays
gtctgcgtctccattctccaccttcttcaaaggttcaactcagagaggagagaactagagaaagatccccacccccaggcgacgcgaccggcgagccccgaaaccctaggtcgcgcgacccgggcagcgcgcttctgcgtgactgcgtgtctttcggggaggggacagcgttaggacgcgacgaggttagcgaggccgtctggccgactataagcggaagaatctcctccgaagccttcctagagctgtgaagagcgcgtggatctcctggatttgcagactcgaggggagctgagacaagatggtgtgtttgttggagggtggccttcttcagttgaacacctgccaccaggtgaccccgcgatcatagattgcacgtgcgagctgccaaaaagctcgactatctctaacaatgcatatttgtgcattgctacctgggacacgagggctcctcagccatcacagattgagtctgccgtgcaatgggctgtgagaaagcggtcacagaacaagcctgtctatgtccactgtgcctatggtcatggcagaagtgtctgtgtgatgtgtgcgcttcttgtcgcattagggttcgctgaagattggaaagctgctgcacaaatgatccgtgagaagcgaccttctattagcatgaatactcttcaccgcaaaagcttggaggaatggtcaaaacatttgctctcctctaaaagaagtggggaatcagatcaaccgcctaattcagctgtccatggcagatgatattggaagcagagttgattttggaattttgagcctactgataagtgataagttgatctcaaataatgtgaaaattgcttctcctttccttcatttgtccatcgatcgctctggtcttgcatcttacaatttacttgtcagtttatgtaagattcctattgctgtttttacatgtgttgcacaatattgatatttcttgctatgcactccccatgtttcattctaaattataattcgtttatgtatctagaaaagtcaaaacgacttatatataatttaggagggtgcataatattttctagttgtttcactatcggcgcttctttaccgtcacagtttcgttcttttcca

SEQ ID NO: 78094 - DNA, 985 bp, Zea Mays
aacggagggagtacttcctacagttggggtaccgttttcatccacgcacgcgtggtggacagtactgcgcgccgaccggtcggaccggaaccggaagattctcgcgtccggagtctgcgtctccattctccaccttcttcaaaggttcaactcagagaggagagaactagagaaagatccccacccccaggcgacgcgaccggcgagccccgaaaccctaggtcgcgcgacccgggcagcgcgcttctgcgtgactgcgtgtctttcggggaggggacagcgttaggacgcgacgaggttagcgaggccgtctggccgactataagcggaagaatctcctccgaagccttcctagagctgtgaagagcgcgtggatctcctggatttgcagactcgaggggagctgagacaaggtcatggcagaagtgtctgtgtgatgtgtgcgcttcttgtcgcattagggttcgctgaagattggaaagctgctgcacaaatgatccgtgagaagcgaccttctattagcatgaatactcttcaccgcaaaagcttggaggaatggtcaaaacatttgctctcctctaaaagaagtggggaatcagatcaaccgcctaattcagctgtccatggcagatgatattggaagcagagttgattttggaattttgagcctactgataagtgataagttgatctcaaataatgtgaaaattgcttctcctttccttcatttgtccatcgatcgctctggtcttgcatcttacaatttacttgtcagtttatgtaagattcctattgctgtttttacatgtgttgcacaatattgatatttcttgctatgcactccccatgtttcattctaaattataattcgtttatgtatctagaaaagtcaaaacgacttatatataatttaggagggtgcataatattttctagttgtttcactatcggcgcttctttaccgtcacagtttcgttcttttcca

SEQ ID NO: 78095 - DNA, 1538 bp, Zea Mays
aaaatgtaacggagggagtacttcctacagttggggtaccgttttcatccacgcacgcgtggtggacagtactgcgcgccgaccggtcggaccggaaccggaagattctcgcgtccggagtctgcgtctccattctccaccttcttcaaaggttcaactcagagaggagagaactagagaaagatccccacccccaggcgacgcgaccggcgagccccgaaaccctaggtcgcgcgacccgggcagcgcgcttctgcgtgactgcgtgtctttcggggaggggacagcgttaggacgcgacgaggttagcgaggccgtctggccgactataagcggaagaatctcctccgaagccttcctagagctgtgaagagcgcgtggatctcctggatttgcagactcgaggggagctgagacaagacatgggttggggaatatccaggttgattggactgaaggctgctgccctgctttctgtagcatgttttttccaaggactaggagtgacccttatctcatttcctctcatatatgcatccataattgcaatactagtctcgatagcttcccgcccatctattgatcttcctttactccttggcaaggcatccgatggaagttttccattgtggtcatggatcatcttctcaccatttcttcttttcattcacctgttcgtgctgctacggagatttgtgaaaaacgagcccttatacactgaggttgcagatggtgtgtttgttggagggtggccttcttcagttgaacacctgccaccaggtgaccccgcgatcatagattgcacgtgcgagctgccaaaaagctcgactatctctaacaatgcatatttgtgcattgctacctgggacacgagggctcctcagccatcacagattgagtctgccgtgcaatgggctgtgagaaagcggtcacagaacaagcctgtctatgtccactgtgcctatggtcatggcagaagtgtctgtgtgatgtgtgcgcttcttgtcgcattagggttcgctgaagattggaaagctgctgcacaaatgatccgtgagaagcgaccttctattagcatgaatactcttcaccgcaaaagcttggaggaatggtcaaaacatttgctctcctctaaaagaagtggggaatcagatcaaccgcctaattcagctgtccatggcagatgatattggaagcagagttgattttggaattttgagcctactgataagtgataagttgatctcaaataatgtgaaaattgcttctcctttccttcatttgtccatcgatcgctctggtcttgcatcttacaatttacttgtcagtttatgtaagattcctattgctgtttttacatgtgttgcacaatattgatatttcttgctatgcactccccatgtttcattctaaattataattcgtttatgtatctagaaaagtcaaaacgacttatatataatttaggagggtgcataatattttctagttgtttcactatcggcgcttctttaccgtcacagtttcgttcttttcca

SEQ ID NO: 78096 - DNA, 2030 bp, Zea Mays
caacaagcacgtgctgaatgttcgtcagggtcctgcactggggtgcgtagattattctgtcaggataagtactgcgctctggcctctgcgcaacatgcgacgccggagagcgcagaagatcctctgcaagaagctgctggctataagcacgcgtcgcgttcaacaacgcatcagcagagagtgtcctaaaaggagccagtctcataggtcgactgagagatggcgtccgagatgagcaaaaacgtgaaggccctcgacgagcaggaggtcacctcgcagcactcacgcgcccagaccagcgacgctgccgaggagcagcagcagcaacagcaggcggtggacccgctggcgcggcagtcgtccattatgtcgctgacgctggaggagctgcagaactcgctgtgcgagccgggccgcaacttcggatccatgaacatggacgagttcatggccaacatatggaacgccgaggagttccaggccgccacagccggctgcaacaaggagggcgcggagcgtgagccggtgcccgtggcgacgacgacgggcacaggtgagaacggaggaggaggaggaagtgggaggggactggttcggcagggttcgttcgcgctgccgccgccgctgtcccggaagacggtggaggaggtctgggccgagatcagccagggcccggcggacttccaggccagcgcggcgccgcagcccgtggcgcagccccaggcggcgagcggcggcggcgtcgcggccagcgggcggcaggcgacgctgggcgagatgacgctggaggacttcctcgtgaaggccggcgtcgtgcggggcgccttcgccggccacggccacggcgtcggcatggtcccggccggcccgatgggcatgcagcacaacgcggctcctcccatgatgtaccaggtggcggcagcggcggcgccgccgcccggcgctgtatacccggtgatgggcgacggcatggggtaccacggcggcgggtaccccgggggcgtggcggtggtgccgcccccgccgccgtctcagtgcgtggcggccgccgccagcccggggtcgtcggacgggatgagcgccatgacgcaggcggagatgatgaactgcattggcaacggaggggtggtccgcaacggcggcggcggcgcgcggaagcgcgacttccccgaggacgggtgcaccgagaagaccgtggagcgacggcagcgccgcatgatcaagaaccgcgagtccgcggcccggtcacgcgcccggaagcaggcgtataccgtggagcttgaggctgagctgaaccatctcaaggaggagaacgagcgcctcagagcagaggagaggacgattctgctgtcgaagaaaaagatggtacagtaacaagtttcactcaatcgcttccttttacggagtaccggtcatttgctagttgtcagtgtaacagtcgatatgctctgtcaagacaagacagtgtcctgaaggcaaccctgccatggctttttgtgtctgtttcagctggtggagaagatgatggagcaggcaagggagaatgtgagcgccaagaaggtcggtcccggactgcgccggtggggcagcgccatgtggtgaacttgtgacgagtgagactcgcgttgtgcagttccagttcgattggcgcttgcttgcttgcttccatggaaagtgctgtacctgtcggtaccagaaccattggtaacagtacgcgatgtgattgacgcatacgtctctgagggactaatagatatatgggcaagagcttccgcgttggcctgctattgttcataagccttgggttgtacaaacaataaaccagctgtctttaagatagcaactcaacacaaagctatgtgttttcgtccatgtttatttgacatgggccatactgagtcctatgtctgtgtatatcgtgcatttgattctggtattctcgtgcgatgcaaatggttggattcggaggctaccagcaaccgaatgttgtttggtagagcttcactttaagaattccatgtatatttcag

SEQ ID NO: 78097 - DNA, 994 bp, Zea Mays
acgagcccgacacgtccaaacgacagggggcgtcgtcgtctctcccagtcccaccaacgcgtccaagcctataagtaatggcggaatggaagcgcacggcacatcactactctactagctaattacctccgtttcggcgccgcatccagccccggcccacaacatatgcccgcgcgcgaccacgcggcaggtctcgctccccgtctaccaactcggtcgcttcgcttcagcggctcgtcgttgctatcacttcgtcgccgcgggtcgatagcaaagcttggcccgcttgcgcatcgcggctgccggacccggacgcacgcggccgcctggaggcgggcggctcccttccggcttccgcggcgcctgaggaggcgtataccgtggagcttgaggctgagctgaaccatctcaaggaggagaacgagcgcctcagagcagaggagaggacgattctgctgtcgaagaaaaagatgctggtggagaagatgatggagcaggcaagggagaatgtgagcgccaagaaggtcggtcccggactgcgccggtggggcagcgccatgtggtgaacttgtgacgagtgagactcgcgttgtgcagttccagttcgattggcgcttgcttgcttgcttccatggaaagtgctgtacctgtcggtaccagaaccattggtaacagtacgcgatgtgattgacgcatacgtctctgagggactaatagatatatgggcaagagcttccgcgttggcctgctattgttcataagccttgggttgtacaaacaataaaccagctgtctttaagatagcaactcaacacaaagctatgtgttttcgtccatgtttatttgacatgggccatactgagtcctatgtctgtgtatatcgtgcatttgattctggtattctcgtgcgatgcaaatggttggattcggaggctaccagcaaccgaatgttgtttggtagagcttcactttaagaattccatgtatatttcag

SEQ ID NO: 78098 - DNA, 3876 bp, Zea Mays
atttgctcgcttgcgtcgttcgatctccgcactccaacgcgcacgcatcctaccctctccacaagaccacaaccaacccccgcgagatctgctcccatctcttcgtctcccctatcgcatgaggtttacgcccctccccgctcgccgtcggcccatctcggcccctgaccctccaccgccactgactccctctcttgccaccgagggaattcggatctaggagcaccatgccactacagctctccctcgcccacgattggcccccggcccgggagatgccgacgcccatcgcgaccgcggttttctcccccatgtccttggcctcttcctccactctcatcctccctcctccccccgttctcggatgttctcgtcgcctccgccgcgcgttccgctctccccacagcccttgtccgccgcatcatcctcggtcgttctcggcgtcccgctccacgcccgccctcgcccaacgaccctcgccgcaccccctccctcgtcctcgatgactccccctctggccccatcctcgtcggcatcggagcctgctctctccgtcatgggggaggggaaagcaaaggaggaacaagagccaagcagttaagctagcccggtcgcttgccttccaccaagatcccccgagacctcatcgacgaggagatggagatggagtccagccccgccgcatcgcccttttcgtagagccgtcgccctgcgcctacgcttttgcagctcctcggcatcgcaatcgctacctcccgcgatgcgcccttggatccacttctcatgcgacgcctctgatcgacaagcacgtcgtgcgtccgcaccgcctccctgaccggcaagcacgtcatggctccaggcacttgcagcctccacgcttcttcggccagcgagcacgcgaccacgcctcccactgttcagtcgtggtggctccaggtgcttcttgcctctgtgtctccctgactggcaagtgtgtaaggagggacctcccctgccctagctccaaacagaattagggaatacggtcaacctcccatggctactgccgtgtaggcgatctgacagtccacaaaaacctaagattcggcaccaagtcactaaccgaaggaaggtcgagatgaggaaggatgtgatttgatctcgaatatcaactacatctgtctagcgtcgagacacatctacgccagaagctgatggttgtgggtaaaacatttttgttctgtaatccccaggctagcaagtttcacttaaacaaaggttcaggctttcgttgtttgcaaggtactataggttgtagcacaacttatactattttgtactgactcatgcggagggcccgtgatcagaggtgctgttgaatttttagttacacaaagtctactatttagcatccacatgttagtaattttttagcaagaatgcaatatcggtacatagtatgccatgaatttttttacctatctttctagcattccttttgatgaaaagagagagtaggagtgtgttgtgtgtgtgataggggtgtacagaggagaaaaaactcaaatgcacggctcaacaactcttgtcatgtgacttttatcttcttgccttatagaatgcagattctagaggcgatcactgcacactgcacacacagccttcccctctgtatagctaatccaatcgacaaatccagtgtctgcgctctctctttctcaaaactattgtctcttttttggattctaatattcacccaatcattgtttttgttttgtctcatgtaaatttcagaacatcgaatcctatgtttttgtaaatttactcttgcgagctcaaattatttgcataataaccagccgtccgggacggagctttacccatacgtatatgttcagctatgttgtgtggactgaatgaaaacgttctgagctctactaaaaatatatgttcaccatgctatcatgcttagtaactgtgatatggcattgttagaagtacaaaaatctaggacctcacatgagtactccctattgtctaaattttattttccagtacaaccagttagtgcactccgtgtccataaacatggcgcaaggacagatggggcaaggcaaacatgaatcactccaaagtacaaatagaccaatggaaatatttgtattaataatattaattatataagtggtaattctattggtctattgacaatatatcttatccatggaaacagttggctggaccttaagtttttttctctttcgtagataggactggacacgacttgtggctattttctctctatttataatattttgtagggatagattattcctccaactcattgtttcgattaaaaaaatatacctaacaatcttttatgtggcacctcttcagcataacctttatattcattcttgcacttgtcagagtattctacccttacaaccatggtgcaaaattaatgacattctttaaatgtttgtgttgagcttcattgttcagttgctccatcacaaatgtagatttgatatctacattatgctttcacatacctataaaggagttatttttcatattttggtatgttgttgttttcacttaacttcaagagattttaacaatctcataggttggaaagcagatggttctaggcacacttgaacaatggttgtcactgaacttaaggggttttaattgttactgaactttattgatgcatagtgaatttaccattctaattgttgtgaatgcatgatatcacaacaatgacatgcctttttagttgctgctgttatcgggttgggtggcgcaggagaaaacagtgatcccactgctcaatctatcgatctatgagccaaacaagacacaaaccatggaacaagtggattgtctgcatcttaccattaatgttgaagaatggttggatgacaaaggccaaggagaatgctgcagctatgttattcagattatatgtggtccatgacaataaaaaagataatgaatgatccagagaatgtgaatgtatgcatagccttttattcgagtcagctattaaacaggctaaactattgttcaagtgagtagaggtattttgcaacacttaaataatgggtagtgccttatcgttatagtttcctaacatatttttatgtaccatgcataatttcttatctgagttgtcacctgcaagtttctcagcagcttatctcttcatcattgagtcaaccttgtacattatgcagaaaatggttgtcttttttatgcgataaggctgtctggaatgctatcacaaataattagtgtttttatatcaatgtacattatcaatatattatcaatgtattcttaatgatgaagaggtacaacgtggaatgcacgaggtggaaggctagcacaccgaggtcaaatttatcctccaggttcaaccatggaagtgaatcttctgatgatatttgcctatcattaagaattttatattgactcttttgaaataatttgtgcgatattgataatatttgttcgacatcagttcaatttatttgggcatgtgtatttataatagtattacatatttatattgtcaatataatgttagtgctgtggtgatattttgcatcacgaatttacatattatagtgaggtttgtggttttgtatctatgtttcatactaattttttattctcgtgacaacgcacgggtacagacctagtaaaactataaattgatatcagccaaagaagattgtaagactctagcaggagccgtatgcccgtgtacgggcgtgcatccgtaaaatttacgtgttttcacactgttgagttccccagcagtcgtcgtatccagcgacagaaaaaacgggacggaggtgggctcccttttatcgtgtattctct

SEQ ID NO: 78099 - DNA, 1257 bp, Zea Mays
aaagaattagcttcagaggcacatgaggcatgggatgactacaacaggtatatttcagataaacaagtgaatgctaaggaagtgtggattgttaagaatggtacccggaaacacattcaagctcaagatatccgtgtcggtaacatagtttggattcgagagaatgaagaagtaccatgtgatcttgttttgttgggaacttctgaaccacaaggcatctgtcatgttgaggctcttttcttattgttagagcagttgttgcattcgtcttgataaagagagatcaatgaaaagatgcactgcgagaacactagccatccagttcattcccttcgaatgaagttaaagatttctaatttctcagatagagggatatcctgatatatgctacgaaaaggggtgggggttggctgctccgagtcttcgaccttcaattatttgctgtaataaaatcaacacgtgtgtttgatgtaaagtttccatctgaaaaggaagagatggccagcaagtattgttccacagagcaagttccagatgagtgggtttttggtaatgcttttactaaggtgcaagacacactggttatctattgcaacagaggctcgaatagccaatcgcaaaaacaatctccaaggcttgtttcatcgtttcagttgctaatccaaagtcacataaaaatgtcataattacaattgtgttctgttatgacactctgttcctaattgttgcacccattttatgtttttcattacagctatgtaggtttttgtacaataatccctccgtttcaaaatagtagttgttttagctctagatttttatgtttatattcatatgtatggtaacgaatcttgacacatatataggacacatacactaaaaaggtaaaacagattttaatttgggacggagggagtactttatagtggttctggccttcttgacaccatggtgaagctaacaatgatagcccgtgtcactgatggacgtccactagcagaagggttggatgatgggcgagattagaaggatgttgatttctataagcagcaagctaaacttctatttaagaacttgtcaaaagggcatcatgaagcttcacgaatgtcaactgagacatggccctactatttccattatccttgtgccatttatgatccttatatgtatatgtatgtttgtgtatgtgtgtatatcagaattaggcttgcttttacatgttgctcctcatatagttcttttgtttgtctaatttcc

SEQ ID NO: 78100 - DNA, 1195 bp, Zea Mays
ccattcggacttccctttattccccttcctatataatcccatcgactgccatcttcagatcttcttccgcttccaacttccgttccgcaaattgaaagctcggcgttgccctgcgcccctgcctcgagctcgaaggactttgtccctatacgtcgttgtccagctcctcgcatattgtggcctggtgcagattggagatccgcccggacttggatcgagtcctcctgtctttggacattcattggagtgctccattcattgagacagcatgcctaagataaagacaagccgtgtcaagtatcctgaaggatgggagcttattgaaccaacaatccgtgagttggatgccaaaatgagagaagctgaaaatgatccacatgatggaaagagaaagtgtgaagctctctggcctattttccgcatttctcatcaaaggagccgctacatatacgatctttattacagaaggaaggagatatcacaggagctttatgagttctgcctagaccagggttatgcagaccgtaacctgattgcaaagtggaaaaaggttacgagcgcctttgctgcctccggtgcatacagacacgtgatcacaacttcgcaacgacatgcgtctgccgcgtccccaagcatctgagggaggagcaggtgatagaatgtgtccactgcggctgcaggggttgtgccagcggtgactaatcttgtcatcatgtcgttcggctcacgactcaccatcgcaaccttaaccggatgaggtgccctgctgtaaacatggatccggctgcggtgattagcattagtttattgggtaaactagttgggggaggactaaatttcctcacgtttggatgtttctaactgttatgtactactatgacgttctcgtgtcacaaatgcttgcgttaaattagtagcgcttttgcattttattgagtctgttaattggctactgttgtgggttctaacaatattttttttgataagacaggaggggcgagcccctattggaaattttattaaaactttaaaataacagagttagaagcagacagaaaagaagattacaaaggataaaacaacctaactacaacggaaaaaggaaaagagacgaggtctactgctaaagctgaagtcggttctaacaatattaaattttgtatttttcaacgatttttcaaaaattcagcaaaaa

SEQ ID NO: 78101 - DNA, 4069 bp, Zea Mays
ctattccggtaccgcactgtggtcgccgtgcgggcccgaccggggtcgaagccgaaaatcctgcggctgtagacggcgaagctacgcagtcgacgtcggagaatggggctctccggcgcagcaccaactgcatccacttcctcacctcgccaccgtagccaccacaagcacctccatcggctcctcctcctcgatccgaggcggcgaccggctgtggtcgcgtcgccactgcgcgcggtgtgcggagcagcaaaaccttcatcgtcgtcgtcgtcgccttcctgaccacacacgcaccaagtccaagtgaggtcggccagtgtacgagttcagataataagcggtagtgcgagaattccagtttccttcactgaaatgaaaaggagagaagacctacagctacagcgccccgccctgccttccgtctttgctccctgcatggttgcacgcccggtgtcctgatctctcctctgccgcatttcaccaatacgtgtgggggttgtttatcaaatcaggcctgattgtttcctctcactcaattctttgtagcagttcttttttaaaagcataccggccacacagagatggaccgggttttcggtcttcttataataaccattcctttatttccaaaggcacacaatatttatttaagtaaaattatgcggtaacatttccggtgtcttgaataatgatgatagagaggcgtggcatgagatgtctggcttcacatggaagagtgatcagaggagtcttttcgttcccggctcactagaagctaaccaaattttgagatgttggaagtctgatacgtttacaatggtgttggtaatgcagattctgacccagacaagctctgaaagcaattcagaaaaagggtgacaccccagcaaagcttgtgaagatacttcagtgatgtactattggagattaaaaacctgacaaagctggtggagcacaaggccattgagtcaaatcgtacaacatatgggcatcggatgagtcagccgctgcgtgtggaacgcgaccgaatacacgaagccgggttcatagcgaagcacaggaccatacttacacaagaattcgcacagtttcgcaatatcggcggccgtttggtatccagtggatacgtggctgtttgtcacagcatcagatctcaagttcaaaccgtagttaatgcattcccttatcattttattatgtccacacttatttcacttccattttcatggtacaaaatttattgaaattggagacggatacttttcatataatcatggcaatgggggacttgaaacgtggtgtgttggagtcttggagagtcacgtgcacacagctaaacggcctcaacaacaacaacaacaacaacaacaacaacaacaacaacaacaacagaggtaaggttatccaatatttgcgctatatcagtagatagatgcacacagcacaactttatcgagcagcagtggagaaaaggaattttggagccttggaggatgtaaataggctaaccataaaccatggattgcacctcatcttcttcatacatacaggatatccaattaccgggccttgtaaaccagatcgaggcccgccgggcccaggcctgctagtggtatcaagcttgtacatctgccagatttttttaaaaaaactactcctatattggtgctccatatataaaggaagctttaacgaaggcgcagcacaataagccaagacaaacgacagggaatccacatcatccgtcggtctctcctagtacacacgcggccacacccaatcaaagaaaaggtaataagcccgcatcatgattcccagggaatattgccattacaccctactaccactagtgcctgcctactaatgtccatcgccagtcgtcaccatgagcagcgcagcgaaaagaaaagaaaagaaaaatctatggggggtagatctggtccgcacggccggcagcgtgggggcgggggccgcgcgccctggtctaatcatcgccttcccgaattaggttccgcgtccacgcgatggcgcgcctactgtttcccaatctggcccacagttagggatggcaacggggaattccccgtcgggttttggttccgcgtccgcttaaattataattagatcgtacttcatttgttattaatgtaaaacattttcgcttatacacattgttagatgcaaaaatcattatgtgtacattaaaatgaacgcatttatataactagtgatctcttggcaagataattatttatttttatcattaactattatatgaaaacgtcgtcacatgtaagtttaacgggtccccgcggggaacggggatggggaatgcttccccatccccatccccgtttacccgtcgggggagaaattttccccgtttacatccccgtgggggaagaaatttccccatccccgtcccctaatagaggaattccccacggggaatcgggaatcgggtccccattgccatctctacccacagtccggtacggttccgttgctcgtgctctctactccctctggggcgggcaacgtgcgtgggatggtgcaatcacgcccggcccggcccgggtacgagtacgacgcccaccactcgcggttggtgaaatgtggcgcacgcgggtacagaccgaccacccccacccccacccccactacgctggccggctgtgcgcgtgcagccaacgtggggaagagcagaggtcgctgtaggctgcttgcctgtaccaatcgatcggatcgcatatgggccggccggccggaatgagcttctgcgccagccaagccaagtgacgctgccgtggcgatggctggatgatctccctgggcgctagcttttgcgtcgagatcatcatcgtactgacggccagacacgggcgcgcgggatgggtgcccgcagggcgcaggcagttgggacggaaccgtacgggtgcccagctggaggtgacggttcgcgtcacatgcacatgcgtgcgcgcgtacgtacgtcgtgtcgagtcacatgttgcgtcgtccgactgtgtttacgcatatgcccgcgtactgagagagagactgacgcagctccggaactcgcagtcgcggccatgccttgcctggcggcatcacggcaacgcaacgctactgcatgctttgcgtgcgttgatcgctcgtatattgatgcttcttgctgcagctactgcctggcgaaaaagcccacaatatcatctccaagggaataataattattcataattcatcttggagtattatcacaccgtcgccgtcgccaaggattgtttttgttgttgggccctactggagattaagtgcaaatgtagcatgggtcgccattatattggagtcgccctcgatcgctcgtcatgcacaatcgatgatgcagcccccaaattttgcttctctccttgcaactggtggtcttgggaacctgacccttgccacttgttgctggaacacgattcaacccttcttatcctgataattgttgggtgtgtcctctacagccggtcaatagagactggattgggcttaacccaactatcgttcctttaatcgggcccttgatcgggagggcccatgctaacctcggttggagcccccagacacacgatgctatatatataggactaaggggtcgcaggaaagactaacgctagtacctcgccccaaaaccctagtcctcagaggcccccatcgcctaggcgtcggagtgtttggaaacgcgacaacctacagcggctcggatcccaatgcctgctacttctctgcagggcgacggtatgaagatagcaacaacaacaaaggtgtgtttccccgttcctctcaatagatcagtagatcagatctacacgtcatcaaggttttactttcagttacggattggtattctagggacttaggaatcgatcctagatagaatagattctaacaatggtatcagaggcgtcctaagaaacctagatctcctaatccgcatcagtcttatgatccgcatcagtcttatgagatcacagaaaggtctcgaatcaatatgaatgaactcattttttttatcatcgtt

SEQ ID NO: 78102 - DNA, 3179 bp, Zea Mays
acacccgtcacacttgaccctatcccgatttcaaacgcacgccgcgcatagcccgcagccccgcacccgcaacgtcttctgacgccgcggaccccgcccgcccgcgtccgcagaatctccgcatcagcctccgcacgcacggatttgtaagcatcccacatccagcaagagtccacctcactgcctccgcccgcccctccgccacggcgcccacccaccgccactcccctaaaaccctcaccaccgccacggcgccacccccgctttctagtaccattccctaagcgccgccgctcgcccgcggcggtaccccgtcctcgcgatgtcgtcgacctccggcgctctgccgcagcctcgccgcgggcgtcccggtccctggcccccggcgccgcccccgcagccgcaggcgcagccgctctcctgggctaagcgcacaggtttccagtcccgcgtctccggcgagtcactgccttcgtcttccgcccacaactccggtcaggcccccctccctcgccctgctgaggccccttccgatctggagtcgggcccgccggcccggcccagctccaccctcccggcccctccggccgccgcgggaaatggcgagcggcagcatcccccaccgccgcctcctcaggcgaggacgaggaggagggactccgatagcggaaggccgaatgggcagatagccgcgccttcgcttccgcagctacaggaggaggaggaggcgccggagcggccggctcatgtgaagtacgagctccgtgacactccaggaatatttcctctggtggtatacggattccagcattatatttccatggtcggttcaatcatcctgattcctctcgtgatggtccctgctatgggtggctcggctgatgacatggcggcagtggtatccacagtgttgctcgtcaccggggtgactacattgctgcacatgtttgttggaacgagactgccacttgtgcagggtccatcctttgtatacctggctcctgcgcttgcgatcatcaactcaccagaattatttgggatcaatgataataattttaaacacataatgaagcacctgcagggagctataataattggaggtgcattccaagtgtttttgggatacacaggcctcatgtcactatttcttaggttgataaatccagttgttgtctcgccaacagtggcagctgttgggctttcatttttcagttatggtttcacgaaaattgggacatgtatagagatgggaattctgcagttattgatggtggttatttttgcactttacctccggaaaataaagctatttgggtacagagtgtttcttatttatgcggttcctcttggattaggaatcacatgggctgttgctttcgttctcacagcaactggagtttatagctacaaaggttgtgatgcaaatattcctgcctcaaataatgtatcagccttttgtcggaagcatgtattgaggatgagatcttgccgtgtagacacttcgcatgccttaagatcttcaccctggttcagatttccctatccattgcagtggggaactccagttttttcctggaaaatgggccttgtgatgtgtgttgtatcagttattgcttctgttgattctgtaagttgatgactcctctgaagtttgatcctaactacaatattttgcacggtgtctttaagtttcataataaatttgcactgcattatgtggattggatctgccccagtagcacactaccttcatttgtaaactcctttatcaacttggcataggccttcttcttgggcacatgttttgctctgctaatggttcctggaaattagctagcttagtaacgacagtgtcttcttataattaaaagttcagaagcaaccatttgactccagtatacttattgttcaagtttgtctctcctaacaatatgtttgtgccttttcaacttaaggtcggttcctaccatgcatcgtctttgtttgtggctacccggccaccaacctctggagttgttagcagaggcattggtgttgagggtgtatctacagtcttggctggcctttgggggacaggagttggttctgcaacaataacagagaatgtacacacaattgctgtgactaaaatgggtagtcgacgagcagttggattcggtgctattttacttatactgctttctattgttggaaaagtcggtgcattcattgcttctattcctgatgttatggttgctgctctcctttgcttcatgtgggctatgctctgtgctcttggcttgtccaatcttcgttacagtgctactggaagctccagaaacagtattatagttgggctggctttattcttgtccctatcagttccttcttacttccagcagtacggtgtacatcctagcgcaaactcatcagtgccaacttactttcaaccatacgttgttgcatctcatggacctgttcacactggatcgggcggggtgaactatgtcctcaacacgatactttcactcaacatggccattgcgtttctggttgctctggtacttgacaacacagtccctggtggtcgtcaagagcggggattgtatgtatggtcagaagcagaggcagcgatgagagaatcgactttcatgaaagactatgaacttcctttcaagatcggacgcccgttcaggtgggtgaagtgtgttggtctataacacaattttgggtagtttgtagctgtggcaaactttgaagatctcaagctttcatgaatcatgactgatcgtttctcgacaaggctggtgtataggttatttagcatgtcttgattctgatgtatctaattttcagatacgtttgagactgctgtatatcatcgctgacggtcctattatttagatggttttagggatatcaatttgtacaggtccagttaaaaaaaaactgagctaccacacctgaactcatatctggtttgaagtcaatagttatcccgaaaccgcactttcataaagtacagccgtgcagaatttgcatctcatacagccgtgcagaattttcataaagtcggctttgcaaatgatcgttgtcacctctgaggctgtgacctgtcaataggaatgcaagttccagacttccaggggttttggataagttttgggtcatcaattgaagatttgctaaaataaacaaaa

SEQ ID NO: 78103 - DNA, 625 bp, Zea Mays
gccaaaccgcctaagaagcgttggatcaagtcgtgtgccgtcagatctcgccactgcgaggggaaagatgagtgcttatatatttttttcattaggatatgtttggacacaagaagaatctgattgggtacctaaccaggttattctaaagttaaatcgtgcaacttttttgtgttatgtggatcccaaaaggttagttagttcccttcctatttctgtcacatttatacattttctcactctactggtgaactaaaacaattaccaagcacaaatgctctcatagttttgattccatactgaaagggaaatgagcccttgggccatttctaagtattttggtgattgagtgcaaacacaagtgcttaaatgtgaatctatgcccatggatgaacaaagtgcaaatcatgagtaaaggtatgtttctaagccttagtacattggttttgtgtactaatatacttgtctaagtgttagaaacaggagaaaacgagtcagagaagagttggctgtgtacagccaaaaggctgtttcggtctggggcaccggactgtccggtggtgcaccggacagtgtccggtgtgccaggctgcctcgggcgaagaggccgctctcgggaatttgc

SEQ ID NO: 78104 - DNA, 1873 bp, Zea Mays
cgacacgaaattcccgcgcgcgcggaccatgatgcgcgagaccaggagcaggagggcaggcagggctccggcgagaactgccgcaggcaccaggaccacacagcctgacagacacccggcgatcggcgtgccacacacgtagaaaccactgcagaagtggccaaagcgctgtggccgcagcccgcttgcgaggcgcactggcactccgcagctgacgacgacccggcagtccggcacaccgcctctttccgtgtaggctggccgccgccaccagctcgaaaccatggaagtcgcggccgtggcgtgccgcgccgggctgcttgcgcgggcccgtccaagcagcagggcgcgtacgtgggccgttgccgtcggccccgccccgtccgccgctagaagaaggttgctcgtcgcgtcgctcggggtcggggagccactcccggcgcaatccctgggcgaggaggccgtggcgctggaggtaatccgattccgatgccgtcttgccgtgggtgaggaggaggatgatctgaactccattgtttccgtcgaaaacctgcctcccgctgctgctcacgttcctgaggcaaggaggacaacagtgcgcgtcaggttcgtgctgaggaagcagtgcgccttcggccaccagttcctcgtcgccggcgacgacgcggcgctcgggctttgggatccagctaaggcgatctccttggtttggtcagaaggccacgtctggacggcgaacacggatttgccggcgaacaggtcgatcgagttcaagttcttgctgcgagatgcctcggggcatgcgcattggcagcacggcgctaacagaactctgcgaattactactgaaaccccaaacaccgtagttgtccacgaagactgggatcacggcaacaaacagaaagtgtcagaggaggaagagctctccatcggggaagatgtgatgtttccagatgatcttgcgggaacagatggcgcaagcgcaatgccggcagataatcccgagaagcatcagaatgtggagactgacagtgacaggtcggctgcggtggttgcagatgctcctccgcagcaggaaatggtagcagcaaacggaacgggccaaccgcagctggtggtggacgggcacaagacgattcttgaagaggtccccggagaagaaaacggcaccctttctgccgccaattatgctggtaatggcagcatcgacgacgatgacgacgacgacactaccttgtatcagggaggtgatgtgctaccgaacaggccgacaagtatatttgagaacgacttggcttgggccgggaaagccatgcagcagctgctccgggtcctcggtttccagatcggcacaacaagaacgtgaggttcagcttcagatgccgttgtgtgtatatgttgcaaaccttcaactcacttctctacgcagaaagaaacgtcggtgctgaggattgtaactgaaactccagtaacagcagcaaacatcagctgtcttcccccctgcactgtgttgcatatagcaattactaggagataaacaactggcactgcaagtatgttcagtttagaaacaatgactaataaggtgagagtcatcgacttcttatccgcttgtcgtgaaggcaggctccatctgtactgtacaacatggcaaatgtaagttcggtacaaagtcgaatatgtggagcagtggatgtactcttctaaaagaaaagggtgatgcacttctggtaaaccaatgacatctgtaacggtgaaaatgagctgttggctgttgccctcacattctatccttcttgaatattacactagaacattaggtgcccatttgggcgccctacagtggtttaaggcagaagataatgtggagcca

SEQ ID NO: 78105 - DNA, 1842 bp, Zea Mays
cgacacgaaattcccgcgcgcgcggaccatgatgcgcgagaccaggagcaggagggcaggcagggctccggcgagaactgccgcaggcaccaggaccacacagcctgacagacacccggcgatcggcgtgccacacacgtagaaaccactgcagaagtggccaaagcgctgtggccgcagcccgcttgcgaggcgcactggcactccgcagctgacgacgacccggcagtccggcacaccgcctctttccgtgtaggctggccgccgccaccagctcgaaaccatggaagtcgcggccgtggcgtgccgcgccgggctgcttgcgcgggcccgtccaagcagcagggcgcgtacgtgggccgttgccgtcggccccgccccgtccgccgctagaagaaggttgctcgtcgcgtcgctcggggtcggggagccactcccggcgcaatccctgggcgaggaggccgtggcgctggaggtgggtgaggaggaggatgatctgaactccattgtttccgtcgaaaacctgcctcccgctgctgctcacgttcctgaggcaaggaggacaacagtgcgcgtcaggttcgtgctgaggaagcagtgcgccttcggccaccagttcctcgtcgccggcgacgacgcggcgctcgggctttgggatccagctaaggcgatctccttggtttggtcagaaggccacgtctggacggcgaacacggatttgccggcgaacaggtcgatcgagttcaagttcttgctgcgagatgcctcggggcatgcgcattggcagcacggcgctaacagaactctgcgaattactactgaaaccccaaacaccgtagttgtccacgaagactgggatcacggcaacaaacagaaagtgtcagaggaggaagagctctccatcggggaagatgtgatgtttccagatgatcttgcgggaacagatggcgcaagcgcaatgccggcagataatcccgagaagcatcagaatgtggagactgacagtgacaggtcggctgcggtggttgcagatgctcctccgcagcaggaaatggtagcagcaaacggaacgggccaaccctggtggtggacgggcacaagacgattcttgaagaggtccccggagaagaaaacggcaccctttctgccgccaattatgctggtaatggcagcatcgacgacgatgacgacgacgacactaccttgtatcagggaggtgatgtgctaccgaacaggccgacaagtatatttgagaacgacttggcttgggccgggaaagccatgcagcagctgctccgggtcctcggtttccagatcggcacaacaagaacgtgaggttcagcttcagatgccgttgtgtgtatatgttgcaaaccttcaactcacttctctacgcagaaagaaacgtcggtgctgaggattgtaactgaaactccagtaacagcagcaaacatcagctgtcttcccccctgcactgtgttgcatatagcaattactaggagataaacaactggcactgcaagtatgttcagtttagaaacaatgactaataaggtgagagtcatcgacttcttatccgcttgtcgtgaaggcaggctccatctgtactgtacaacatggcaaatgtaagttcggtacaaagtcgaatatgtggagcagtggatgtactcttctaaaagaaaagggtgatgcacttctggtaaaccaatgacatctgtaacggtgaaaatgagctgttggctgttgccctcacattctatccttcttgaatattacactagaacattaggtgcccatttgggcgccctacagtggtttaaggcagaagataatgtggagcca

SEQ ID NO: 78106 - DNA, 1859 bp, Zea Mays
caacgaacggcgggagcagacgggcacgacacgaaattcccgcgcgcgcggaccatgatgcgcgagaccaggagcaggagggcaggcagggctccggcgagaactgccgcaggcaccaggaccacacagcctgacagacacccggcgatcggcgtgccacacacgtagaaaccactgcagaagtggccaaagcgctgtggccgcagcccgcttgcgaggcgcactggcactccgcagctgacgacgacccggcagtccggcacaccgcctctttccgtgtaggctggccgccgccaccagctcgaaaccatggaagtcgcggccgtggcgtgccgcgccgggctgcttgcgcgggcccgtccaagcagcagggcgcgtacgtgggccgttgccgtcggccccgccccgtccgccgctagaagaaggttgctcgtcgcgtcgctcggggtcggggagccactcccggcgcaatccctgggcgaggaggccgtggcgctggaggtgggtgaggaggaggatgatctgaactccattgtttccgtcgaaaacctgcctcccgctgctgctcacggaggacaacagtgcgcgtcaggttcgtgctgaggaagcagtgcgccttcggccaccagttcctcgtcgccggcgacgacgcggcgctcgggctttgggatccagctaaggcgatctccttggtttggtcagaaggccacgtctggacggcgaacacggatttgccggcgaacaggtcgatcgagttcaagttcttgctgcgagatgcctcggggcatgcgcattggcagcacggcgctaacagaactctgcgaattactactgaaaccccaaacaccgtagttgtccacgaagactgggatcacggcaacaaacagaaagtgtcagaggaggaagagctctccatcggggaagatgtgatgtttccagatgatcttgcgggaacagatggcgcaagcgcaatgccggcagataatcccgagaagcatcagaatgtggagactgacagtgacaggtcggctgcggtggttgcagatgctcctccgcagcaggaaatggtagcagcaaacggaacgggccaaccgcagctggtggtggacgggcacaagacgattcttgaagaggtccccggagaagaaaacggcaccctttctgccgccaattatgctggtaatggcagcatcgacgacgatgacgacgacgacactaccttgtatcagggaggtgatgtgctaccgaacaggccgacaagtatatttgagaacgacttggcttgggccgggaaagccatgcagcagctgctccgggtcctcggtttccagatcggcacaacaagaacgtgaggttcagcttcagatgccgttgtgtgtatatgttgcaaaccttcaactcacttctctacgcagaaagaaacgtcggtgctgaggattgtaactgaaactccagtaacagcagcaaacatcagctgtcttcccccctgcactgtgttgcatatagcaattactaggagataaacaactggcactgcaagtatgttcagtttagaaacaatgactaataaggtgagagtcatcgacttcttatccgcttgtcgtgaaggcaggctccatctgtactgtacaacatggcaaatgtaagttcggtacaaagtcgaatatgtggagcagtggatgtactcttctaaaagaaaagggtgatgcacttctggtaaaccaatgacatctgtaacggtgaaaatgagctgttggctgttgccctcacattctatccttcttgaatattacactagaacattaggtgcccatttgggcgccctacagtggtttaaggcagaagataatgtggagcca

SEQ ID NO: 78107 - DNA, 1618 bp, Zea Mays
atgacccagttcttgaaggatgagggggtcgttttgtcgccggaggatgaaaataagagggagaaggtgatccgagagctcaagaagatagtgatgcattgggccaacgcggtggcttatgagcagagtgtgccccaggggctggccacagctaccgtcctgacatacgattcttacacattaggggtggggaggatggctggccagtttgccaagccaaggtccgaaccgttggaggagagggatggcgtcaagctgccaagctataggggcgacaacgtcaacggcgacgacttcaccgagaagagtcgcgtgccagacccgcagaggatgatccgcgcctactcgcagtcggtggcgacgctcaacctgctccgcgcgttggcgaccggaggttacgctgccatgcagcgcgtcacacagtggaacctcgatttcatggatcacagtgagcaagcccacatgttgtgggttggtgagcgcactcgtcaactcgatggagcgcatgttgaattcctttgtggtgttgccaaccctcttggcataaaggtgagcgacaaaatgaaccccagtgacttggtgaagctgattgagattctgaacccttcaaacaaacctggaaggatcaccataattacaaggatgggggcagagaacatgagatacagtgatctcagcaataacaatctcaacggcgatcttccatatcagcttccaccaaacgtggttgaattaaatttgggcaagaaccacctaagcgggcagttgacggatatgttttcacagcttccaaagctctcaacattgaatgtggagagcaaccaatttagtggtcatatagatgttctagcgaaacttcctctcgaggatctggattatatttgggtgtatgctaacaggcaccgtatatggtggctacgacagtcccaagctaacatacagtgggcatgtgaagatgtggcaaggcagcaacaagaaattcagaaccaggcggcctccatgctcaagcatgaagcatcacttaagcgtgatgataagactataattctgcacctccacctaggccacccgcctgccagagtggaggacgagctcctcccgtgcctttgccagctatgtgctccgagcttcgccgcctgtctccctaggccacagggaggttgtgtgggggttgcatctgacaaggccaaggcaccgtcgacaggtgcctcacctagctcaccttgcagggcttcgacaggtgcaccatcagcttcggaaggatcggagaagagtcgaggcttttgggttcgtgcaattgttgtcaatggtctcctgcaaagggaggactgggaaacagcaataaaagtgccacttgggatcatttcagcaggtactggaaatggaatggcacgatctctactgcatgctgctggtgaaccattctctatatctaatgctgtgttcgcaatcatcagaggtcataaacgtgcccttgatgttacttctgttgtgcagggaaaggcgaggttctttagtgtcctgatgcttacatggggtctggtggctgatgttgatattgaatctgagaagtataggtggatgggaagtgcccgccttgatttttatcttctactcc

SEQ ID NO: 78108 - DNA, 2626 bp, Zea Mays
tgctctcgcgttcccgcgcgaagccgaaaaccctttggcgctctgcgcgcgatcgcgcccctcccctccacgcccccgcccgcccttttcttccccacccgtctccgttccccgccatccacatccgacattcctcccccaagttctctcccatccccaaagtatcatccaatttccctccccgctagccacaatgccgactcttcgcagcgcgacggcgaacgcgtcccccgtggccaccccatcccctgccgcggcgagcacgccgcgcagcgtcaagcgccggctgacgccaggccgcgccggcgagtcgcccaaagcgtcgcggcacacctcccctcaccgatcccctcacgccggcaccggaactgtatgcattccgaagctgctctcggcgtcgcccaagtcctccaggaagcgtctctacggcgaccttgtcgcagccgagaagcccaagtggaatccccgagatgccgcgcagattagggctgtcaaggaggcgctgcacgtggcaacagtgccatcgtctgaattggtttgccgggataacgagctcaggcgtgtccttgagttctgcaaggtgtgcgtccaacaggagaaggctggtagtctctatgtctgcgggtgccctggcacagggaagacattatctattaacaaggtcaaggatagcttggtgtgttgggcagatgagatgggaatggagacacctgatgccttagcaatcaattgtacaaacctagcaaacacctcagagatttttggcaagatactaggcaaattgcagaaccaaaagaagggaagcagcaaattgttgccacttcagcaacttcagagcatgttttccaacaaggatttagctccaagaagaatgatgttggttattgtggatgagatggactacttaataacaagagaccgtgctgtgctacatgaccttttcatgcttacgacttatccattctctagatgcatactaataggaattgctaatgccatagatttagcagaccggtttcttccaaagcttgaatccttaaattgcaagcctcttgttgtgacttttcgagcatattccaaagatcaaataactgacatagttaagcataggctaaaggttcttgagtatgatgtatttgaaccactagctctggagttctgtgctagaaaagtggcggcagcctctggtgacatgagaaaagctctaggcgtatgcaggagtgctgtggaggttcttgaagcaaggctacatgattcgcctgatcaagaattaggaatagtgacatttgaccatatggatatggctttgtcaaaagcattcaagtctgctgtcgtagatagcatactgtgtcttccccagcaccaacagatggtgctgtgtgcgttggcaaatacttttcagcattgcaagaaaaaagcaactactctaggagagctcaacaaatcatacattgagatttgtagatcaacccaagttccagcagttggaatgcttgaattttctaacatgtgtatggttttgagcgatcaggggttcatgaaactagggcagtccaaggaagataagcttaggagagtaacacttcagattgatagttcagatatcacatttgcttttaagggaaatcgcttctttcaaaaatgtctggagcagccaagatgctaactagacccatagcagagagtagatcaatacacttactgttgtaatacattacagtattagtttattgacattatcaagtaccagcaatttcaacccctggatgtgctgctcaggtggtttcattcaacatggtcaaacgtaccttggttacatcatgaagctctttcttgcagtgcagggataagtacgtgggacgagttatgatagtattatgtgacacaattctcccaaagatggctgagtgttgttatgatttctcaatttttggttcttccagaactgattgatcatgtagctaaacatttaacatacaagaacatttgtttacacatttcttgcctaaaggctaaatcagtaatgagaagctgcactaatttaatgtgtctgccagatcaattgcatgcttctgatactttatacagtgacagtgacattgttgatgtaaatgcttccccccttatgtggaaatggcaatagggatgcttctcgaataaagatcaaaacaattgaacttacagcgacaatacatccactgaatgaactggttgctgtatctcgcaaatgactactttctgttgtacattgtaatttgtaattgttctctgcctttcatactactttcatcctttgtacttgcgaacgtagtcagttagatacgggttttgctgaggagtcaaacttgttctctctaactaccttttgcagtatcgagatgcgctgacaaaaattgttttgttgagataaagaaatgttttggttactccacaggctttgaaaaaggttgggccaaccccgagcttcgctgctggcttgattgggaatttgggaggatatgaatatggatggtctatggccatcaaatccgaagctcactttaggtcgtagggcagcacatctgaattctgtgcgatgaagcgttggaattttcctatttttatttaattcgcttttttgtaaaat

SEQ ID NO: 78109 - DNA, 2042 bp, Zea Mays
tgctctcgcgttcccgcgcgaagccgaaaaccctttggcgctctgcgcgcgatcgcgcccctcccctccacgcccccgcccgcccttttcttccccacccgtctccgttccccgccatccacatccgacattcctcccccaagttctctcccatccccaaagtatcatccaatttccctccccgctagccacaatgccgactcttcgcagcgcgacggcgaacgcgtcccccgtggccaccccatcccctgccgcggcgagcacgccgcgcagcgtcaagcgccggctgacgccaggccgcgccggcgagtcgcccaaagcgtcgcggcacacctcccctcaccgatcccctcacgccggcaccggaactgtatgcattccgaagctgctctcggcgtcgcccaagtcctccaggaagcgtctctacggcgaccttgtcgcagccgagaagcccaagtggaatccccgagatgccgcgcagattagggctgtcaaggaggcgctgcacgtggcaacagtgccatcgtctgaattggtttgccgggataacgagctcaggcgtgtccttgagttctgcaaggtgtgcgtccaacaggagaaggctggtagtctctatgtctgcgggtgccctggcacagggaagacattatctattaacaaggtcaaggatagcttggtgtgttgggcagatgagatgggaatggagacacctgatgccttagcaatcaattgtacaaacctagcaaacacctcagagatttttggcaagatactaggcaaattgcagaaccaaaagaagggaagcagcaaattgttgccacttcagcaacttcagagcatgttttccaacaaggatttagctccaagaagaatgatgttggttattgtggatgagatggactacttaataacaagagaccgtgctgtgctacatgaccttttcatgcttacgacttatccattctctagatgcatactaataggaattgctaatgccatagatttagcagaccggtttcttccaaagcttgaatccttaaattgcaagcctcttgttgtgacttttcgagcatattccaaagatcaaataactgacatagttaagcataggctaaaggttcttgagtatgatgtatttgaaccactagctctggagttctgtgctagaaaagtggcggcagcctctggtgacatgagaaaagctctaggcgtatgcaggagtgctgtggaggttcttgaagcaaggctacatgattcgcctgatcaagaattaggaatagtgacatttgaccatatggatatggctttgtcaaaagcattcaagtctgctgtcgtagatagcatactgtgtcttccccagcaccaacagatggtgctgtgtgcgttggcaaatacttttcagcattgcaagaaaaaagcaactactctaggagagctcaacaaatcatacattgagatttgtagatcaacccaagttccagcagttggaatgcttgaattttctaacatgtgtatggttttgagcgatcaggggttcatgaaactagggcagtccaaggaagataagcttaggagagtaacacttcagattgatagttcagatatcacatttgcttttaagggaaatcgcttctttcaaaaatgtctggagcagccaagatgctaactagacccatagcagagagtagatcaatacacttactgttgtaatacattacagtattagtttattgacattatcaagtaccagcaatttcaacccctggatgtgctgctcaggtggtttcattcaacatggtcaaacgtaccttggttacatcatgaagctctttcttgcagtgcagggataagctttgaaaaaggttgggccaaccccgagcttcgctgctggcttgattgggaatttgggaggatatgaatatggatggtctatggccatcaaatccgaagctcactttaggtcgtagggcagcacatctgaattctgtgcgatgaagcgttggaattttcctatttttatttaattcgcttttttgtaaaat

SEQ ID NO: 78110 - DNA, 1689 bp, Zea Mays
atgtatcacataatagcaatgaagagcacttgccacagctaaaactggtgctaattaatttcagctcatcgcacgctgatcaccaccgcttcaccacagcgaaccaccatggaaagattctactacgtcgccgtggccaccttcgtgctcgtcttcctgctccaccacctcttgacgaggaagaagcagcaacgtctgccacccggcccgcggttcgcgtaccccatcctcggccacctccccttgctcaagaagccgctccagacctcgttcgccgacctcgtgtcgcgccacggcccaattattcacctgcgcctcggccgccgccacgccgtcgtcgtcggctcggcggcggtggcgaaggagtgcttctccggagagctcgacgtcgcgatcgccaaccgcccgcacttcccgtccgcgcgcgaggtcaccttcgactactcggtgctcacggccgtcaactacggcgcgctctggcgcaccatgcggcgcgtctccaccgtgcacctcctctcggcccaccgcgtcaacgtcatgtcggacaccgtgatcgcccgcgagctgcgcgtcatggtgcgccgcctcgcccgcgcctccgcctccgcgccgggcgacgccgccagagtggagctgaagcggaggctgtttgacctctcccacagcgtcctcatggagatcatggcgcagaccaggaacacctactccgacgacccggaggaggacatgtccagggaggcgcgcgacatgaaggacatcatcgaagagatcatcccgctcgttggtgcggccaacctgtggaactacgtgcccctgctgcggtggctcgatctctacggcgccaagaggaagctcgcggacgtggttaaccgaagggacttgatcttcgacaacatgatcggtgcagagcggcagaagctgaggcagctggaacgcaagaaaggcgaggcccatgccagcgaatcggataagatgggcatgatcggcgtcatgttatcgctgcagaaaacagagcctgatgtctacacggacacctttatcaacgctctcgtaatctgctggccgccggcacggagacgacctcgacgactctggaatgggcaatgtcgctcttgcttaaccacccagacgtgctgaaaagggcgcaagaagagatcgagtcgaacgtcggaagggaccgtcttctcgacaagaacgacctcccccgcctgccctacctccactgcatcatcagcgagactcttcgcctctaccctcccacgccgatgctgctgccgcacgaggcgtccaccgactgcaagatccacgggtacgacgtcccggcggggtcgatggtcctcgtcaatgcgtacgccatccaccgggacccggcgatgtgggaggacccggaggagttcaggccggagcggttcgagctcggcagggcagaggggaagttcatgatgccgtttgggatggggaggcgcaggtgccccggcgagaacctcgcgatgcgaaccatggggctggtcctgggggcgctgctccaatgcttcgattggaccagggttggggatagagaagttgacatggcaacagccactggcaccattatgtcttatgctgtcccactcgaagctcagtgcaagccgcgagcgaacatgtctgctgttcttcagaaaatctagagtgagattgtgatatttctag

SEQ ID NO: 78111 - DNA, 2623 bp, Zea Mays
gtttacaaatcgaattacttcgtagttttgtctatggattgtgtgtctttttctggttatcaaaccatggtcttctatggtgtgtttcgggaggtctgtccctccatatgtggctagtcgtgtgactacttcatgtaaaaacttttggtgtattggctaatcctccaaaagaggagaagctggacaagtatccattatctaaaaaaataaagtttgcctaaaagttggtgtcgccattgcagcactagcactggtaccagctactctcacgagctgcgtgctgaggttgactccttcccgatcctgaaatataaggctaccgctcgtttcctctctctccccgactccccctcccttccatctcttcccttgcatttagcctcccgcggttcaggaggcgcgggccattcccaaccatcgttgcagtggtggcaggtattggcctgtcgagacccatgggcattcaggtcgcggcggtggtgaccccgccgccgtgctcttccccctcctcctctccggcgtcgccttcgtcctcggccattgccacgtcgccgcggcacgccgttcttggcgccaggctggcgaggagccagtcgtcgctggcttgctggaacgccggtcttggccggcggcgcggcgggcagcacgcgatcaggcgcgctctcagcgcgagcatcgacagcgtcgggagcggcggcggggaggacgaggagttcctgaggaggatccaggagctcgcggcgggtcagcacccgggcgccggcggctgcgggtggccggcgagcgtggagcggagcgcgagcagcgtcgggctgccgctgtctctgcggatgctcaaacggaggaagcagcagcagcagctggagcaggggcggtggaacgagcggctgatcgactgcgccggcgagtccgcgcgcgccgcggtgggccgtgccttctcctcgatggtgctcatcatccgggagctccagagcttcacgctgcagatgcgggaggcggtcgtctacgaggacctgcagggcgtcctggcgcgcgtccacgccgagatgcacgcctccttcgtctggctcttccagcacatcttctccggcaccccggccctcatggtctccctcatgctgctcctcgccaacttcaccgtctactccatgggcgacagcgtcgcggcggctgccagcctcgtcccaccaccccaggcagccgtggagatggtggacatccagcagcaaccggagcaacagcaatcccattcccagcagcggttcgacacccccgcgctcaagacgttctccactggccgcacggcctcagtgggtggaaacggcgacgggggcggcaaagtgcggccagttgccggcgccaccggcgacggccagtcggacgagtcgtcgcatcggcaaaacggagcggtggtgctgccgcaggacgtgtcgcagtcgcaggcgacgccactggcgtccgtgtccgactcgatggccgtggaggatgcacaagcgcaacagactgtacacgacgacgagctggccatctggaaacggatatccgatgaagccgccaggatgcaggcgagcgtgcgtgcagaggagctgatggacccggaaaccctggagcagctcgtcgcgccggtggaggcgccaaagccagacacggtccactactcgccggagcacgtggccacggcgcagaggtacgaacaggccctgtccgaggagcccaacagctcgctgctcctggcaaactttgcgcagttcctgtaccaggtgcagggcgacctcgacagggcggagcacttcttcaagagggcggtgcgcgcggagcccgcggacgcggaggcgctggggcggtacgcggcgttcctgtggcaggcgcgcgacgacctcgcggccgcggaggagacgtaccaggaggccatcgccgccgaccccggcaacgcgcaccacgcggcagcctacgcgcacttcctgtggaacacgggcggtgaggacacatgctacccgctcgactgatgcgtgcgtgcgtgcgtccaccgccgctagcgtccagcacagatcatcggtgccctgccctcccataaaaacttcaaacgaaaagaaagagaaaatggtcactccgccgccctgctgaccgctgtccactccactccctcggcaagtccaggctcttctcacggcatgtgcttcagcggccgctcgggatttcctcttcctctgtgattgctcgttttggggtaagtagtgtggagcaatggccaacggaaatccgcggctcgctgctgcttcccgatctggaaacccggccggcgactgcgagttgagaggccgggaacggcggcagcgctcggttgtcggtggggcccgtccacttggcgtcgcacggatgtttcctggtggcacttttgcacgttgtcgtcgagatttgtgagacgccgctttgttcagtggagcaggaaaaccaaatgcccgctgtctggtgaaatagatggacaagtgagtgcatctgctgcggctggaatcggaggatacagagaggagagaactggctgcgacgttcgaccaccttctatctgcacccgtatgcgaccgccgctctgctgcgcctggtgtcgacgcgcaaaatgtggttg

SEQ ID NO: 78112 - DNA, 617 bp, Zea Mays
atggcagagggcgtggtggcgggggtcgtggctcccatggccgtggctcgggccgtggcaggggaccgcgggctagaacagcgtctcggcgaggacaaggtgaagattctggagcaggcgttcatggaggcagcagataatgcgctgccacatccaatggaggatgcttacctcgaggcttgtcacacaaacaacatggaatggaaaatgtgcatatatggtgctgattgcagtgagattagcctcgtccaagttaggggatctgccatgaactagacaagattagaagtttaaagaggccttacatcaagagagtacaagatcgccataaggaagtacaagtctttgaggaaagtgaccttatgagaagcttgagaaaaatcaacttgaaagtgaccttcatgatgatacaataaattgtctcaaacgcaacactattgaaatggagggatacattcgccctcttgacgtagtcataattgtgttgcagaccagcattctgatggtgttgcagatgatcatcccagcgattccttattctctccaacataccatcatcacaaggttcgttatttgaataaataacctaacgaaaggtataaagataataaaatgga

SEQ ID NO: 78113 - DNA, 658 bp, Zea Mays
atggcagagggcgtggtggcgggggtcgtggctcccatggccgtggctcgggccgtggcaggggaccgcgggctagaacagcgtctcggcgaggacaaggtgaagattctggagcaggcgttcatggaggcagcagataatgcgctgccacatccaatggaggatgcttacctcgaggcttgtcacacaaacaacatggaatggaaaatgtgcatatatggtgctgattgcagtgagattagcctcgtccaagttaggggatctggtatgttaaaggattctgcctgccatgaactagacaagattagaagtttaaagaggccttacatcaagagagtacaagatcgccataaggaagtacaagtctttgaggaaagtgaccttatgagaagcttgagaaaaatcaacttgaaagtgaccttcatgatgatacaataaattgtctcaaacgcaacactattgaaatggagggatacattcgccctcttgacgtagtcataattgtgttgcagtatataccttgctctgatgaccagcattctgatggtgttgcagatgatcatcccagcgattccttattctctccaacataccatcatcacaaggttcgttatttgaataaataacctaacgaaaggtataaagataataaaatgga

SEQ ID NO: 78114 - DNA, 686 bp, Zea Mays
ctgatggttggatcatgatggatggattccaacttgagggacttggattaaattagactcttaagcacattgagatatgtttggactggatggtggactttctgtagtaggattataattggattcctttgttaggatttggattttggtccaatcccccctaataagctgaagatcatgcttgctgtggagcctttgataccatcagagggaccaaagattggagagcacatttcggttacacggaatggaaaatgtgcatatatggtgctgattgcagtgagattagcctcgtccaagttaggggatctggtatgttaaaggattctgcctgccatgaactagacaagattagaagtttaaagaggccttacatcaagagagtacaagatcgccataaggaagtacaagtctttgaggaaagtgaccttatgagaagcttgagaaaaatcaacttgaaagtgaccttcatgatgatacaataaattgtctcaaacgcaacactattgaaatggagggatacattcgccctcttgacgtagtcataattgtgttgcagaccagcattctgatggtgttgcagatgatcatcccagcgattccttattctctccaacataccatcatcacaaggttcgttatttgaataaataacctaacgaaaggtataaagataataaaatgga

SEQ ID NO: 78115 - DNA, 1898 bp, Zea Mays
gtcgcggctctcgcgcggcggctcctcacccgccgtcggtcgctcctcacccgccccacgcctgaccagcgccattactcctcatcccgcaggcagtctcgggtccctgttcccgctgtcgctcgtggcccgctccaccagcacgcaggcatcaccctcggccacggcctccgaccaccagccacgcttcgccgctaaccccctcgcggcggcttccattcggtccctgccctccacgccattctcttcctgacctcgccttcaagttcatgtccccgtcgtcgcccatgggcctgctccatcggcccgcctcaccctcggccacggcctccaaccgtcggccctgtttcaccgccgactgcacgccctgccctgtgccggctcttgccctcccctgactcgtcggccccgtttcgccgccgaccgcacacgctaccgtgcgccggctcctgccctctcctaacttgaggctgtcaaaccacggaagtggcttaatccaacggattgggggaggagagcctggtgccgttcgagattggggcctcatgaggtaaattcagaagcaaggatggcgacgacgatgaccccgacgacatcgtccccatggacacccaaggtcactggagtggagtgggtgacataccaagcacaaagcaactagactttctcatccgaaccatcatgtgacctccatagaccactggcgtcaaagatgaagcaagataatgtcatttcacttgtctctacgaccatggcacaacctggcatggtgtttcatttaataggtcactggagtggagtgggtgacataccaagcacaaagcaaaggcatatgtagggtgatgatgatgccgtagtgatgggccttgaggtagagcacggaggcagtaacgtagcggagtgcaacaagcagtagctagacaatataggcattgaccaagtagaggttaatacagacaccaacagctccgggccaggaccatgttgtgtacctcaatatggtcatgacttggagttctgcagtgaggatcatgtggagtgtccagtgcctgatggatgaaggctaacattggagtttcacagtgagtagttttgcggagagctctggctggagatctgacatgatagatgagatgagagagtcagcttcgcttggtggtcaagttgcctgtgatggggaaggggaagagtaagacgccttcctgagatggttgggtcacgatgaatgcgatggctgatggttggatcatgatggatggattccaacttgagggacttggattaaattagactcttaagcacattgagatatgtttggactggatggtggactttctgtagtaggattataattggattcctttgttaggatttggattttggtccaatcccccctaataagctgaagatcatgcttgctgtggagcctttgataccatcagagggaccaaagattggagagcacatttcggttacacggaatggaaaatgtgcatatatggtgctgattgcagtgagattagcctcgtccaagttaggggatctgccatgaactagacaagattagaagtttaaagaggccttacatcaagagagtacaagatcgccataaggaagtacaagtctttgaggaaagtgaccttatgagaagcttgagaaaaatcaacttgaaagtgaccttcatgatgatacaataaattgtctcaaacgcaacactattgaaatggagggatacattcgccctcttgacgtagtcataattgtgttgcagaccagcattctgatggtgttgcagatgatcatcccagcgattccttattctctccaacataccatcatcacaaggttcgttatttgaataaataacctaacgaaaggtataaagataataaaatgga

SEQ ID NO: 78116 - DNA, 1129 bp, Zea Mays
gtcgcggctctcgcgcggcggctcctcacccgccgtcggtcgctcctcacccgccccacgcctgaccagcgccattactcctcatcccgcaggcagtctcgggtccctgttcccgctgtcgctcgtggcccgctccaccagcacgcaggcatcaccctcggccacggcctccgaccaccagccacgcttcgccgctaaccccctcgcggcggcttccattcggtccctgccctccacgccattctcttcctgacctcgccttcaagttcatgtccccgtcgtcgcccatgggcctgctccatcggcccgcctcaccctcggccacggcctccaaccgtcggccctgtttcaccgccgactgcacgccctgccctgtgccggctcttgccctcccctgactcgtcggccccgtttcgccgccgaccgcacacgctaccgtgcgccggctcctgccctctcctaacttggctgtcaaaccacggaagtggcttaatccaacggattgggggaggagagcctggtgccgttcgagattggggcctcatgaggtaaattcagaagcaaggatggcgacgacgatgaccccgacgacatcgtccccatggacacccaagctgaagatcatgcttgctgtggagcctttgataccatcagagggaccaaagattggagagcacatttcggttacacggaatggaaaatgtgcatatatggtgctgattgcagtgagattagcctcgtccaagttaggggatctgccatgaactagacaagattagaagtttaaagaggccttacatcaagagagtacaagatcgccataaggaagtacaagtctttgaggaaagtgaccttatgagaagcttgagaaaaatcaacttgaaagtgaccttcatgatgatacaataaattgtctcaaacgcaacactattgaaatggagggatacattcgccctcttgacgtagtcataattgtgttgcagtatataccttgctctgatgaccagcattctgatggtgttgcagatgatcatcccagcgattccttattctctccaacataccatcatcacaaggttcgttatttgaataaataacctaacgaaaggtataaagataataaaatgga

SEQ ID NO: 78117 - DNA, 2016 bp, Zea Mays
gtcgcggctctcgcgcggcggctcctcacccgccgtcggtcgctcctcacccgccccacgcctgaccagcgccattactcctcatcccgcaggcagtctcgggtccctgttcccgctgtcgctcgtggcccgctccaccagcacgcaggcatcaccctcggccacggcctccgaccaccagccacgcttcgccgctaaccccctcgcggcggcttccattcggtccctgccctccacgccattctcttcctgacctcgccttcaagttcatgtccccgtcgtcgcccatgggcctgctccatcggcccgcctcaccctcggccacggcctccaaccgtcggccctgtttcaccgccgactgcacgccctgccctgtgccggctcttgccctcccctgactcgtcggccccgtttcgccgccgaccgcacacgctaccgtgcgccggctcctgccctctcctaacttggtcggcaccaactttgcaacttacaggtgatttgtccaaggagatggatttactgagcagtggtacatcttttgaagaggctgtcaaaccacggaagtggcttaatccaacggattgggggaggagagcctggtgccgttcgagattggggcctcatgaggtaaattcagaagcaaggatggcgacgacgatgaccccgacgacatcgtccccatggacacccaaggtcactggagtggagtgggtgacataccaagcacaaagcaactagactttctcatccgaaccatcatgtgacctccatagaccactggcgtcaaagatgaagcaagataatgtcatttcacttgtctctacgaccatggcacaacctggcatggtgtttcatttaataggtcactggagtggagtgggtgacataccaagcacaaagcaaaggcatatgtagggtgatgatgatgccgtagtgatgggccttgaggtagagcacggaggcagtaacgtagcggagtgcaacaagcagtagctagacaatataggcattgaccaagtagaggttaatacagacaccaacagctccgggccaggaccatgttgtgtacctcaatatggtcatgacttggagttctgcagtgaggatcatgtggagtgtccagtgcctgatggatgaaggctaacattggagtttcacagtgagtagttttgcggagagctctggctggagatctgacatgatagatgagatgagagagtcagcttcgcttggtggtcaagttgcctgtgatggggaaggggaagagtaagacgccttcctgagatggttgggtcacgatgaatgcgatggctgatggttggatcatgatggatggattccaacttgagggacttggattaaattagactcttaagcacattgagatatgtttggactggatggtggactttctgtagtaggattataattggattcctttgttaggatttggattttggtccaatcccccctaataagctgaagatcatgcttgctgtggagcctttgataccatcagagggaccaaagattggagagcacatttcggttacacggaatggaaaatgtgcatatatggtgctgattgcagtgagattagcctcgtccaagttaggggatctggtatgttaaaggattctgcctgccatgaactagacaagattagaagtttaaagaggccttacatcaagagagtacaagatcgccataaggaagtacaagtctttgaggaaagtgaccttatgagaagcttgagaaaaatcaacttgaaagtgaccttcatgatgatacaataaattgtctcaaacgcaacactattgaaatggagggatacattcgccctcttgacgtagtcataattgtgttgcagtatataccttgctctgatgaccagcattctgatggtgttgcagatgatcatcccagcgattccttattctctccaacataccatcatcacaaggttcgttatttgaataaataacctaacgaaaggtataaagataataaaatgga

SEQ ID NO: 78118 - DNA, 1211 bp, Zea Mays
gtcgcggctctcgcgcggcggctcctcacccgccgtcggtcgctcctcacccgccccacgcctgaccagcgccattactcctcatcccgcaggcagtctcgggtccctgttcccgctgtcgctcgtggcccgctccaccagcacgcaggcatcaccctcggccacggcctccgaccaccagccacgcttcgccgctaaccccctcgcggcggcttccattcggtccctgccctccacgccattctcttcctgacctcgccttcaagttcatgtccccgtcgtcgcccatgggcctgctccatcggcccgcctcaccctcggccacggcctccaaccgtcggccctgtttcaccgccgactgcacgccctgccctgtgccggctcttgccctcccctgactcgtcggccccgtttcgccgccgaccgcacacgctaccgtgcgccggctcctgccctctcctaacttggtcggcaccaactttgcaacttacaggtgatttgtccaaggagatggatttactgagcagtggtacatcttttgaagaggctgtcaaaccacggaagtggcttaatccaacggattgggggaggagagcctggtgccgttcgagattggggcctcatgaggtaaattcagaagcaaggatggcgacgacgatgaccccgacgacatcgtccccatggacacccaagctgaagatcatgcttgctgtggagcctttgataccatcagagggaccaaagattggagagcacatttcggttacacggaatggaaaatgtgcatatatggtgctgattgcagtgagattagcctcgtccaagttaggggatctggtatgttaaaggattctgcctgccatgaactagacaagattagaagtttaaagaggccttacatcaagagagtacaagatcgccataaggaagtacaagtctttgaggaaagtgaccttatgagaagcttgagaaaaatcaacttgaaagtgaccttcatgatgatacaataaattgtctcaaacgcaacactattgaaatggagggatacattcgccctcttgacgtagtcataattgtgttgcagaccagcattctgatggtgttgcagatgatcatcccagcgattccttattctctccaacataccatcatcacaaggttcgttatttgaataaataacctaacgaaaggtataaagataataaaatgga

SEQ ID NO: 78119 - DNA, 1230 bp, Zea Mays
gtcgcggctctcgcgcggcggctcctcacccgccgtcggtcgctcctcacccgccccacgcctgaccagcgccattactcctcatcccgcaggcagtctcgggtccctgttcccgctgtcgctcgtggcccgctccaccagcacgcaggcatcaccctcggccacggcctccgaccaccagccacgcttcgccgctaaccccctcgcggcggcttccattcggtccctgccctccacgccattctcttcctgacctcgccttcaagttcatgtccccgtcgtcgcccatgggcctgctccatcggcccgcctcaccctcggccacggcctccaaccgtcggccctgtttcaccgccgactgcacgccctgccctgtgccggctcttgccctcccctgactcgtcggccccgtttcgccgccgaccgcacacgctaccgtgcgccggctcctgccctctcctaacttggtcggcaccaactttgcaacttacaggtgatttgtccaaggagatggatttactgagcagtggtacatcttttgaagaggctgtcaaaccacggaagtggcttaatccaacggattgggggaggagagcctggtgccgttcgagattggggcctcatgaggtaaattcagaagcaaggatggcgacgacgatgaccccgacgacatcgtccccatggacacccaagctgaagatcatgcttgctgtggagcctttgataccatcagagggaccaaagattggagagcacatttcggttacacggaatggaaaatgtgcatatatggtgctgattgcagtgagattagcctcgtccaagttaggggatctggtatgttaaaggattctgcctgccatgaactagacaagattagaagtttaaagaggccttacatcaagagagtacaagatcgccataaggaagtacaagtctttgaggaaagtgaccttatgagaagcttgagaaaaatcaacttgaaagtgaccttcatgatgatacaataaattgtctcaaacgcaacactattgaaatggagggatacattcgccctcttgacgtagtcataattgtgttgcagtatataccttgctctgatgaccagcattctgatggtgttgcagatgatcatcccagcgattccttattctctccaacataccatcatcacaaggttcgttatttgaataaataacctaacgaaaggtataaagataataaaatgga

SEQ ID NO: 78120 - DNA, 918 bp, Zea Mays
gtcgcggctctcgcgcggcggctcctcacccgccgtcggtcgctcctcacccgccccacgcctgaccagcgccattactcctcatcccgcaggcagtctcgggtccctgttcccgctgtcgctcgtggcccgctccaccagcacgcaggcatcaccctcggccacggcctccgaccaccagccacgcttcgccgctaaccccctcgcggcggcttccattcggtgatttgtccaaggagatggatttactgagcagtggtacatcttttgaagaggctgtcaaaccacggaagtggcttaatccaacggattgggggaggagagcctggtgccgttcgagattggggcctcatgaggtaaattcagaagcaaggatggcgacgacgatgaccccgacgacatcgtccccatggacacccaagctgaagatcatgcttgctgtggagcctttgataccatcagagggaccaaagattggagagcacatttcggttacacggaatggaaaatgtgcatatatggtgctgattgcagtgagattagcctcgtccaagttaggggatctgccatgaactagacaagattagaagtttaaagaggccttacatcaagagagtacaagatcgccataaggaagtacaagtctttgaggaaagtgaccttatgagaagcttgagaaaaatcaacttgaaagtgaccttcatgatgatacaataaattgtctcaaacgcaacactattgaaatggagggatacattcgccctcttgacgtagtcataattgtgttgcagaccagcattctgatggtgttgcagatgatcatcccagcgattccttattctctccaacataccatcatcacaaggttcgttatttgaataaataacctaacgaaaggtataaagataataaaatgga

SEQ ID NO: 78121 - DNA, 1057 bp, Zea Mays
gtcgcggctctcgcgcggcggctcctcacccgccgtcggtcgctcctcacccgccccacgcctgaccagcgccattactcctcatcccgcaggcagtctcgggtccctgttcccgctgtcgctcgtggcccgctccaccagcacgcaggcatcaccctcggccacggcctccgaccaccagccacgcttcgccgctaaccccctcgcggcggcttccattcggtccctgccctccacgccattctcttcctgacctcgccttcaagttcatgtccccgtcgtcgcccatgggcctgctccatcggcccgcctcaccctcggccacggcctccaaccgtcggccctgtttcaccgccgactgcacgccctgccctgtgccggctcttgccctcccctgactcgtcggccccgtttcgccgccgaccgcacacgctaccgtgcgccggctcctgccctctcctaacttgaggctgtcaaaccacggaagtggcttaatccaacggattgggggaggagagcctggtgccgttcgagattggggcctcatgaggtaaattcagaagcaaggatggcgacgacgatgaccccgacgacatcgtccccatggacacccaaggaatggaaaatgtgcatatatggtgctgattgcagtgagattagcctcgtccaagttaggggatctggtatgttaaaggattctgcctgccatgaactagacaagattagaagtttaaagaggccttacatcaagagagtacaagatcgccataaggaagtacaagtctttgaggaaagtgaccttatgagaagcttgagaaaaatcaacttgaaagtgaccttcatgatgatacaataaattgtctcaaacgcaacactattgaaatggagggatacattcgccctcttgacgtagtcataattgtgttgcagaccagcattctgatggtgttgcagatgatcatcccagcgattccttattctctccaacataccatcatcacaaggttcgttatttgaataaataacctaacgaaaggtataaagataataaaatgga

SEQ ID NO: 78122 - DNA, 1069 bp, Zea Mays
gcaggctctccgtcggtcgcggctctcgcgcggcggctcctcacccgccgtcggtcgctcctcacccgccccacgcctgaccagcgccattactcctcatcccgcaggcagtctcgggtccctgttcccgctgtcgctcgtggcccgctccaccagcacgcaggcatcaccctcggccacggcctccgaccaccagccacgcttcgccgctaaccccctcgcggcggcttccattcggtccctgccctccacgccattctcttcctgacctcgccttcaagttcatgtccccgtcgtcgcccatgggcctgctccatcggcccgcctcaccctcggccacggcctccaaccgtcggccctgtttcaccgccgactgcacgccctgccctgtgccggctcttgccctcccctgactcgtcggccccgtttcgccgccgaccgcacacgctaccgtgcgccggctcctgccctctcctaacttgaggctgtcaaaccacggaagtggcttaatccaacggattgggggaggagagcctggtgccgttcgagattggggcctcatgaggtaaattcagaagcaaggatggcgacgacgatgaccccgacgacatcgtccccatggacacccaaggaatggaaaatgtgcatatatggtgctgattgcagtgagattagcctcgtccaagttaggggatctgccatgaactagacaagattagaagtttaaagaggccttacatcaagagagtacaagatcgccataaggaagtacaagtctttgaggaaagtgaccttatgagaagcttgagaaaaatcaacttgaaagtgaccttcatgatgatacaataaattgtctcaaacgcaacactattgaaatggagggatacattcgccctcttgacgtagtcataattgtgttgcagtatataccttgctctgatgaccagcattctgatggtgttgcagatgatcatcccagcgattccttattctctccaacataccatcatcacaaggttcgttatttgaataaataacctaacgaaaggtataaagataataaaatgga

SEQ ID NO: 78123 - DNA, 1941 bp, Zea Mays
tagagatgtccgcaggctctccgtcggtcgcggctctcgcgcggcggctcctcacccgccgtcggtcgctcctcacccgccccacgcctgaccagcgccattactcctcatcccgcaggcagtctcgggtccctgttcccgctgtcgctcgtggcccgctccaccagcacgcaggcatcaccctcggccacggcctccgaccaccagccacgcttcgccgctaaccccctcgcggcggcttccattcggtccctgccctccacgccattctcttcctgacctcgccttcaagttcatgtccccgtcgtcgcccatgggcctgctccatcggcccgcctcaccctcggccacggcctccaaccgtcggccctgtttcaccgccgactgcacgccctgccctgtgccggctcttgccctcccctgactcgtcggccccgtttcgccgccgaccgcacacgctaccgtgcgccggctcctgccctctcctaacttggctgtcaaaccacggaagtggcttaatccaacggattgggggaggagagcctggtgccgttcgagattggggcctcatgaggtaaattcagaagcaaggatggcgacgacgatgaccccgacgacatcgtccccatggacacccaaggtcactggagtggagtgggtgacataccaagcacaaagcaactagactttctcatccgaaccatcatgtgacctccatagaccactggcgtcaaagatgaagcaagataatgtcatttcacttgtctctacgaccatggcacaacctggcatggtgtttcatttaataggtcactggagtggagtgggtgacataccaagcacaaagcaaaggcatatgtagggtgatgatgatgccgtagtgatgggccttgaggtagagcacggaggcagtaacgtagcggagtgcaacaagcagtagctagacaatataggcattgaccaagtagaggttaatacagacaccaacagctccgggccaggaccatgttgtgtacctcaatatggtcatgacttggagttctgcagtgaggatcatgtggagtgtccagtgcctgatggatgaaggctaacattggagtttcacagtgagtagttttgcggagagctctggctggagatctgacatgatagatgagatgagagagtcagcttcgcttggtggtcaagttgcctgtgatggggaaggggaagagtaagacgccttcctgagatggttgggtcacgatgaatgcgatggctgatggttggatcatgatggatggattccaacttgagggacttggattaaattagactcttaagcacattgagatatgtttggactggatggtggactttctgtagtaggattataattggattcctttgttaggatttggattttggtccaatcccccctaataagctgaagatcatgcttgctgtggagcctttgataccatcagagggaccaaagattggagagcacatttcggttacacggaatggaaaatgtgcatatatggtgctgattgcagtgagattagcctcgtccaagttaggggatctgccatgaactagacaagattagaagtttaaagaggccttacatcaagagagtacaagatcgccataaggaagtacaagtctttgaggaaagtgaccttatgagaagcttgagaaaaatcaacttgaaagtgaccttcatgatgatacaataaattgtctcaaacgcaacactattgaaatggagggatacattcgccctcttgacgtagtcataattgtgttgcagtatataccttgctctgatgaccagcattctgatggtgttgcagatgatcatcccagcgattccttattctctccaacataccatcatcacaaggttcgttatttgaataaataacctaacgaaaggtataaagataataaaatgga

SEQ ID NO: 78124 - DNA, 1148 bp, Zea Mays
gaaaaaaccctagagatgtccgcaggctctccgtcggtcgcggctctcgcgcggcggctcctcacccgccgtcggtcgctcctcacccgccccacgcctgaccagcgccattactcctcatcccgcaggcagtctcgggtccctgttcccgctgtcgctcgtggcccgctccaccagcacgcaggcatcaccctcggccacggcctccgaccaccagccacgcttcgccgctaaccccctcgcggcggcttccattcggtccctgccctccacgccattctcttcctgacctcgccttcaagttcatgtccccgtcgtcgcccatgggcctgctccatcggcccgcctcaccctcggccacggcctccaaccgtcggccctgtttcaccgccgactgcacgccctgccctgtgccggctcttgccctcccctgactcgtcggccccgtttcgccgccgaccgcacacgctaccgtgcgccggctcctgccctctcctaacttgaggctgtcaaaccacggaagtggcttaatccaacggattgggggaggagagcctggtgccgttcgagattggggcctcatgaggtaaattcagaagcaaggatggcgacgacgatgaccccgacgacatcgtccccatggacacccaagctgaagatcatgcttgctgtggagcctttgataccatcagagggaccaaagattggagagcacatttcggttacacggaatggaaaatgtgcatatatggtgctgattgcagtgagattagcctcgtccaagttaggggatctgccatgaactagacaagattagaagtttaaagaggccttacatcaagagagtacaagatcgccataaggaagtacaagtctttgaggaaagtgaccttatgagaagcttgagaaaaatcaacttgaaagtgaccttcatgatgatacaataaattgtctcaaacgcaacactattgaaatggagggatacattcgccctcttgacgtagtcataattgtgttgcagaccagcattctgatggtgttgcagatgatcatcccagcgattccttattctctccaacataccatcatcacaaggttcgttatttgaataaataacctaacgaaaggtataaagataataaaatgga

SEQ ID NO: 78125 - DNA, 1204 bp, Zea Mays
ggcccatctatcaattcaattgtatatggcccatctagaaaaaaccctagagatgtccgcaggctctccgtcggtcgcggctctcgcgcggcggctcctcacccgccgtcggtcgctcctcacccgccccacgcctgaccagcgccattactcctcatcccgcaggcagtctcgggtccctgttcccgctgtcgctcgtggcccgctccaccagcacgcaggcatcaccctcggccacggcctccgaccaccagccacgcttcgccgctaaccccctcgcggcggcttccattcggtccctgccctccacgccattctcttcctgacctcgccttcaagttcatgtccccgtcgtcgcccatgggcctgctccatcggcccgcctcaccctcggccacggcctccaaccgtcggccctgtttcaccgccgactgcacgccctgccctgtgccggctcttgccctcccctgactcgtcggccccgtttcgccgccgaccgcacacgctaccgtgcgccggctcctgccctctcctaacttgaggctgtcaaaccacggaagtggcttaatccaacggattgggggaggagagcctggtgccgttcgagattggggcctcatgaggtaaattcagaagcaaggatggcgacgacgatgaccccgacgacatcgtccccatggacacccaagctgaagatcatgcttgctgtggagcctttgataccatcagagggaccaaagattggagagcacatttcggttacacggaatggaaaatgtgcatatatggtgctgattgcagtgagattagcctcgtccaagttaggggatctgccatgaactagacaagattagaagtttaaagaggccttacatcaagagagtacaagatcgccataaggaagtacaagtctttgaggaaagtgaccttatgagaagcttgagaaaaatcaacttgaaagtgaccttcatgatgatacaataaattgtctcaaacgcaacactattgaaatggagggatacattcgccctcttgacgtagtcataattgtgttgcagtatataccttgctctgatgaccagcattctgatggtgttgcagatgatcatcccagcgattccttattctctccaacataccatcatcacaaggttcgttatttgaataaataacctaacgaaaggtataaagataataaaatgga

SEQ ID NO: 78126 - DNA, 984 bp, Zea Mays
gtcgcggctctcgcgcggcggctcctcacccgccgtcggtcgctcctcacccgccccacgcctgaccagcgccattactcctcatcccgcaggcagtctcgggtccctgttcccgctgtcgctcgtggcccgctccaccagcacgcaggcatcaccctcggccacggcctccgaccaccagccacgcttcgccgctaaccccctcgcggcggcttccattcggtccctgccctccacgccattctcttcctgacctcgccttcaagttcatgtccccgtcgtcgcccatgggcctgctccatcggcccgcctcaccctcggccacggcctccaaccgtcggccctgtttcaccgccgactgcacgccctgccctgtgccggctcttgccctcccctgactcgtcggccccgtttcgccgccgaccgcacacgctaccgtgcgccggctcctgccctctcctaacttggtcggcaccaactttgcaacttacaggtgatttgtccaaggagatggatttactgagcagtggtacatcttttgaagaggctgtcaaaccacggaagtggcttaatccaacggattgggggaggagagcctggtgccgttcgagattggggcctcatgaggtaaattcagaagcaaggatggcgacgacgatgaccccgacgacatcgtccccatggacacccaagctgaagatcatgcttgctgtggagcctttgataccatcagagggaccaaagattggagagcacatttcggttacacggaatggaaaatgtgcatatatggtgctgattgcagtgagattagcctcgtccaagttaggggatctgccatgaactagacaagattagaagtttaaagaggccttacatcaagagagtacaagatcgccataaggaagtacaagtctttgaggaaagtgaccttatgagaagcttgagaaaaatcaacttgaaagtgaccttcatgatgatgta

SEQ ID NO: 78127 - DNA, 1320 bp, Zea Mays
aagtaatataaattgttggtgtcttcttctcatgattctgtttttacttggctacaactccaaaagttgtaggattaatatatcattttggtgtcaaataatggagttggtcatttatttgtttgtgttagaaatctggagtcttttattgctctgaatgcccagcagctaaataagggtatttttctgaatttagtcacaccttttcattaataagaccaaaacattttatttcataaatgtcaatgaggtttggagaagagaagagagagcaataaccaagtaaccaacaatccacacactgttatgcttctatttttttatacattcaagttttcaacttctaatagacgtcttaactagatggcttcatattcttcatgtgcatagtaaataattactgaggtgttatcttttttatgaactacctgcactattcaaacaagaaacttgtttgttgctgttattggtctgtgtttgacagtttatctctaccaatgcaggattcagataactgtatcactttatgcaagtacaaatacacaagcacagaatatctttcccctttatgtacttttagctagacctaccagtaatatttcgcttgagggcattctccgatatatcgagcgggatgatgcttggtggacgtgtacatactaatgtgatgcaccttagccacagcgaggtggacgacaaacctaactctactggattctaatgtccactcgtcttttgtcctcttgcagattaatcgtctcgaagcttccgatacactcagttctcacatgaacgagtgggatggacctccctagaaaccaaacacccctgaatcgcagtcatcatcagagaacgacaatccgtgtgctgttgcgatgtagtagtactactgaagcacagagcgaaccgcacaggctagcccgcacggagcgaaccacacgggaaaagctgatgggaagaaacagaaaagtcaagaaaaggcagttcctgcagcttcaaaatcaagtccggcttccaagaagagcaaggatgacgatgattctgatgaggacgagactgatgattctaacgaggacgagacagacgattctgatgagggattcaagtgatgaagatgataccagtgacgatgaggaggaagacacttcaactcctaagaagcatgaggcaggcaagaagagagctgctgaaagtttcgtgctgaaaactcctctatctgataagaaagcaaaagttgccacgccgtcagctcagaagacagttcaagttgcgttttctacatggccatggggaccatctgccgtcattttctttttgtga

SEQ ID NO: 78128 - DNA, 622 bp, Zea Mays
ttttgttcaaagaccccttctatataagatacaggcaaggagaaaaaagagattaatcgtctcgaagcttccgatacactcagttctcacatgaacgagtgggatggacctccctagaaaccaaacacccctgaatcgcagtcatcatcagagaacgacaatccgtgtgctgttgcgatgtagtagtactactgaagcacagagcgaaccgcacaggctagcccgcacggagcgaaccacacgggaaaagctgatgggaagaaacagaaaagtcaagaaaaggcagttcctgcagcttcaaaatcaagtccggcttccaagaagagcaaggatgacgatgattctgatgaggacgagactgatgattctaacgaggacgagacagacgattctgatgagggattcaagtgatgaagatgataccagtgacgatgaggaggaagacacttcaactcctaagaagcatgaggcaggcaagaagagagctgctgaaagtttcgtgctgaaaactcctctatctgataagaaagcaaaagttgccacgccgtcagctcagaagacagttcaagttgcgttttctacatggccatggggaccatctgccgtcattttctttttgtga

SEQ ID NO: 78129 - DNA, 1020 bp, Zea Mays
aaagctggtgggaagatacagaaaagtcaagaaaaggcagttccttgaatttttcaaaaagaaagatttttacagatatttttaataatgacctcggtggaccctatgcatttcttgagccaccttttgttcaaagaccccttctatataagatacaggcaaggagaaaaaagagataactgtatcactttatgcaagtacaaatacacaagcacagaatatctttcccctttatgtacttttagctagacctaccagtaatatttcgcttgagggcattctccgatatatcgagcgggatgatgcttggtggacgtgtacatactaatgtgatgcaccttagccacagcgaggtggacgacaaacctaactctactggattctaatgtccactcgtcttttgtcctcttgcagattaatcgtctcgaagcttccgatacactcagttctcacatgaacgagtgggatggacctccctagaaaccaaacacccctgaatcgcagtcatcatcagagaacgacaatccgtgtgctgttgcgatgtagtagtactactgaagcacagagcgaaccgcacaggctagcccgcacggagcgaaccacacgggaaaagctgatgggaagaaacagaaaagtcaagaaaaggcagttcctgcagcttcaaaatcaagtccggcttccaagaagagcaaggatgacgatgattctgatgaggacgagactgatgattctaacgaggacgagacagacgattctgatgagggtgagggtttgtctcctgaagaaggcgatgatgatgattcaagtgatgaagatgataccagtgacgatgaggaggaagacacttcaactcctaagaagcatgaggcaggcaagaagagagctgctgaaagtttcgtgctgaaaactcctctatctgataagaaagcaaaagttgccacgccgtcagctcagaagacagttcaagttgcgttttctacatggccatggggaccatctgccgtcattttctttttgtga

SEQ ID NO: 78130 - DNA, 564 bp, Zea Mays
ggaaaatgctggtgggaagatacagaaaagtcaagaaaaggcagttccttgaatttttcaaaaagaaagatttttacagatatttttaataatgacctcggtggaccctatgcatttcttgaggctagcccgcacggagcgaaccacacgggaaaagctgatgggaagaaacagaaaagtcaagaaaaggcagttcctgcagcttcaaaatcaagtccggcttccaagaagagcaaggatgacgatgattctgatgaggacgagactgatgattctaacgaggacgagacagacgattctgatgagggtgagggtttgtctcctgaagaaggcgatgatgatgattcaagtgatgaagatgataccagtgacgatgaggaggaagacacttcaactcctaagaagcatgaggcaggcaagaagagagctgctgaaagtttcgtgctgaaaactcctctatctgataagaaagcaaaagttgccacgccgtcagctcagaagacagttcaagttgcgttttctacatggccatggggaccatctgccgtcattttctttttgtga

SEQ ID NO: 78131 - DNA, 1162 bp, Zea Mays
ggaaaatggcaaagctggtgggaagatacagaaaagtcaagaaaaggcagttccttgaatttttcaaaaagaaagatttttacagatatttttaataatgacctcggtggaccctatgcatttcttgagccaccttttgttcaaagaccccttctatataagatacaggcaaggagaaaaaagaggattcagataactgtatcactttatgcaagtacaaatacacaagcacagaatatctttcccctttatgtacttttagctagacctaccagtaatatttcgcttgaggggtaggtgcaactctcctcagtttgtgaaaacgagtaatgaatttttaagtttgcctactataggatcttatttctgatgcacgattcatttttcagcattctccgatatatcgagcgggatgatgcttggtggacgtgtacatactaatgtgatgcaccttagccacagcgaggtggacgacaaacctaactctactggattctaatgtccactcgtcttttgtcctcttgcagattaatcgtctcgaagcttccgatacactcagttctcacatgaacgagtgggatggacctccctagaaaccaaacacccctgaatcgcagtcatcatcagagaacgacaatccgtgtgctgttgcgatgtagtagtactactgaagcacagagcgaaccgcacaggctagcccgcacggagcgaaccacacgggaaaagctgatgggaagaaacagaaaagtcaagaaaaggcagttcctgcagcttcaaaatcaagtccggcttccaagaagagcaaggatgacgatgattctgatgaggacgagactgatgattctaacgaggacgagacagacgattctgatgagggtgagggtttgtctcctgaagaaggcgatgatgatgattcaagtgatgaagatgataccagtgacgatgaggaggaagacacttcaactcctaagaagataatatcaatgtgttgttgtttcttcagcatgaggcaggcaagaagagagctgctgaaagtttcgtgctgaaaactcctctatctgataagaaagcaaaagttgccacgccgtcagctcagaagacagttcaagttgcgttttctacatggccatggggaccatctgccgtcattttctttttgtga

SEQ ID NO: 78132 - DNA, 421 bp, Zea Mays
agtcaaggaaaatgctgatgggaagaaacagaaaagtcaagaaaaggcagttcctgcagcttcaaaatcaagtccggcttccaagaagagcaaggatgacgatgattctgatgaggacgagactgatgattctaacgaggacgagacagacgattctgatgagggtgagggtttgtctcctgaagaaggcgatgatgatgattcaagtgatgaagatgataccagtgacgatgaggaggaagacacttcaactcctaagaagcatgaggcaggcaagaagagagctgctgaaagtttcgtgctgaaaactcctctatctgataagaaagcaaaagttgccacgccgtcagctcagaagacagttcaagttgcgttttctacatggccatggggaccatctgccgtcattttctttttgtga

SEQ ID NO: 78133 - DNA, 952 bp, Zea Mays
aatgttccagtagtcaaggaaaatggcaaagctggtgggaagatacagaaaagtcaagaaaaggcagttccttgaatttttcaaaaagaaagatttttacagatatttttaataatgacctcggtggaccctatgcatttcttgagccaccttttgttcaaagaccccttctatataagatacaggattcagataactgtatcactttatgcaagtacaaatacacaagcacagaatatctttcccctttatgtacttttagctagacctaccagtaatatttcgcttgagggcattctccgatatatcgagcgggatgatgcttggtggacgtgtacatactaatattaatcgtctcgaagcttccgatacactcagttctcacatgaacgagtgggatggacctccctagaaaccaaacacccctgaatcgcagtcatcatcagagaacgacaatccgtgtgctgttgcgatgtagtagtactactgaagcacagagcgaaccgcacaggctagcccgcacggagcgaaccacacgggaaaagctgatgggaagaaacagaaaagtcaagaaaaggcagttcctgcagcttcaaaatcaagtccggcttccaagaagagcaaggatgacgatgattctgatgaggacgagactgatgattctaacgaggacgagacagacgattctgatgagggtgagggtttgtctcctgaagaaggcgatgatgatgattcaagtgatgaagatgataccagtgacgatgaggaggaagacacttcaactcctaagaagcatgaggcaggcaagaagagagctgctgaaagtttcgtgctgaaaactcctctatctgataagaaagcaaaagttgccacgccgtcagctcagaagacagttcaagttgcgttttctacatggccatggggaccatctgccgtcattttctttttgtga

SEQ ID NO: 78134 - DNA, 954 bp, Zea Mays
gtcttcttcactggctacaagatgaagacgaggagctgaatgttccagtagtcaaggaaaatggcaaagctggtgggaagatacagaaaagtcaagaaaaggcagttccttgaatttttcaaaaagaaagatttttacagatatttttaataatgacctcggtggaccctatgcatttcttgagccaccttttgttcaaagaccccttctatataagatacaggcaaggagaaaaaagaggattcagataactgtatcactttatgcaagtacaaatacacaagcacagaatatctttcccctttatgtacttttagctagacctaccagtaatatttcgcttgagggattaatcgtctcgaagcttccgatacactcagttctcacatgaacgagtgggatggacctccctagaaaccaaacacccctgaatcgcagtcatcatcagagaacgacaatccgtgtgctgttgcgatgtagtagtactactgaagcacagagcgaaccgcacaggctagcccgcacggagcgaaccacacgggaaaagctgatgggaagaaacagaaaagtcaagaaaaggcagttcctgcagcttcaaaatcaagtccggcttccaagaagagcaaggatgacgatgattctgatgaggacgagactgatgattctaacgaggacgagacagacgattctgatgagggtgagggtttgtctcctgaagaaggcgatgatgatgattcaagtgatgaagatgataccagtgacgatgaggaggaagacacttcaactcctaagaagcatgaggcaggcaagaagagagctgctgaaagtttcgtgctgaaaactcctctatctgataagaaagcaaaagttgccacgccgtcagctcagaagacagttcaagttgcgttttctacatggccatggggaccatctgccgtcattttctttttgtga

SEQ ID NO: 78135 - DNA, 1031 bp, Zea Mays
ctcgatgtcaagcctggttccactgttaagtgtgagcctggatatggttttatgctgcacctttcccagatttttacagatatttttaataatgacctcggtggaccctatgcatttcttgagccaccttttgttcaaagaccccttctatataagatacaggcaaggagaaaaaagaggattcagataactgtatcactttatgcaagtacaaatacacaagcacagaatatctttcccctttatgtacttttagctagacctaccagtaatatttcgcttgagggcattctccgatatatcgagcgggatgatgcttggtggacgtgtacatactaatgtgatgcaccttagccacagcgaggtggacgacaaacctaactctactggattctaatgtccactcgtcttttgtcctcttgcagattaatcgtctcgaagcttccgatacactcagttctcacatgaacgagtgggatggacctccctagaaaccaaacacccctgaatcgcagtcatcatcagagaacgacaatccgtgtgctgttgcgatgtagtagtactactgaagcacagagcgaaccgcacaggctagcccgcacggagcgaaccacacgggaaaagctgatgggaagaaacagaaaagtcaagaaaaggcagttcctgcagcttcaaaatcaagtccggcttccaagaagagcaaggatgacgatgattctgatgaggacgagactgatgattctaacgaggacgagacagacgattctgatgagggtgagggtttgtctcctgaagaaggcgatgatgatgattcaagtgatgaagatgataccagtgacgatgaggaggaagacacttcaactcctaagaagcatgaggcaggcaagaagagagctgctgaaagtttcgtgctgaaaactcctctatctgataagaaagcaaaagttgccacgccgtcagctcagaagacagttcaagttgcgttttctacatggccatggggaccatctgccgtcattttctttttgtga

SEQ ID NO: 78136 - DNA, 1762 bp, Zea Mays
ctcgatgtcaagcctggttccactgttaagtgtgagcctggatatggttttatgctgcacctttcccagatttttacagatatttttaataatgacctcggtggaccctatgcatttcttgagccaccttttgttcaaagaccccttctatataagatacaggcaaggagaaaaaagaggtttggcccttaaacgatttgtcagatattttaaacatttgatctcgctgtgtaccattccatgttcagttcaacagcttgataagtgaggtttaatatcgtgcctatgtctcctatgtttaatgtcatggcatgggcacagccaagagtggtgagcaccagcggtgcactttaccaatttaggattaggactatagtttctttgttagttagttttttagctgtcgccgttgtaagatcatttgaggcttggcttattggagtttctcttccagtttcctttactattctttaggaactatgtacatagaataagtaatataaattgttggtgtcttcttctcatgattctgtttttacttggctacaactccaaaagttgtaggattaatatatcattttggtgtcaaataatggagttggtcatttatttgtttgtgttagaaatctggagtcttttattgctctgaatgcccagcagctaaataagggtatttttctgaatttagtcacaccttttcattaataagaccaaaacattttatttcataaatgtcaatgaggtttggagaagagaagagagagcaataaccaagtaaccaacaatccacacactgttatgcttctatttttttatacattcaagttttcaacttctaatagacgtcttaactagatggcttcatattcttcatgtgcatagtaaataattactgaggtgttatcttttttatgaactacctgcactattcaaacaagaaacttgtttgttgctgttattggtctgtgtttgacagtttatctctaccaatgcaggattcagataactgtatcactttatgcaagtacaaatacacaagcacagaatatctttcccctttatgtacttttagctagacctaccagtaatatttcgcttgagggcattctccgatatatcgagcgggatgatgcttggtggacgtgtacatactaatattaatcgtctcgaagcttccgatacactcagttctcacatgaacgagtgggatggacctccctagaaaccaaacacccctgaatcgcagtcatcatcagagaacgacaatccgtgtgctgttgcgatgtagtagtactactgaagcacagagcgaaccgcacaggctagcccgcacggagcgaaccacacgggaaaagctgatgggaagaaacagaaaagtcaagaaaaggcagttcctgcagcttcaaaatcaagtccggcttccaagaagagcaaggatgacgatgattctgatgaggacgagactgatgattctaacgaggacgagacagacgattctgatgagggtgagggtttgtctcctgaagaaggcgatgatgatgattcaagtgatgaagatgataccagtgacgatgaggaggaagacacttcaactcctaagaagcatgaggcaggcaagaagagagctgctgaaagtttcgtgctgaaaactcctctatctgataagaaagcaaaagttgccacgccgtcagctcagaagacagttcaagttgcgttttctacatggccatggggaccatctgccgtcattttctttttgtga

SEQ ID NO: 78137 - DNA, 937 bp, Zea Mays
cttactaccactagcaatgtggcattgtctatttgcccagtgtgttaggaaagagtagattaaatggttgaaatcgtacatgaacgagttctatttgtttagtgtcttattattatagcacgtgatgccaatgaatttcgatgtttgcaggtctcgatgtcaagcctggttccactgttaagtgtgagcctggatatggttttatgctgcacctttcccagatttttacagatatttttaataatgacctcggtggaccctatgcatttcttgagccaccttttgttcaaagaccccttctatataagatacaggcaaggagaaaaaagagattaatcgtctcgaagcttccgatacactcagttctcacatgaacgagtgggatggacctccctagaaaccaaacacccctgaatcgcagtcatcatcagagaacgacaatccgtgtgctgttgcgatgtagtagtactactgaagcacagagcgaaccgcacaggctagcccgcacggagcgaaccacacgggaaaagctgatgggaagaaacagaaaagtcaagaaaaggcagttcctgcagcttcaaaatcaagtccggcttccaagaagagcaaggatgacgatgattctgatgaggacgagactgatgattctaacgaggacgagacagacgattctgatgagggtgagggtttgtctcctgaagaaggcgatgatgatgattcaagtgatgaagatgataccagtgacgatgaggaggaagacacttcaactcctaagaagcatgaggcaggcaagaagagagctgctgaaagtttcgtgctgaaaactcctctatctgataagaaagcaaaagttgccacgccgtcagctcagaagacagttcaagttgcgttttctacatggccatggggaccatctgccgtcattttctttttgtga

SEQ ID NO: 78138 - DNA, 1348 bp, Zea Mays
gctataaagatccatcaccatccaaggcacacttacccctgctacatgagtggcatttccgatctggcctcgatcgatacatatggattattggaatgatttatgcttactaccactagcaatgtggcattgtctatttgcccagtgtgttaggaaagagtagattaaatggttgaaatcgtacatgaacgagttctatttgtttagtgtcttattattatagcacgtgatgccaatgaatttcgatgtttgcaggtctcgatgtcaagcctggttccactgttaagtgtgagcctggatatggttttatgctgcacctttcccaggctgctcttgaggaatcgaagaatagtgataatgcgctattgccttgatgtatgtcaaaattgatgatcaaaaacttgccattggaatcctctctgttgacaagaacccacacatacaatttgatctggttttcgataaagagtttgagctgtcgcacacatcaaaaactaccatcgtcttcttcactggctacaagatgaagacgaggagctgaatgttccagtagtcaaggaaaatggcaaagctggtgggaagatacagaaaagtcaagaaaaggcagttccttgaatttttcaaaaagaaagatttttacagatatttttaataatgacctcggtggaccctatgcatttcttgagccaccttttgttcaaagaccccttctatataagatacaggcaaggagaaaaaagagattaatcgtctcgaagcttccgatacactcagttctcacatgaacgagtgggatggacctccctagaaaccaaacacccctgaatcgcagtcatcatcagagaacgacaatccgtgtgctgttgcgatgtagtagtactactgaagcacagagcgaaccgcacaggctagcccgcacggagcgaaccacacgggaaaagctgatgggaagaaacagaaaagtcaagaaaaggcagttcctgcagcttcaaaatcaagtccggcttccaagaagagcaaggatgacgatgattctgatgaggacgagactgatgattctaacgaggacgagacagacgattctgatgagggtgagggtttgtctcctgaagaaggcgatgatgatgattcaagtgatgaagatgataccagtgacgatgaggaggaagacacttcaactcctaagaagcatgaggcaggcaagaagagagctgctgaaagtttcgtgctgaaaactcctctatctgataagaaagcaaaagttgccacgccgtcagctcagaagacagttcaagttgcgttttctacatggccatggggaccatctgccgtcattttctttttgtga

SEQ ID NO: 78139 - DNA, 1594 bp, Zea Mays
gctataaagatccatcaccatccaaggcacacttacccctgctacatgagtggcatttccgatctggcctcgatcgatacatatggattattggaatgatttatgcttactaccactagcaatgtggcattgtctatttgcccagtgtgttaggaaagagtagattaaatggttgaaatcgtacatgaacgagttctatttgtttagtgtcttattattatagcacgtgatgccaatgaatttcgatgtttgcaggtctcgatgtcaagcctggttccactgttaagtgtgagcctggatatggttttatgctgcacctttcccaggctgctcttgaggaatcgaagaatagtgataatgcgctattgccttgatgtatgtcaaaattgatgatcaaaaacttgccattggaatcctctctgttgacaagaacccacacatacaatttgatctggttttcgataaagagtttgagctgtcgcacacatcaaaaactaccatcgtcttcttcactggctacaagatgaagacgaggagctgaatgttccagtagtcaaggaaaatggcaaagctggtgggaagatacagaaaagtcaagaaaaggcagttccttgaatttttcaaaaagaaagatttttacagatatttttaataatgacctcggtggaccctatgcatttcttgagccaccttttgttcaaagaccccttctatataagatacaggcaaggagaaaaaagaggattcagataactgtatcactttatgcaagtacaaatacacaagcacagaatatctttcccctttatgtacttttagctagacctaccagtaatatttcgcttgagggcattctccgatatatcgagcgggatgatgcttggtggacgtgtacatactaatgtgatgcaccttagccacagcgaggtggacgacaaacctaactctactggattctaatgtccactcgtcttttgtcctcttgcagattaatcgtctcgaagcttccgatacactcagttctcacatgaacgagtgggatggacctccctagaaaccaaacacccctgaatcgcagtcatcatcagagaacgacaatccgtgtgctgttgcgatgtagtagtactactgaagcacagagcgaaccgcacaggctagcccgcacggagcgaaccacacgggaaaagctgatgggaagaaacagaaaagtcaagaaaaggcagttcctgcagcttcaaaatcaagtccggcttccaagaagagcaaggatgacgatgattctgatgaggacgagactgatgattctaacgaggacgagacagacgattctgatgagggtgagggtttgtctcctgaagaaggcgatgatgatgattcaagtgatgaagatgataccagtgacgatgaggaggaagacacttcaactcctaagaagcatgaggcaggcaagaagagagctgctgaaagtttcgtgctgaaaactcctctatctgataagaaagcaaaagttgccacgccgtcagctcagaagacagttcaagttgcgttttctacatggccatggggaccatctgccgtcattttctttttgtga

SEQ ID NO: 78140 - DNA, 1331 bp, Zea Mays
gctataaagatccatcaccatccaaggcacacttacccctgctacatgagtggcatttccgatctggcctcgatcgatacatatggattattggaatgatttatgcttactaccactagcaatgtggcattgtctatttgcccagtgtgttaggaaagagtagattaaatggttgaaatcgtacatgaacgagttctatttgtttagtgtcttattattatagcacgtgatgccaatgaatttcgatgtttgcaggtctcgatgtcaagcctggttccactgttaagtgtgagcctggatatggttttatgctgcacctttcccaggctgctcttgaggaatcgaagaatagtgataatgcgctattgccttgatgtatgtcaaaattgatgatcaaaaacttgccattggaatcctctctgttgacaagaacccacacatacaatttgatctggttttcgataaagagtttgagctgtcgcacacatcaaaaactaccatcgtcttcttcactggctacaagatgaagacgaggagctgaatgttccagtagtcaaggaaaatggcaaagctggtgggaagatacagaaaagtcaagaaaaggcagttccttgaatttttcaaaaagaaagatttttacagatatttttaataatgacctcggtggaccctatgcatttcttgagccaccttttgttcaaagaccccttctatataagatacagattaatcgtctcgaagcttccgatacactcagttctcacatgaacgagtgggatggacctccctagaaaccaaacacccctgaatcgcagtcatcatcagagaacgacaatccgtgtgctgttgcgatgtagtagtactactgaagcacagagcgaaccgcacaggctagcccgcacggagcgaaccacacgggaaaagctgatgggaagaaacagaaaagtcaagaaaaggcagttcctgcagcttcaaaatcaagtccggcttccaagaagagcaaggatgacgatgattctgatgaggacgagactgatgattctaacgaggacgagacagacgattctgatgagggtgagggtttgtctcctgaagaaggcgatgatgatgattcaagtgatgaagatgataccagtgacgatgaggaggaagacacttcaactcctaagaagcatgaggcaggcaagaagagagctgctgaaagtttcgtgctgaaaactcctctatctgataagaaagcaaaagttgccacgccgtcagctcagaagacagttcaagttgcgttttctacatggccatggggaccatctgccgtcattttctttttgtga

SEQ ID NO: 78141 - DNA, 615 bp, Zea Mays
cttctgatggaagttcaaagggatgtgcactgccaaatcccatttcttccataggctgttttccagacatgtgatattcatctaagcaagcattggtgttgatttgatcagtatacattgctgaagtctccattactacatcaaatttggtcgttgcattggtatcctgatccattttagggtactcagccgcatatgattcttcacccccatctgtttcacgtgtaccaatacacaacaaaccagagacctcagcatgatccatctgtaactttctgatctgcagcaaaggaagaaatcaacccaaagtcggatggatctgtgctacacgaatctgttaggttgggggagggggagaggagaagtcgaacttcgatctgagcgtatgggtctcgatcttttcgtctctctctctctctctcccctcccgacggcctggctggtaactggtgagcgggcggcactgggacctcccagatggactgggccctccaactctacgacccctgcagcctctgcctggcttggtgagcgggcggcgcagttgaggcaaagaggtcaacctaagagagaagacgaagaagctgagagagacggaccgatggagggagcttg

SEQ ID NO: 78142 - DNA, 2156 bp, Zea Mays
gcggcccttgctagctgccagcctcaaaagaactgcgagctcggccacctctcgctctgcttttattacttttccatctccagcctcggctagatcctgcttgctcgcttccactgtaaatataaatattctccggtcaccatcaccggcgcaaggcaacaagaatataccgtctcgtctcctgttgctctgggctccggttcccctccctgcttgctttaaagctgcaaagcccttggcggctccggctcctggtcatatagaagagcggaggccgatccgtgaccgtgagcactctgctctctgctgctcgcttctctcatccgatccatgccaccatagcggtcaaatagactaggtcgaccagcctttttctttcagagccttgtgtctccctttgcctctttttcttttctgctgtgttcccagctcgcagcccttccatgctcttgtcacatacactcgcacgcaggccggcctttgagctgagaccgccgagaggcatagcacaggcaccaccacacaccaccgcaccagcccttgccgcgtataaaacgtctcgtgcgtaggcggcggcgactagctaggctgtccccgtcacgcatacgctacgcgcacactatattgggggggttgcatgatcaggcatcatccgaccgacggcatgaggaggaaagggagcgactgtacacggatcagcccagccgagatcacgcccatgatctccctgccgtccaccaggcggtccgcgggccggacggcgtcggcgccggaccgggaccgggaggaggagcgacctcggcaacggcgagtgcgaggcgcgtgcggctctcgcctgctgcggaccgcgcggtggacggccgcgcgcttctacaggcgagcgcgggtaagcatcgccagggcgtttcggcccccgtcgacgacggcggccaagagagcacaagcaggcgccggcgccgcttcgcccgactgcggcacgccggcgaggcggcgtagtagcaggcggcagcagcagtcgtccgcgccgacgacggtcgtcgtcgtcgatgactcgcacaagagcgaagcggtggaggagtgcatcaggttcatgaactcgtcgtcgaggaagtaccggtagagtctctggaggttccgtgtgcgcgcggatgctagcggcctcgttcttgtatttgttccttcctcttttctatctctctctctctctttttgcctttcatctgtatgcgcatctgttctgatgtacttgagaaacatactggttactttcatcttttgcgtgcccggcctgaaatctcgtattgctagttctattttacatttgagcgaaacagcatttttcatcttattaagcagttatttgcattgtgtaactagcagatacttatttcagccaccatattacggttacagatattttatatagtatgatctcactctcttatccaaattgatccaggatatctcgctacctatagttaactactagctcacacgatccttttatatgggagttaatttttcctccctcatgcgtgcccacagcccacgtcaagagttgtggggagtcgtgtgacgtgaccaacgagctcttcctcaaacctcctctgaccaacggagaacggtcaaaattcatttattactattatcctgtcctctttaattttagtcgcaaatactcgcaacatgcatgttatcaccatgattagaccactgttgtttctttctttcgaggggaagaaaagaagcatatctatcatcccacaaccatgtacagtgtcgaatcatcactttgttcctcccgcaactctggttttgcagttggttatgatggctgtcggaggtaaactccagctggtcgcccgaggaggtcaactttagccggttggcgaagagcacccgtctaattttaagaacaaagggatacgcgagaatctagagtggttcaggttgtcggagcgtaatatcatacatccgcttttgagttgtatcgctgggagctcccatgcttgtgagttttgagtgtgaaattgagagagcttgtccccttgtatcgtatgtgccctcccttttatagtcatggggacacgtacaaggatgctgagctccaacaagtttgcccgacaatatagtattaaataacatacaacatcgag

SEQ ID NO: 78143 - DNA, 1280 bp, Zea Mays
atagatttcatatgataccttcttcctcggtggacgtccaactcagtgcctactactgcgagaccctgcaagagcaagcaagcatcacacactaaagtgactaaaccctaaacgcatcacatgtgatcgtggctggccgtgtttcaggtttcttctacagcgacgtacggcaagcagcaatggctggcggacaaaaacctcgcgagaccctgcaagagcaagcatcacacactacaagcgttacccgatctggtggccggagacattgcacaccaaaaaatacattaacaagccggcacagaaatcttccgaccccggccgtacgtgacactggaagaggcttcatcgaatgctttattattcagtaccttttacgtggaagttgttgggctctgtacttgccgaattatgtacactgaactgaaacggatgccgcattgccgcccatggcgtcttgttctcgatgaacgcagtcgctcggagctgccgcgagctggcagctggacgacgaggctgtgccactcttcatcctcgtcacacgaagggcttcacgtccaccaccagggcgccggcggaggggttggtggtggccgcgggcggcgacgagcgcggggcgtcgcctgggaggttgacggtggtgatgtcgtggatgctggaccgccgcttgtccttgccgccggagctgagccggatgaagtacttctgcgcgtggctggccacctgctgggaacggaaggtatggagcaggcactgggcttgcggtgggtgctgtggctggagccctcgggggtctagcaattgatgaagcggtgaagtacaaggaggataagggtgcagaacgggtggaagagaaggtggtacctgctgggagggatgattacagcgagtatcgtggcgactattgaaccgaagtttgtgtgagtgtggaagaaagcgctgtgagttgattcttcttccatgcctatgtgggaataaatccagtgttagtctatggctttccccatgtatgtatatatatttgtgatgttgtgaattattctgatacctataaactactccttcggttcttgtttatttgtcgctgtttagttcaaaaatgaactagcgggcgacaaatattcgagaacggaggtagtacaatgttttatgatgacagatttggtgtgtaacataaatatctcatggcttgctttgatggtgtacttgtgtcttgttgtcttgatgaatgatgatgggtgttatcttttccagcaattgtattgcgctgttttcagtttatt

SEQ ID NO: 78144 - DNA, 1324 bp, Zea Mays
tacaacaatttcgtatgagcaggctgtttgaggtgtcgtcaaaatggcaggtgatctaaacactcccgggaagttaggagcacttatgtgccaccttgattgggattgaaccggacagctctgtccccaatgaaacatatttttgaccaaaattctgttgcagctttgcatgttgttgatttcagttatcaaccaattcaatcatgaacacatttcatatgttaccaagtcttgtatttcaggcagcatcttttccctttcttcttcccaaaagtcttccagatggtttgattttttctatttcttacttggaattctttaacgatgttcctgaatcagttgactaaggaagtttaataatagatggtcatggaagttctgtgtttgatacatatgtctccatctcaaatgtttattagtattacttttgtatgctgaagctactttcctttttgatactggaggcaagaaaccatggtggatgctctgttgcaattgcaagtcattttttcctcacgaaaaaatttgctctagtttctttagcagatctctgagaactttgttcctggaagaatgtataattgccgatgaagggagcgaatggctccatgaactcgccgtcaacaattctgttctggtgacactgaacttctacatgacagaactcaaagtggagcctgccgatctggagcttcttgcaaggaactgtaaatcattgatttctctgaagatgagtgactgcgatctttcggatttgattggttttctccaaacctccaaggcactgcaagaattcgctggaggcgcttttttcgaagtcggagagtacaccaagtacgaaaaggtcaagctcccacctaggctatgcttcttggggggtcttaccttcatgggtaaaaacgagatgcccgttatctttccgtattctgcgtcgcttaagaaactggacctgcagtacactttcctcaccactgaagatcactgtcagcttatcgctaaatgccccaacctactggttctcgaggtgaggaatgtgattggggatagaggactggaagttgttgccgatacatgcaagaagctacgaaggctgagaatcgagaggggggacgatgaccccggccaagaagagcaggagagtctctcagataggcctgacagccgtagctgtcggctgcgggaactggagtacatagcggcatacgtatccgacatcacaaactctggtttttcacatcagagcgctattggaatcatcagcggctttggaggtgacgatttcagtggcatctttgtcgaagggatggcaaccgcgccagtctaa

SEQ ID NO: 78145 - DNA, 829 bp, Zea Mays
cttccctcccttctgtgaaattggcatgggcaagctctgatgcgatcatagatctctgagaactttgttcctggaagaatgtataattgccgatgaagggagcgaatggctccatgaactcgccgtcaacaattctgttctggtgacactgaacttctacatgacagaactcaaagtggagcctgccgatctggagcttcttgcaaggaactgtaaatcattgatttctctgaagatgagtgactgcgatctttcggatttgattggttttctccaaacctccaaggcactgcaagaattcgctggaggcgcttttttcgaagtcggagagtacaccaagtacgaaaaggtcaagctcccacctaggctatgcttcttggggggtcttaccttcatgggtaaaaacgagatgcccgttatctttccgtattctgcgtcgcttaagaaactggacctgcagtacactttcctcaccactgaagatcactgtcagcttatcgctaaatgccccaacctactggttctcgaggtgaggaatgtgattggggatagaggactggaagttgttgccgatacatgcaagaagctacgaaggctgagaatcgagaggggggacgatgaccccggccaagaagagcaggagagtctctcagataggcctgacagccgtagctgtcggctgcgggaactggagtacatagcggcatacgtatccgacatcacaaactctggtttttcacatcagagcgctattggaatcatcagcggctttggaggtgacgatttcagtggcatctttgtcgaagggatggcaaccgcgccagtctaa

SEQ ID NO: 78146 - DNA, 872 bp, Zea Mays
caagaatttaacactgttaccatgttttggctataacgttgctgaaacatatctctgatacaagattgaagacagcttgggtttatcagatctcagattagagaaacctgtggtttattggccaagctacatgtcaaacattttttttggattataaaaaaatgtatcaatatttttgtaacgcatcaagaatttaacactgttactatgttttggctataacgttgctgaaacaaatctctgatgcaagattgaagacagcttgagtttatcagacctcaggttagagaaacctgtggtttattggccaagctacatgttaaacatttttttttggattataaaaattgtgtcaatatttttctaactcgtcaagaaggtaacactgttaccatgttttggctataacattgctgaaacatatctctgaagcaggtttgaagtctgcttgagtctatcagatctcagcttccggcggtgagatatcctgctcgtagatgacctgagcaaccagaccaatgaaaatcagacccagagcagcaaccttcctccactccacctctggtgttgcaaagatggcattcgcaattgtaatcccgagtatccccatcagccccagccgtctcctcgaaggcttgcatcttgctgtcgagcctctccagtatctacctcgtcagacaccgcagttgtttgtcaaacagtgagtatcagtaagatgttcatagctattgatggcaagagatgctcacctggtcaccaacggcatcaagttctttcatagcgttctgcccaatcaggtcgaactccgagtcggcgtccttggcgaacttggtcaggtaagcagagcgctcgtccaagaactctgtgatgcg

SEQ ID NO: 78147 - DNA, 1004 bp, Zea Mays
aatagattttgtaaggatggaagaacacatggtgcaaatgaggtatataagaatatgatgaaggatggttgcaaaccgaattctcatgtttacaatgcactaataaatggtttctgccgagcatgcaagattagtgatgccgttaaaatttacattgaaatgaccggcaatggttgttgcccaaccatcatcacatataacactctgatagatggtttgtgtaaggctgaaaaataccaagaagcttcaagcttaacaaaggaaatgttagagagaggttttaaaccagatatcagaacttatggttctttgattcgtggcctttgtcgagtcaagaagattgatgctgccctttgtatttggaatgaaattcttgatgcgggtattcaggttgatgtaattgtgcacaacatcttaattcatggtctttgttctgctgggaaagtaaatgatgccttttgtatatatttggagatgaaagaaaagaattgttccccaaatctagtgacctataacacattgatggatggattttatgagattggttctattgatacagcagcatctctttgggctgccattttagataatggtttgaaaccagatattgttacttacaatacaagaattaagggcctgtgctcttgtaataggacacctgaaggagtcctgttattgaatgaggtgcttgcaacagcttccggcggtgagatatcctgctcgtagatgacctgagcaaccagaccaatgaaaatcagacccagagcagcaaccttcctccactccacctctggtgttgcaaagatggcattcgcaattgtaatcccgagtatccccatcagccccagccgtctcctcgaaggcttgcatcttgctgtcgagcctctccagtatctacctcgtcagacaccgcagttgtttgtcaaacagtcgaactccgagtcggcgtccttggcgaacttggtcaggtaagcagagcgctcgtccaagaactctgtgatgcg

SEQ ID NO: 78148 - DNA, 1403 bp, Zea Mays
caggcgcccagcgaagcagcccagcaaccaagcgtctccacatggaccgtgtaccagtgcagacgtgcaatgttgtagtggtctgctaccttgctgctcgcttaagtgtctggcgcctatgctgactgctaagtggaacgcctgttctagactatggcctataggcgtgtggttgtgtgcttgcttgcttttgcttggttggttgttgattgcccgactatggctttgagttgtggtaaactaataatgtgatgatttgtctttctcaggaagacagaaatagtcaaacagatgtgatgtgctacacttttgctatgtgaatttttttaaaacactaaatgcttgttgtgcagttgtgatgcctgttttttgtttggtgttggaaatggaatgcaccacagtgaactaaagcagacaagcagtagctaacctagttggtttgaaagcgggtagaacgggctacccaaacccgaacccgaaaaattcgggtacccaaattaacgggtatacaatacagtcacactgccttcgggtatcatttctagaaacccgaaatttagaaagcccaaaaaacccgacccgaattttcgggctaacccgaatgcccacagtgacccgggagggaaggttgagcctcccgagggcagcgatggtaggcgacggctgtggggtgggcggcggctatgggtggggagggagaaaccctagtcgtctgataccatgtaggaatatgaagtactggatatattgataggagatggggtatagtatatggactcataaccttaaccctaatgggccggcaacccagtggtgccggcccactcacacacacagtctaacaattccatctttttagccttagtcattcatgagaataactgagatataagttatttagtgagtcggtcattctaaaaaacagacgttacatgaaagaaaatgaacaaacttaggcattttatgaatatactcagtaattccatccttttaggctcagtcattcatgagagtaactacgtaataaaaaaatgaaatatatagcacgagtggttttagttttgttcacaaaaaactcaggaatacaaatatgaaattggttcagtggttaaatcttttaattgaaagatataaaagaaaaaagaaaaatgtcttatgttgcatgccacatgcatgtgtgcgctatttttgggttgcatgcatgctctggtgggtggggacctggtgcatgccgaggggggtagggctgttgctgcatctgcgaggctgcgcgcgggtgtggtgcgaaatagcactaccgtgtgtgtgtatcaaagcattcatctatgtggaatgaattttggatctacaactactttttgcccatcacaacattagcaccactctactttgcaagtgtgtag

SEQ ID NO: 78149 - DNA, 179 bp, Zea Mays
ctctgagagagctggatccttcaggttgatcttcgtcctcttcttcctccacgtcatcttcgtcactatcaatttccagaagaccgagtctgcactggtacaacactcttctcatcaggaacacattcagatagtactttatcaaatctatcctgggctttgaagcaaaatttttcgac

SEQ ID NO: 78150 - DNA, 1061 bp, Zea Mays
ccacatctgccccttcctctctccgcgcgcactctgtgtccgtgcacatcggaggtgtgccgctgccggctacgaagaaggagcccccgctacaaagaagattggagatgactcggcatgtttccttacacccgtaaatacgagacaaagctagaacagcctaatggtttatagagactgtgggaagagaagtctctttcggatctctacccttccctcgccacccgtcaaggagatttgtgttccttgcacaatctagcagacccggacgccagtggggaggcggcgggtgttcgtgtagatagagactggctgcattctcggcatgtacctggaccgcggggactacgcgcacaccgtcaagcgttgcttgcagctcacgctcaacgtgcccagcagcgagaacttgctcaccttcgacgatcgcgttctagaggaaaaatgcttgggtaaaggagtttggcttggaggctatgtggaagagcccgaatggcacaattaggaacattctgaatggcactgtgttcagagaaccaatcatctgcaaaaatgtcccatagattgttgtagatatggaaggaagaccacaatcataggtgactgctaatgcgtcaagtgcctaccccaagaatatagagtatccatgcggtggtgtggaggatatgacaaggctagcatagttacatgaactaggagtgcttcaacacctaaagtctagatttatgataaaatgaaatatatgtaagttgagtttctcaacacatcatccctgatgagaacaacaaagagttcgggtctctactgcgccaacaaagagtcctgaacattttgaccgagcaagcactacggaagagccaacctcttactatatccaacctaaatcatgaaaaggctgaattactgactaccagacctcaaggggacagcaaagatagaacatctatgtttgcaagttctttcaatgcacatctgtccaggaggctatgttgattagccaacccaatccgaaggatggttctcctggggctgcatctgctataccagaaacagatctgccagaa

SEQ ID NO: 78151 - DNA, 1369 bp, Zea Mays
catatgcattgcatcgcaggtgatgttgttacttttgttctgctacttaattggattggtatttacttatacttagtaattgctaataaaattttgacctactttaaaagcaatgttcagctctaaccatcctctttgtccagtctcaacatctgtcgtggcaggaagtttcaactgcagggggtgttagattgttttgtttctatctaagtgttaagggcctacaacccaacccatataacccactagtgttgggtatgtaatactcagcccactatcaatgaattagggttttctttcttccaacatgctctattgacttcttatcaagcttctagcagctttgagctgaaccatactttctagcaaggcccaagaataaaatccatagagtggtttcatactcttcagttcttcactgtgcattgcagataaattattctcttatctgtaacttcaatttgaatagatatgttttcattggcagaccatggcatttgcattgaacaagagaagctacctcttgaggatcaaatatctcagacatggttttgtgggaaatactgtaaagagatattcatagggctgcgtagtcatgtcgggacggataatattcttgacagtgacctttcatggtccatactgagatgcaacaatgacgggcagaagctacattctgttcagaagattgcctgtttggcagaatgtaatatgaaattagcagtggctcttactctattggaggaatgtatcattcgtatggtggatcctagaactggtgtggacatgataccccatgttttatacaacaagggatcaaactttgctcgtgtggattatcagggattctatactgtaatcctggagaaaggtgataaaattttatgtgtggcttctatcagactttcgacggcaaggaatgtgccgaattctaatgagcatcattgaaaagatgctctgttcatttaatgttaagatgttggtcctttctgccatcccagagttggttagcacatgggtgtcaggatttggcttcaaacctatcgaagatgctgaaaggaaacaacttcataatgtaaacttgatgttgtttcctggaacatccttactaacaaagagattggatggatttattatggccacaaaaccaggcgcggaaaaggatatacatgaagtttctggagtacctaatcttaagcgtatgcctaatgggaaagcaagtgagcatttcaaactccatgaccttgatttgtccgggacagagtttaaagctgaggtttccgtgaatggtccattcagaacactgaaacatgaatgtggttcagcagcatggtttcagtctactaagttagctgttggggaagtgtga

SEQ ID NO: 78152 - DNA, 1605 bp, Zea Mays
gcgagcccacgtacttttacggaaacgcccacaccgccggctcgtcttctcccgaacccgaacccaccctccccgattcaaaccgtcgccgccgtcgccgagagagtcgtgactccccccagcggcggcctgcgaccacccgttacccagccgtcccttctccgcagacagcatttgcgcccaccccgtcccgtcccgtcccctctccctcgcggaggcccgagagctttgagctgcctcggttaagtcgtcgagtggtccacagggccgccgccgcggcggcggttacaaagcggggagggaattccggcgcgggatgccgcgatcccgctgcgatgcgcggatcagaatatgggtgtgacccaaccgggaagtagtggacactgctggtggaggactagggcctggagtgggagggagctgcggccgcgacgatgtacgtcgcgcgggagtctaccaagctgtggaggagggtgtgcgcggagacgacggcggagctgcagctcctgctccagaagtggcaactgctacttgcagggttggtatttcagtacatccatggattagctgctcgaggagtgcattacttgcatcagcccggaccactgctccaggacttgggatttatggcccttccagagcttggccaagagaaaggttatcttagtgaaagcgttttcactttcatcttcatttcctttctgttgtggagttttcacccttttatttatcatagcaaacgtttctacactgttctactatggcgaagggtgctggcatttctagtggcttcgcagtttttaaggattatgacattctattccactcaacttcctggtcccaattatcactgccgtgagggctcaaaactggccactctcccaccaccaaataatgcacttgaagtgctcctgattaactgtacacggttaatttggttgtattttttgttgataacaagctgccagaaatggcagaccgtacaaatggattgtctctgcttccagtaagcacaaaggataaagacggcaggatgaaggaagaactccataaacttgagaaggacgggaggatgatggatgagttccataaattgttaaatggaaactctatcgatgctacagattggcgacaacgagtgcagatgaatggaaagcacggagaagacacgagccacactgtcgctgatgccacctctgctgggacatgaccagcagcatttctctgtcaatatcgtcttcaatatccacagatggaatctgcgagcaaaaagaaaattgtgtggtgtgctgcctctatcattgtgtgatgaaaggcttctcaggtacccgcgaggttgcgacattcataacagagcgttttgttgtgctttccatggcacgatgacagtctgttgaagtagtaacggaatcaggaccttttcggcttttctatgaggccgcagctacagttttgcatccttcagacgtttcagtgtcgatgatgttagagagggagattgatgtttgatgtaaatattgattagattcagctgtggcaatgggtaatgaacgactaacttatgctgattggtaatttaacgtgagcagctgttatgaccgcttt

SEQ ID NO: 78153 - DNA, 1871 bp, Zea Mays
gcgagcccacgtacttttacggaaacgcccacaccgccggctcgtcttctcccgaacccgaacccaccctccccgattcaaaccgtcgccgccgtcgccgagagagtcgtgactccccccagcggcggcctgcgaccacccgttacccagccgtcccttctccgcagacagcatttgcgcccaccccgtcccgtcccgtcccctctccctcgcggaggcccgagagctttgagctgcctcggttaagtcgtcgagtggtccacagggccgccgccgcggcggcggttacaaagcggggagggaattccggcgcgggatgccgcgatcccgctgcgatgcgcggatcagaatatgggtgtgacccaaccgggaagtagtggacactgctggtggaggactagggcctggagtgggagggagctgcggccgcgacgatgtacgtcgcgcgggagtctaccaagctgtggaggagggtgtgcgcggagacgacggcggagctgcagctcctgctccagaagtggcaactgctacttgcaggtacatccatggattagctgctcgaggagtgcattacttgcatcagcccggaccactgctccaggacttgggatttatggcccttccagagcttggccaagagaaaggttatcttagtgaaagcgttttcactttcatcttcatttcctttctgttgtggagttttcacccttttatttatcatagcaaacgtttctacactgttctactatggcgaagggtgctggcatttctagtggcttcgcagtttttaaggattatgacattctattccactcaacttcctggtcccaattatcactgccgtgagggctcaaaactggccactctcccaccaccaaataatgcacttgaagtgctcctgattaactttcctcgtggagtgctttttggttgtggtgatctgatattttcatctcacatgatcttcactctggtttttgtgcgcacataccataaatatggctcaaacaggttgattaagctcctttcttggtttatggctgtaattcagagtcttcttataattgcttctcgcaagcactacactgtcgatgttgttgttgcttggtaggacaaaaacctaatttcagtgacatggttatcttggagtagcacctgccttccttttttacagtctctttccacaggtacacggttaatttggttgtattttttgttgataacaagctgccagaaatggcagaccgtacaaatggattgtctctgcttccagtaagcacaaaggataaagacggcaggatgaaggaagaactccataaacttgagaaggacgggaggatgatggatgagttccataaattgttaaatggaaactctatcgatgctacagattggcgacaacgagtgcagatgaatggaaagcacggagaagacacgagccacactgtcgctgatgccacctctgctgggacatgaccagcagcatttctctgtcaatatcgtcttcaatatccacagatggaatctgcgagcaaaaagaaaattgtgtggtgtgctgcctctatcattgtgtgatgaaaggcttctcaggtacccgcgaggttgcgacattcataacagagcgttttgttgtgctttccatggcacgatgacagtctgttgaagtagtaacggaatcaggaccttttcggcttttctatgaggccgcagctacagttttgcatccttcagacgtttcagtgtcgatgatgttagagagggagattgatgtttgatgtaaatattgattagattcagctgtggcaatgggtaatgaacgactaacttatgctgattggtaatttaacgtgagcagctgttatgaccgcttt

SEQ ID NO: 78154 - DNA, 1869 bp, Zea Mays
gcgagcccacgtacttttacggaaacgcccacaccgccggctcgtcttctcccgaacccgaacccaccctccccgattcaaaccgtcgccgccgtcgccgagagagtcgtgactccccccagcggcggcctgcgaccacccgttacccagccgtcccttctccgcagacagcatttgcgcccaccccgtcccgtcccgtcccctctccctcgcggaggcccgagagctttgagctgcctcggttaagtcgtcgagtggtccacagggccgccgccgcggcggcggttacaaagcggggagggaattccggcgcgggatgccgcgatcccgctgcgatgcgcggatcagaatatgggtgtgacccaaccgggaagtagtggacactgctggtggaggactagggcctggagtgggagggagctgcggccgcgacgatgtacgtcgcgcgggagtctaccaagctgtggaggagggtgtgcgcggagacgacggcggagctgcagctcctgctccagaagtggcaactgctacttgcagggttggtatttcagtacatccatggattagctgctcgaggagtgcattacttgcatcagcccggaccactgctccaggacttgggatttatggcccttccagagcttggccaagagaaaggttatcttagtgaaagcgttttcactttcatcttcatttcctttctgttgtggagttttcacccttttatttatcatagcaaacgtttctacactgttctactatggcgaagggtgctggcatttctagtggcttcgcagtttttaaggattatgacattctattccactcaacttcctggtcccaattatcactgccgtgagggctcaaaactggccactctcccaccaccaaataatgcacttgaagtgctcctgattaactttcctcgtggagtgctttttggttgtggtgatctgatattttcatctcacatgatcttcactctggtttttgtgcgcacataccataaatatggctcaaacaggttgattaagctcctttcttggtttatggctgtaattcagagtcttcttataattgcttctcgcaagcactacactgtcgatgttgttgttgcttggtaggacaaaaacctaatttcagtgacatggttatcttggagtagcacctgccttccttttttacagtctctttccacaggtacacggttaatttggttgtattttttgttgataacaagctgccagaaatggcagaccgtacaaatggattgtctctgcttccagtaagcacaaaggataaagacggcaggatgaaggaagaactccataaacttgagaaggacgggaggatgatggatgagttccataaattgttaaatggaaactctatcgatgctacagattggatgaatggaaagcacggagaagacacgagccacactgtcgctgatgccacctctgctgggacatgaccagcagcatttctctgtcaatatcgtcttcaatatccacagatggaatctgcgagcaaaaagaaaattgtgtggtgtgctgcctctatcattgtgtgatgaaaggcttctcaggtacccgcgaggttgcgacattcataacagagcgttttgttgtgctttccatggcacgatgacagtctgttgaagtagtaacggaatcaggaccttttcggcttttctatgaggccgcagctacagttttgcatccttcagacgtttcagtgtcgatgatgttagagagggagattgatgtttgatgtaaatattgattagattcagctgtggcaatgggtaatgaacgactaacttatgctgattggtaatttaacgtgagcagctgttatgaccgcttt

SEQ ID NO: 78155 - DNA, 1916 bp, Zea Mays
gcgagcccacgtacttttacggaaacgcccacaccgccggctcgtcttctcccgaacccgaacccaccctccccgattcaaaccgtcgccgccgtcgccgagagagtcgtgactccccccagcggcggcctgcgaccacccgttacccagccgtcccttctccgcagacagcatttgcgcccaccccgtcccgtcccgtcccctctccctcgcggaggcccgagagctttgagctgcctcggttaagtcgtcgagtggtccacagggccgccgccgcggcggcggttacaaagcggggagggaattccggcgcgggatgccgcgatcccgctgcgatgcgcggatcagaatatgggtgtgacccaaccgggaagtagtggacactgctggtggaggactagggcctggagtgggagggagctgcggccgcgacgatgtacgtcgcgcgggagtctaccaagctgtggaggagggtgtgcgcggagacgacggcggagctgcagctcctgctccagaagtggcaactgctacttgcagggttggtatttcagtaatggatgattttggagatttacgcaatcgttttgcctataactagtacatccatggattagctgctcgaggagtgcattacttgcatcagcccggaccactgctccaggacttgggatttatggcccttccagagcttggccaagagaaaggttatcttagtgaaagcgttttcactttcatcttcatttcctttctgttgtggagttttcacccttttatttatcatagcaaacgtttctacactgttctactatggcgaagggtgctggcatttctagtggcttcgcagtttttaaggattatgacattctattccactcaacttcctggtcccaattatcactgccgtgagggctcaaaactggccactctcccaccaccaaataatgcacttgaagtgctcctgattaactttcctcgtggagtgctttttggttgtggtgatctgatattttcatctcacatgatcttcactctggtttttgtgcgcacataccataaatatggctcaaacaggttgattaagctcctttcttggtttatggctgtaattcagagtcttcttataattgcttctcgcaagcactacactgtcgatgttgttgttgcttggtaggacaaaaacctaatttcagtgacatggttatcttggagtagcacctgccttccttttttacagtctctttccacaggtacacggttaatttggttgtattttttgttgataacaagctgccagaaatggcagaccgtacaaatggattgtctctgcttccagtaagcacaaaggataaagacggcaggatgaaggaagaactccataaacttgagaaggacgggaggatgatggatgagttccataaattgttaaatggaaactctatcgatgctacagattggatgaatggaaagcacggagaagacacgagccacactgtcgctgatgccacctctgctgggacatgaccagcagcatttctctgtcaatatcgtcttcaatatccacagatggaatctgcgagcaaaaagaaaattgtgtggtgtgctgcctctatcattgtgtgatgaaaggcttctcaggtacccgcgaggttgcgacattcataacagagcgttttgttgtgctttccatggcacgatgacagtctgttgaagtagtaacggaatcaggaccttttcggcttttctatgaggccgcagctacagttttgcatccttcagacgtttcagtgtcgatgatgttagagagggagattgatgtttgatgtaaatattgattagattcagctgtggcaatgggtaatgaacgactaacttatgctgattggtaatttaacgtgagcagctgttatgaccgcttt

SEQ ID NO: 78156 - DNA, 1879 bp, Zea Mays
gcgagcccacgtacttttacggaaacgcccacaccgccggctcgtcttctcccgaacccgaacccaccctccccgattcaaaccgtcgccgccgtcgccgagagagtcgtgactccccccagcggcggcctgcgaccacccgttacccagccgtcccttctccgcagacagcatttgcgcccaccccgtcccgtcccgtcccctctccctcgcggaggcccgagagctttgagctgcctcggttaagtcgtcgagtggtccacagggccgccgccgcggcggcggttacaaagcggggagggaattccggcgcgggatgccgcgatcccgctgcgatgcgcggatcagaatatgggtgtgacccaaccgggaagtagtggacactgctggtggaggactagggcctggagtgggagggagctgcggccgcgacgatgtacgtcgcgcgggagtctaccaagctgtggaggagggtgtgcgcggagacgacggcggagctgcagctcctgctccagaagtggcaactgctacttgcagggttggtatttcagtacatccatggattagctgctcgaggagtgcattacttgcatcagcccggaccactgctccaggacttgggatttatggcccttccagagcttggccaagagaaaggttatcttagtgaaagcgttttcactttcatcttcatttcctttctgttgttttcacccttttatttatcatagcaaacgtttctacactgttctactatggcgaagggtgctggcatttctagtggcttcgcagtttttaaggattatgacattctattccactcaacttcctggtcccaattatcactgccgtgagggctcaaaactggccactctcccaccaccaaataatgcacttgaagtgctcctgattaactttcctcgtggagtgctttttggttgtggtgatctgatattttcatctcacatgatcttcactctggtttttgtgcgcacataccataaatatggctcaaacaggttgattaagctcctttcttggtttatggctgtaattcagagtcttcttataattgcttctcgcaagcactacactgtcgatgttgttgttgcttggtaggacaaaaacctaatttcagtgacatggttatcttggagtagcacctgccttccttttttacagtctctttccacaggtacacggttaatttggttgtattttttgttgataacaagctgccagaaatggcagaccgtacaaatggattgtctctgcttccagtaagcacaaaggataaagacggcaggatgaaggaagaactccataaacttgagaaggacgggaggatgatggatgagttccataaattgttaaatggaaactctatcgatgctacagattggcgacaacgagtgcagatgaatggaaagcacggagaagacacgagccacactgtcgctgatgccacctctgctgggacatgaccagcagcatttctctgtcaatatcgtcttcaatatccacagatggaatctgcgagcaaaaagaaaattgtgtggtgtgctgcctctatcattgtgtgatgaaaggcttctcaggtacccgcgaggttgcgacattcataacagagcgttttgttgtgctttccatggcacgatgacagtctgttgaagtagtaacggaatcaggaccttttcggcttttctatgaggccgcagctacagttttgcatccttcagacgtttcagtgtcgatgatgttagagagggagattgatgtttgatgtaaatattgattagattcagctgtggcaatgggtaatgaacgactaacttatgctgattggtaatttaacgtgagcagctgttatgaccgcttt

SEQ ID NO: 78157 - DNA, 1792 bp, Zea Mays
gcgagcccacgtacttttacggaaacgcccacaccgccggctcgtcttctcccgaacccgaacccaccctccccgattcaaaccgtcgccgccgtcgccgagagagtcgtgactccccccagcggcggcctgcgaccacccgttacccagccgtcccttctccgcagacagcatttgcgcccaccccgtcccgtcccgtcccctctccctcgcggaggcccgagagctttgagctgcctcggttaagtcgtcgagtggtccacagggccgccgccgcggcggcggttacaaagcggggagggaattccggcgcgggatgccgcgatcccgctgcgatgcgcggatcagaatatgggtgtgacccaaccgggaagtagtggacactgctggtggaggactagggcctggagtgggagggagctgcggccgcgacgatgtacgtcgcgcgggagtctaccaagctgtggaggagggtgtgcgcggagacgacggcggagctgcagctcctgctccagaagtggcaactgctacttgcagggttggtatttcagtacatccatggattagctgctcgaggagtgcattacttgcatcagcccggaccactgctccaggacttgggatttatggcccttccagagcttggccaagagaaaggttatcttagtgaaagcgttttcactttcatcttcatttcctttctgttgtggagttttcacccttttatttatcatagcaaacgtttctacactgttctactatggcgaagggtgctggcatttctagtggcttcgcagtttttaaggattatgacattctattccactcaacttcctggtcccaattatcactgccgtgagggctcaaaactggccactctcccaccaccaaataatgcacttgaagtgctcctgattaacttgctttttggttgtggtgatctgatattttcatctcacatgatcttcactctggtttttgtgcgcacataccataaatatggctcaaacaggttgattaagctcctttcttggtttatggctgtaattcagagtcttcttataattgcttctcgcaagcactacactgtcgatgttgttgttgcttggtacacggttaatttggttgtattttttgttgataacaagctgccagaaatggcagaccgtacaaatggattgtctctgcttccagtaagcacaaaggataaagacggcaggatgaaggaagaactccataaacttgagaaggacgggaggatgatggatgagttccataaattgttaaatggaaactctatcgatgctacagattggcgacaacgagtgcagatgaatggaaagcacggagaagacacgagccacactgtcgctgatgccacctctgctgggacatgaccagcagcatttctctgtcaatatcgtcttcaatatccacagatggaatctgcgagcaaaaagaaaattgtgtggtgtgctgcctctatcattgtgtgatgaaaggcttctcaggtacccgcgaggttgcgacattcataacagagcgttttgttgtgctttccatggcacgatgacagtctgttgaagtagtaacggaatcaggaccttttcggcttttctatgaggccgcagctacagttttgcatccttcagacgtttcagtgtcgatgatgttagagagggagattgatgtttgatgtaaatattgattagattcagctgtggcaatgggtaatgaacgactaacttatgctgattggtaatttaacgtgagcagctgttatgaccgcttt

SEQ ID NO: 78158 - DNA, 447 bp, Zea Mays
aaacaacatcatgagcagcaggtgcccacggccgtggtggcctgcgcgagaggaaatgtagtgttagctctagcagtgttctctacctgagagaccgatttgctagatgttttagactttggattcaatacaatccgctggttacatggatattatcctgaattgcgctatgggttttcaacctatttagttattcaagaagtcttgctagagaagggaagcagtaactcgaagcctcaccataagccgtccacacatgctgtgtaccttcgatatttagtggctttgtatggtaacttcatttcctggtttgtgtaaataaaattgttatgaaaagccatcggttactggaagacttgggaatgtacattgcctcgcgcaatctcatctcatcaaatgaatggcccttactggcaccaagacctttagggtgcagtgctttgcttt

SEQ ID NO: 78159 - DNA, 1986 bp, Zea Mays
gtagtttgaccacctcacctccctccactccgcaaggcctctcgccgtccttctccttcgacattctcgctgcgctggccgcctgcccccccctctccgtccgtaagctttggccggggcagataacaaaatctgatatccctggggcttcgctgcgccgggtcccctaccttctcacctcacgcaaagcagaagggggaggagttttaggaggtggcaagaggagccatcatcgtgtccgtccgtgctgcccattattgtttcttcttccagcggcaatttctggccacagtggcgggcgctatattactcacaggttcgtggccggtcccggtccgtccgagcaagcagagcggcgtgtcgttcatggcggaggagtgcccgcccactggcggcggcgtggagctctggcttccggacgagttcctggacgacgattttttctccgaggaggagaaggcggcggtcgccgccaggagcgagaacgacgacgaggaggaaggggctgacggcctcccgcgccgcagggctgggctcgtcgtcggcaacgcgaagggccagggggacggttcccctgcaaatgcggaggtgttggccggctcgccgcagtcgattctgtgcggcctgcaggactatggggaggacagccccaacggcgcggcgtcgaaggtttgctcgccgccgtcgtcgccgctggagcgcccgccggcggatccctgggacgttcttaaagaggcggctggccaggtggctcgcctgcgcacaaacagcacccccgtgccaacgaacgacgctgccgccaaccaaggactccccgtcacgccgccggcgaagaagctctccgcgccggcggagactgcgaaggccaaccactcccagccgccgaataactcggtggaagagcgacggattcagattgctcgttttaatgccctgaagcagcggcagctcctcaagcaccggcgggatcgggagctcgccgtcgccacggcggcggcgtggggcaccagtgttgctgggtctcatcgtgccgctgccgccgccgccggcgggtacggtgcgccggcgccggcgccggcgccacgtgtcctgagctcgtacgcgtggcccccgctacagaagcagcggcaggcgccggcgtccccggagggcgtgcgcgccctcttcctcgcccctcctcctggcgccacgcgcgagtgcgccggcaccggcgtgttcatccctcgccaggccggcgcccccgctgagcccaagaaaaggccagcgtgctcgcctgttcttctcccggtgcgcgtcgtgcaggcactcaacctgaacgtcgtggacctcggagcccgtcccatctaccctggcggtttcgttctcgatcacgtcgcatgctcctgtcgtgatcttgcttcgtcagatgcgctggtgagtcggagcaacgccctgctggcgagccgtccgtcccagctccaccatggcgcctcctctcgcgaggtgaatctcccccaggaatggacgtattgaaagcgccgaatcggcaccgctgacgatctcccctaggttgacgggtcatatttgagacaaaaattactgtcgctaatgctagggataggtaggaaggggtagcgtttgctcgcgtgggttagagcgagagtgtgcatagttgtttgactaggaagttggaggcagcaggggttgcatcatcttttgcggtgcagaaacgcatcaggctctcttgcttcttttgttcccgttgcttcaagggtaaggaatctccatctccaggacagaaatagaaccaaccacagtaggagtactaccactccagttttggctgcggcttcatcgttttttatgattgttggagtgcttggttcggttcggcgtggttggagttgggtgcaggaagaacaacaggtgggttgtttcagtgtacttcttgtgagtctagttgcattaacttgacggcttgtgtgcccgttgttctggcttattttt

SEQ ID NO: 78160 - DNA, 1111 bp, Zea Mays
gcgagcagtctcgagtgatcccccctgtagtccccggccccgtctctccgccgccgcctgcaaccgcttcacgtgcccctcgcaggtcccctttccgaccccaaatggagccgaagaaatcctccgtccagcgccagccccacgccatggagcccaacaagtcctctccatgcggcgccaccgccaccgctcccgccgccaccaccgaagccgagtccccgttgtgcagcttgttctacccgccggcgccggcgccgaccgcggcaaatgggaaagattcggacttgtacagcattctttacaaagggcagagcgggagcgcacaagctggcgtcacaggtaatggtaaaccgcaatgggctccttccagaagtcgtgccgcgaatgcgaaggacggtaaacattcaccgccttatgactcagttgatacgtcgtgttttggatcgtctgtggattatggtggtcgagattatttctacggcagctctacgcccaagaaagtgacagaatcctccactgactacaaagggaacaagaaagatcccgccgcagattctcatggcgattggtggcaaggctcattttattactaagagaacccggtggcctctccttggacaacaaggaacagaaggagattctattgacagttcttctggaacagaagaacagaaagagaaaatagtattgtcggtgtcatagtgaacccgctttcgttcagtggtggtgccattatctagaagcatcatctcagatgtgcaagcaatgaagctgtaggacagtacgaattaggtcgcataagggtccttgtccattgtacgccagtaatatgaagggtttggtgtctaattattagtcaaatgtctgtacagttggatcgtcactccaaagcaaaaaaaaagtgctggagaagcggcggtggcttcacattgtacattttttttatcggatgggatttgactgaagtttggagactgttcttgtcaattacattatacaggtatcgacttcaggggaaaaaacttctatttcctaagttcaggcattattacagccacaatattctaggtatcgatatgacatgacacggcatattgccggtcagagtttg

SEQ ID NO: 78161 - DNA, 1146 bp, Zea Mays
gcgagcagtctcgagtgatcccccctgtagtccccggccccgtctctccgccgccgcctgcaaccgcttcacgtgcccctcgcaggtcccctttccgaccccaaatggagccgaagaaatcctccgtccagcgccagccccacgccatggagcccaacaagtcctctccatgcggcgccaccgccaccgctcccgccgccaccaccgaagccgagtccccgttgtgcagcttgttctacccgccggcgccggcgccgaccgcggcaaatgggaaagattcggacttgtacagcattctttacaaagggcagagcgggagcgcacaagctggcgtcacagatggtaaaccgcaatgggctccttccagaagtcgtgccgcgaatgcgaaggacggtaaacattcaccgccttatgactcagttgatacgtcgtgttttggatcgtctgtggattatggtggtcgagattatttctacggcagctctacgcccaagaaagtgacagaatcctccactgacgtaagaatcactgaaaccttcaaatagaactctttctgtacaaagggaacaagaaagatcccgccgcagattctcatggcgattggtggcaaggctcattttattactaagagaacccggtggcctctccttggacaacaaggaacagaaggagattctattgacagttcttctggaacagaagaacagaaagagaaaatagtattgtcggtgtcatagtgaacccgctttcgttcagtggtggtgccattatctagaagcatcatctcagatgtgcaagcaatgaagctgtaggacagtacgaattaggtcgcataagggtccttgtccattgtacgccagtaatatgaagggtttggtgtctaattattagtcaaatgtctgtacagttggatcgtcactccaaagcaaaaaaaaagtgctggagaagcggcggtggcttcacattgtacattttttttatcggatgggatttgactgaagtttggagactgttcttgtcaattacattatacaggtatcgacttcaggggaaaaaacttctatttcctaagttcaggcattattacagccacaatattctaggtatcgatatgacatgacacggcatattgccggtcagagtttg

SEQ ID NO: 78162 - DNA, 2692 bp, Zea Mays
acgaggcgagcagtctcgagtgatcccccctgtagtccccggccccgtctctccgccgccgcctgcaaccgcttcacgtgcccctcgcaggtcccctttccgaccccaaatggagccgaagaaatcctccgtccagcgccagccccacgccatggagcccaacaagtcctctccatgcggcgccaccgccaccgctcccgccgccaccaccgaagccgagtccccgttgtgcagcttgttctacccgccggcgccggcgccgaccgcggcaaatgggaaagattcggacttgtacagcattctttacaaagggcagagcgggagcgcacaagctggcgtcacagatggtaaaccgcaatgggctccttccagaagtcgtgccgcgaatgcgaaggacggtaaacattcaccgccttatgactcagttgatacgtcgtgttttggatcgtctgtggattatggtggtcgagattatttctacggcagctctacgcccaagaaagtgacagaatcctccactgactacaaagggaacaagaaagatcccgccgcagattctcatggcgattggtggcaaggctcattttattactaagagaacccggtggcctctccttggacaacaaggtaaacagaaggatcctattactgttaaagctaccaagtttgttgctacaacgcatatgctatccatctcacattttttaccagagaatgtttttcaaattccattttaatactcgcagctgatagtttgtagataacgatgttggctcacttggcctgtgatacatcacgtgtaatcttatttcttcatatagaagggagcgtatgtcctctacttctccaaacgttattttcctcgctatttaattttaaacaacaaaggattccttttccatggatctcctctatttacatgttcggttttactcccatctatatggattgtaggagatttggtaggtttaaatctatagcgagtcaacatctctactagcttttttctaatcctatccaatacgtgtggagtaggaataaccgaataaggcttaaagaggatgcccagccaatcccactcctatgttgaaattctgttaacgcatagttcgacgtttaggctatcttccaactctgcctttcgtgtttgcggtatcaacctataaagataaacttatttatttgtttcattctttatgtgtctcgagctgtcatcatcttttttggtagacaacaattttttctgcagaactagctgccggattgctgtacaatgatgtgcatgtggagaaaggccagtgggtggggtgggatcaactgtattggagtgaaagctttgattgacatctaccttaacatcatttccatattgcgtaggcaaatcattaactattgctgttttggtattgttttggctgataactagtcacatcgtttttagtatggttacatgggctaccgttgtttgtcacctaaacagtttggtaggtagcaaggataatgaaagggattgagggaacctaaataggtattttggtcccttcaatcacctccattactcttgctacaagcaagcctttagagtgagaagccaatcaaggaaagcacacctgactattaattgagcgcagtgatgtgatgtttcattatattggagcgcaagggaaaccttagacaataatagtgtaaattagatatcgccacaactttatttccatgtcaagaagctaagcagaattaaaatgttaactctgttgatctactatattatattacttggctggtgttaccatcttccatgctttttttttgttatttaaaaaaaagacaaatccaatgtcggagggcttccacgtacgtaatctcaaatccttatggatcagagggagtcttctctaaagcatagaaatggttggtttgttaacgcatagaaaatcaatgacaaagatctagagtttgtatgaaattgaaattgaaaatggagataggtgccaagcatttatatgtaactgatgctctactctacctgttgttatgcaccctttggtgaatagtagaagtatttattatcatgttattaatttttccagctgatgctctactctacctgttgttatgcaccctttggtgaatagtagaagtatttattattatgttattaatttttccagctgtcctcagaattatattggattctgcatggcaggaacagaaggagattctattgacagttcttctggaacagaagaacagaaagagaaaatagtattgtcggtgtcatagtgaacccgctttcgttcagtggtggtgccattatctagaagcatcatctcagatgtgcaagcaatgaagctgtaggacagtacgaattaggtcgcataagggtccttgtccattgtacgccagtaatatgaagggtttggtgtctaattattagtcaaatgtctgtacagttggatcgtcactccaaagcaaaaaaaaagtgctggagaagcggcggtggcttcacattgtacattttttttatcggatgggatttgactgaagtttggagactgttcttgtcaattacattatacaggtatcgacttcaggggaaaaaacttctatttcctaagttcaggcattattacagccacaatattctaggtatcgatatgacatgacacggcatattgccggtcagagtttg

SEQ ID NO: 78163 - DNA, 1114 bp, Zea Mays
cacgaggcgagcagtctcgagtgatcccccctgtagtccccggccccgtctctccgccgccgcctgcaaccgcttcacgtgcccctcgcaggtcccctttccgaccccaaatggagccgaagaaatcctccgtccagcgccagccccacgccatggagcccaacaagtcctctccatgcggcgccaccgccaccgctcccgccgccaccaccgaagccgagtccccgttgtgcagcttgttctacccgccggcgccggcgccgaccgcggcaaatgggaaagattcggacttgtacagcattctttacaaagggcagagcgggagcgcacaagctggcgtcacagatggtaaaccgcaatgggctccttccagaagtcgtgccgcgaatgcgaaggacggtaaacattcaccgccttatgactcagttgatacgtcgtgttttggatcgtctgtggattatggtggtcgagattatttctacggcagctctacgcccaagaaagtgacagaatcctccactgactacaaagggaacaagaaagatcccgccgcagattctcatggcgattggtggcaaggctcattttattactaagagaacccggtggcctctccttggacaacaaggaacagaaggagattctattgacagttcttctggaacagaagaacagaaagagaaaatagtattgtcggtgtcatagtgaacccgctttcgttcagtggtggtgccattatctagaagcatcatctcagatgtgcaagcaatgaagctgtaggacagtacgaattaggtcgcataagggtccttgtccattgtacgccagtaatatgaagggtttggtgtctaattattagtcaaatgtctgtacagttggatcgtcactccaaagcaaaaaaaaagtgctggagaagcggcggtggcttcacattgtacattttttttatcggatgggatttgactgaagtttggagactgttcttgtcaattacattatacaggtatcgacttcaggggaaaaaacttctatttcctaagttcaggcattattacagccacaatattctaggtatcgatatgacatgacacggcatattgccggtcagagtttg

SEQ ID NO: 78164 - DNA, 2759 bp, Zea Mays
ggaagtccccggaccggccctttaaatacgggggtcacgcatggaggccggagcacagaacgccacgaggcgagcagtctcgagtgatcccccctgtagtccccggccccgtctctccgccgccgcctgcaaccgcttcacgtgcccctcgcaggtcccctttccgaccccaaatggagccgaagaaatcctccgtccagcgccagccccacgccatggagcccaacaagtcctctccatgcggcgccaccgccaccgctcccgccgccaccaccgaagccgagtccccgttgtgcagcttgttctacccgccggcgccggcgccgaccgcggcaaatgggaaagattcggacttgtacagcattctttacaaagggcagagcgggagcgcacaagctggcgtcacaggtaatggtaaaccgcaatgggctccttccagaagtcgtgccgcgaatgcgaaggacggtaaacattcaccgccttatgactcagttgatacgtcgtgttttggatcgtctgtggattatggtggtcgagattatttctacggcagctctacgcccaagaaagtgacagaatcctccactgactacaaagggaacaagaaagatcccgccgcagattctcatggcgattggtggcaaggctcattttattactaagagaacccggtggcctctccttggacaacaaggtaaacagaaggatcctattactgttaaagctaccaagtttgttgctacaacgcatatgctatccatctcacattttttaccagagaatgtttttcaaattccattttaatactcgcagctgatagtttgtagataacgatgttggctcacttggcctgtgatacatcacgtgtaatcttatttcttcatatagaagggagcgtatgtcctctacttctccaaacgttattttcctcgctatttaattttaaacaacaaaggattccttttccatggatctcctctatttacatgttcggttttactcccatctatatggattgtaggagatttggtaggtttaaatctatagcgagtcaacatctctactagcttttttctaatcctatccaatacgtgtggagtaggaataaccgaataaggcttaaagaggatgcccagccaatcccactcctatgttgaaattctgttaacgcatagttcgacgtttaggctatcttccaactctgcctttcgtgtttgcggtatcaacctataaagataaacttatttatttgtttcattctttatgtgtctcgagctgtcatcatcttttttggtagacaacaattttttctgcagaactagctgccggattgctgtacaatgatgtgcatgtggagaaaggccagtgggtggggtgggatcaactgtattggagtgaaagctttgattgacatctaccttaacatcatttccatattgcgtaggcaaatcattaactattgctgttttggtattgttttggctgataactagtcacatcgtttttagtatggttacatgggctaccgttgtttgtcacctaaacagtttggtaggtagcaaggataatgaaagggattgagggaacctaaataggtattttggtcccttcaatcacctccattactcttgctacaagcaagcctttagagtgagaagccaatcaaggaaagcacacctgactattaattgagcgcagtgatgtgatgtttcattatattggagcgcaagggaaaccttagacaataatagtgtaaattagatatcgccacaactttatttccatgtcaagaagctaagcagaattaaaatgttaactctgttgatctactatattatattacttggctggtgttaccatcttccatgctttttttttgttatttaaaaaaaagacaaatccaatgtcggagggcttccacgtacgtaatctcaaatccttatggatcagagggagtcttctctaaagcatagaaatggttggtttgttaacgcatagaaaatcaatgacaaagatctagagtttgtatgaaattgaaattgaaaatggagataggtgccaagcatttatatgtaactgatgctctactctacctgttgttatgcaccctttggtgaatagtagaagtatttattatcatgttattaatttttccagctgatgctctactctacctgttgttatgcaccctttggtgaatagtagaagtatttattattatgttattaatttttccagctgtcctcagaattatattggattctgcatggcaggaacagaaggagattctattgacagttcttctggaacagaagaacagaaagagaaaatagtattgtcggtgtcatagtgaacccgctttcgttcagtggtggtgccattatctagaagcatcatctcagatgtgcaagcaatgaagctgtaggacagtacgaattaggtcgcataagggtccttgtccattgtacgccagtaatatgaagggtttggtgtctaattattagtcaaatgtctgtacagttggatcgtcactccaaagcaaaaaaaaagtgctggagaagcggcggtggcttcacattgtacattttttttatcggatgggatttgactgaagtttggagactgttcttgtcaattacattatacaggtatcgacttcaggggaaaaaacttctatttcctaagttcaggcattattacagccacaatattctaggtatcgatatgacatgacacggcatattgccggtcagagtttg

SEQ ID NO: 78165 - DNA, 2680 bp, Zea Mays
ggaagtccccggaccggccctttaaatacgggggtcacgcatggaggccggagcacagaacgccacgaggcgagcagtctcgagtgatcccccctgtagtccccggccccgtctctccgccgccgcctgcaaccgcttcacgtgcccctcgcaggtcccctttccgaccccaaatggagccgaagaaatcctccgtccagcgccagccccacgccatggagcccaacaagtcctctccatgcggcgccaccgccaccgctcccgccgccaccaccgaagccgagtccccgttgtgcagcttgttctacccgccggcgccggcgccgaccgcgatggtaaaccgcaatgggctccttccagaagtcgtgccgcgaatgcgaaggacggtaaacattcaccgccttatgactcagttgatacgtcgtgttttggatcgtctgtggattatggtggtcgagattatttctacggcagctctacgcccaagaaagtgacagaatcctccactgactacaaagggaacaagaaagatcccgccgcagattctcatggcgattggtggcaaggctcattttattactaagagaacccggtggcctctccttggacaacaaggtaaacagaaggatcctattactgttaaagctaccaagtttgttgctacaacgcatatgctatccatctcacattttttaccagagaatgtttttcaaattccattttaatactcgcagctgatagtttgtagataacgatgttggctcacttggcctgtgatacatcacgtgtaatcttatttcttcatatagaagggagcgtatgtcctctacttctccaaacgttattttcctcgctatttaattttaaacaacaaaggattccttttccatggatctcctctatttacatgttcggttttactcccatctatatggattgtaggagatttggtaggtttaaatctatagcgagtcaacatctctactagcttttttctaatcctatccaatacgtgtggagtaggaataaccgaataaggcttaaagaggatgcccagccaatcccactcctatgttgaaattctgttaacgcatagttcgacgtttaggctatcttccaactctgcctttcgtgtttgcggtatcaacctataaagataaacttatttatttgtttcattctttatgtgtctcgagctgtcatcatcttttttggtagacaacaattttttctgcagaactagctgccggattgctgtacaatgatgtgcatgtggagaaaggccagtgggtggggtgggatcaactgtattggagtgaaagctttgattgacatctaccttaacatcatttccatattgcgtaggcaaatcattaactattgctgttttggtattgttttggctgataactagtcacatcgtttttagtatggttacatgggctaccgttgtttgtcacctaaacagtttggtaggtagcaaggataatgaaagggattgagggaacctaaataggtattttggtcccttcaatcacctccattactcttgctacaagcaagcctttagagtgagaagccaatcaaggaaagcacacctgactattaattgagcgcagtgatgtgatgtttcattatattggagcgcaagggaaaccttagacaataatagtgtaaattagatatcgccacaactttatttccatgtcaagaagctaagcagaattaaaatgttaactctgttgatctactatattatattacttggctggtgttaccatcttccatgctttttttttgttatttaaaaaaaagacaaatccaatgtcggagggcttccacgtacgtaatctcaaatccttatggatcagagggagtcttctctaaagcatagaaatggttggtttgttaacgcatagaaaatcaatgacaaagatctagagtttgtatgaaattgaaattgaaaatggagataggtgccaagcatttatatgtaactgatgctctactctacctgttgttatgcaccctttggtgaatagtagaagtatttattatcatgttattaatttttccagctgatgctctactctacctgttgttatgcaccctttggtgaatagtagaagtatttattattatgttattaatttttccagctgtcctcagaattatattggattctgcatggcaggaacagaaggagattctattgacagttcttctggaacagaagaacagaaagagaaaatagtattgtcggtgtcatagtgaacccgctttcgttcagtggtggtgccattatctagaagcatcatctcagatgtgcaagcaatgaagctgtaggacagtacgaattaggtcgcataagggtccttgtccattgtacgccagtaatatgaagggtttggtgtctaattattagtcaaatgtctgtacagttggatcgtcactccaaagcaaaaaaaaagtgctggagaagcggcggtggcttcacattgtacattttttttatcggatgggatttgactgaagtttggagactgttcttgtcaattacattatacaggtatcgacttcaggggaaaaaacttctatttcctaagttcaggcattattacagccacaatattctaggtatcgatatgacatgacacggcatattgccggtcagagtttg

SEQ ID NO: 78166 - DNA, 2388 bp, Zea Mays
gtacaaatgccaaaacagttagtttttaaaattatcttcatggtgaagcaactgaattttcaagggtatgaggtgattctggtaacctcaggagctgttggtgttgggaggcagaggctccaataccgtaaacttatccatagcagcttcgcagatctgcaaaatcctcagatgaactttgatggaaaggcatgtgctgctgttggtcaaagtgtcctgatggcgatctatgacacattatttagccaacttgatgtaacgtcatctcaacttcttgtgacggatcgtgatttcaaggatccaagttttggggaccagctccgtgagactgttttttcactgttagatcttaaagtagtacccttatttaatgagaatgatgccatcagtacccggagacagccatatgaggattcatctggtatattctgggataatgacagtctagcagctctgttggcagcagaacttaatgctgatcttcttatcatgcttagtgatgtggaaggactctatagtggtccaccaagcgatcctcagtcaaagattatccacacatatgtcaatgaaaagcatgggaagctaattagttttggagagaagtctagtgttggaagaggtggcatgcaagctaaagtgtctgctgctgctaatgctgcatcaaaaggtgtacctgttgtcattgcaagtgggtttgcaacggatagcatcattacagttctcaaaggcgaaaagatcggtacacttttccacaacgaagcaaatttgtgggcatgttccaaggaagctacagcccgagagatggcagttgcggcaagagactgttcgaggcgtctacagaagttgtcatcagaggaacgcaaacagattttgctagatattgctgatgctctggaagcaaatgaggatgcaattaggtctgaaaatgatgccgatgttgaggcagcacaagttgctggttatgaaaagtcgttggttgctaggatgaccctaaagccaggaaagataacaaatcttgcaagatccattcgtaaaactgctgacatggaggaccctatttcccatacattgaaaagaacagaggttgctaaagatctggtttttgagaaagcatattgcccattgggtgttcttctcattatttttgagtctcgtcctgatgcattggtccagattgcatctctagcgatccgaagtggtaatggtctccttttgaaaggagggaaagaagttatgagatcaaatgcaatattacacaaggtcataactggagttattcccgatactgttggcaaaaagctcataggccttgtgactagcaaagaggaaattgctgatctactagcgcttgatgatgtaattgatcttgtcattccgagaggtagtaagtctctagtttcccaaatcaaagcaacaactaagattccagttttaggtcatgctgatggtatctgccatgtttacattgacaaatcagccgacatggatatggcaaaacggatagtattggatgctaagattgattatccagcagcatgtaatgcaatggaaacactacttgttcataaagatcttaacaagagtgagggacttgatgatctattagtggaacttgaaaaggaaggagtagttatttatggtggacctgttgcacatgacaagttgaaagtaccaaaggtagactcatttcgtcatgagtatagctcaatggcatgcacagtcgaatttgttgatgatgtgcagtcagctatcgatcacataaatcgttatggaagtgcacacacagactgcatcatcacaactgatagaagtgctgcagaggcctttctgcagcaagttgatagtgccgctgtgtttcataatgcaagcacaaggttttgtgatgggacgcgttttgggctaggtgctgaggttggcataagtacagagcgcatacatgcccgcggacctgttggagttgatggacttctaactactcgctgcattttgcgcggtagtggacaagtggtgaatggtgacaagggagtggtttacacccacaaggatcttcctttgcaatgaggcaaataacctccgttgtggtcgtaacgaatggctggactccccttttaagtacccttttcttttattccatgctacaaagtttggtgtcgtaacaagcagaatgcctatttagtaggcattgatgtaatcagaccattttgtcgtggtgttccttgtcgtataaaacatccgagacatctgtattagaggcgcggtagctagttgatacgcgattgttctggatgaaatttggatctgttccaatgcaatgataatgcatgtgtgatgaggtcctaaaaatctctgaatcgggattttggctcaaggagaatcgttttgttgcgg

SEQ ID NO: 78167 - DNA, 2369 bp, Zea Mays
tagcttcagatttttcaaactatgtgaagcaactgaattttcaagggtatgaggtgattctggtaacctcaggagctgttggtgttgggaggcagaggctccaataccgtaaacttatccatagcagcttcgcagatctgcaaaatcctcagatgaactttgatggaaaggcatgtgctgctgttggtcaaagtgtcctgatggcgatctatgacacattatttagccaacttgatgtaacgtcatctcaacttcttgtgacggatcgtgatttcaaggatccaagttttggggaccagctccgtgagactgttttttcactgttagatcttaaagtagtacccttatttaatgagaatgatgccatcagtacccggagacagccatatgaggattcatctggtatattctgggataatgacagtctagcagctctgttggcagcagaacttaatgctgatcttcttatcatgcttagtgatgtggaaggactctatagtggtccaccaagcgatcctcagtcaaagattatccacacatatgtcaatgaaaagcatgggaagctaattagttttggagagaagtctagtgttggaagaggtggcatgcaagctaaagtgtctgctgctgctaatgctgcatcaaaaggtgtacctgttgtcattgcaagtgggtttgcaacggatagcatcattacagttctcaaaggcgaaaagatcggtacacttttccacaacgaagcaaatttgtgggcatgttccaaggaagctacagcccgagagatggcagttgcggcaagagactgttcgaggcgtctacagaagttgtcatcagaggaacgcaaacagattttgctagatattgctgatgctctggaagcaaatgaggatgcaattaggtctgaaaatgatgccgatgttgaggcagcacaagttgctggttatgaaaagtcgttggttgctaggatgaccctaaagccaggaaagataacaaatcttgcaagatccattcgtaaaactgctgacatggaggaccctatttcccatacattgaaaagaacagaggttgctaaagatctggtttttgagaaagcatattgcccattgggtgttcttctcattatttttgagtctcgtcctgatgcattggtccagattgcatctctagcgatccgaagtggtaatggtctccttttgaaaggagggaaagaagttatgagatcaaatgcaatattacacaaggtcataactggagttattcccgatactgttggcaaaaagctcataggccttgtgactagcaaagaggaaattgctgatctactagcgcttgatgatgtaattgatcttgtcattccgagaggtagtaagtctctagtttcccaaatcaaagcaacaactaagattccagttttaggtcatgctgatggtatctgccatgtttacattgacaaatcagccgacatggatatggcaaaacggatagtattggatgctaagattgattatccagcagcatgtaatgcaatggaaacactacttgttcataaagatcttaacaagagtgagggacttgatgatctattagtggaacttgaaaaggaaggagtagttatttatggtggacctgttgcacatgacaagttgaaagtaccaaaggtagactcatttcgtcatgagtatagctcaatggcatgcacagtcgaatttgttgatgatgtgcagtcagctatcgatcacataaatcgttatggaagtgcacacacagactgcatcatcacaactgatagaagtgctgcagaggcctttctgcagcaagttgatagtgccgctgtgtttcataatgcaagcacaaggttttgtgatgggacgcgttttgggctaggtgctgaggttggcataagtacagagcgcatacatgcccgcggacctgttggagttgatggacttctaactactcgctgcattttgcgcggtagtggacaagtggtgaatggtgacaagggagtggtttacacccacaaggatcttcctttgcaatgaggcaaataacctccgttgtggtcgtaacgaatggctggactccccttttaagtacccttttcttttattccatgctacaaagtttggtgtcgtaacaagcagaatgcctatttagtaggcattgatgtaatcagaccattttgtcgtggtgttccttgtcgtataaaacatccgagacatctgtattagaggcgcggtagctagttgatacgcgattgttctggatgaaatttggatctgttccaatgcaatgataatgcatgtgtgatgaggtcctaaaaatctctgaatcgggattttggctcaaggagaatcgttttgttgcgg

SEQ ID NO: 78168 - DNA, 3041 bp, Zea Mays
ctaggtgttctgagacgcgacctctgatcaaatgggcgcgcaacaggtcaccgcagaggacgtctggcatttgggctggtggtacaaaaaaaaatctatcaaagcctgagaggccgtagcacaaccaccttccctgccctgccctcagtgccctgtcaaggatattttaggcaatgcgttgcccaattccacaggccacgtcacacgtggtgcggctctaaccgtatcgtccctgcccggtggggccgcggtcgcgtagcagacaccgacgggccgtcacgggccctgctcgccgcagacgatccaggggccaggcggcgcgcgggtgatctcgccacggcgcgttttgtgtggcccgcccgtgacgggaggcggaagagggaagaggcgacgcgacgcggctctataaaaccgcgcctccaaccagtactcccccggcaccctagagagattctgttttcgcaccagcgccggcacaggcaacgcagcaccgcaccgagccgagccacttagcgagcgagggaacagcctccacggcgaggagagaatggggagaggagggatcggaggcgcggcggccatggccatggccatggagaccgccgatcctgcccgtgcattcgtgaaggacgtcaagcgaatcattatcaaggtgggcacggctgttgtcactggcatgaatggccgattggccatggggaggctcggttctctctgtgaacaggtgaagcaactgaattttcaagggtatgaggtgattctggtaacctcaggagctgttggtgttgggaggcagaggctccaataccgtaaacttatccatagcagcttcgcagatctgcaaaatcctcagatgaactttgatggaaaggcatgtgctgctgttggtcaaagtgtcctgatggcgatctatgacacattatttagccaacttgatgtaacgtcatctcaacttcttgtgacggatcgtgatttcaaggatccaagttttggggaccagctccgtgagactgttttttcactgttagatcttaaagtagtacccttatttaatgagaatgatgccatcagtacccggagacagccatatgaggattcatctggtatattctgggataatgacagtctagcagctctgttggcagcagaacttaatgctgatcttcttatcatgcttagtgatgtggaaggactctatagtggtccaccaagcgatcctcagtcaaagattatccacacatatgtcaatgaaaagcatgggaagctaattagttttggagagaagtctagtgttggaagaggtggcatgcaagctaaagtgtctgctgctgctaatgctgcatcaaaaggtgtacctgttgtcattgcaagttctcaaaggcgaaaagatcggtacacttttccacaacgaagcaaatttgtgggcatgttccaaggaagctacagcccgagagatggcagttgcggcaagagactgttcgaggcgtctacagaagttgtcatcagaggaacgcaaacagattttgctagatattgctgatgctctggaagcaaatgaggatgcaattaggtctgaaaatgatgccgatgttgaggcagcacaagttgctggttatgaaaagtcgttggttgctaggatgaccctaaagccaggaaagataacaaatcttgcaagatccattcgtaaaactgctgacatggaggaccctatttcccatacattgaaaagaacagaggttgctaaagatctggtttttgagaaagcatattgcccattgggtgttcttctcattatttttgagtctcgtcctgatgcattggtccagattgcatctctagcgatccgaagtggtaatggtctccttttgaaaggagggaaagaagttatgagatcaaatgcaatattacacaaggtcataactggagttattcccgatactgttggcaaaaagctcataggccttgtgactagcaaagaggaaattgctgatctactagcgcttgatgatgtaattgatcttgtcattccgagaggtagtaagtctctagtttcccaaatcaaagcaacaactaagattccagttttaggtcatgctgatggtatctgccatgtttacattgacaaatcagccgacatggatatggcaaaacggatagtattggatgctaagattgattatccagcagcatgtaatgcaatggaaacactacttgttcataaagatcttaacaagagtgagggacttgatgatctattagtggaacttgaaaaggaaggagtagttatttatggtggacctgttgcacatgacaagttgaaagtaccaaaggtagactcatttcgtcatgagtatagctcaatggcatgcacagtcgaatttgttgatgatgtgcagtcagctatcgatcacataaatcgttatggaagtgcacacacagactgcatcatcacaactgatagaagtgctgcagaggcctttctgcagcaagttgatagtgccgctgtgtttcataatgcaagcacaaggttttgtgatgggacgcgttttgggctaggtgctgaggttggcataagtacagagcgcatacatgcccgcggacctgttggagttgatggacttctaactactcgctgcattttgcgcggtagtggacaagtggtgaatggtgacaagggagtggtttacacccacaaggatcttcctttgcaatgaggcaaataacctccgttgtggtcgtaacgaatggctggactccccttttaagtacccttttcttttattccatgctacaaagtttggtgtcgtaacaagcagaatgcctatttagtaggcattgatgtaatcagaccattttgtcgtggtgttccttgtcgtataaaacatccgagacatctgtattagaggcgcggtagctagttgatacgcgattgttctggatgaaatttggatctgttccaatgcaatgataatgcatgtgtgatgaggtcctaaaaatctctgaatcgggattttggctcaaggagaatcgttttgttgcgg

SEQ ID NO: 78169 - DNA, 2208 bp, Zea Mays
ccactcccactcccacccccaccccctcctggccgcgatccttgcgatgtggacgcttctcgggtcgacacgtctgcaggcgaaccccccggcctcggaggctcggacttccagaaccttcctgccgcttcctggccacgaatggccgtcccgatccagcgtcccagcgcgcgccacgtgtcagagatcggccacgtcggcgtccgatgtggcgctcccgcccccgaagaaactgatacggccccaaccctcgcgtctcagcctcacgctcggaagagtaagtggccgccgcaagcccgcaaccaacaccaacgctttgctcgcttgctccgctgtccgctcccgtcggccagcgatcgaaatcagcggtggattcggaggcccaggctcccggaggagatgaacggccgcggcaccggcggaggagggggaggggaggatgagatggaggaggacagcggccccagctgcgcgcagggggagggcgcggggaataaggagcgggtggtgctgatgtgggggtacttgcccggcgtgtccccgcagcgctcgccgctgctcgggccggtccccgtaaggttgcccccgacggcggcgactgccgccggtgatgggtggagagacgtgtgcggcggcggttgcggcttcgcgatggccatctctgagtctggaaaactcctcacttggggttcagctgatgacatgggccaaagttatgtgactgctgggaagcacgaggagactccagaagcttttccacttcctagcagtgtcgtgatagtgcgcgctgatgctggatgggctcactgtgttgcaataactgaatgtgttccaactggaagggttattggagaccagtcttcagttggaaccatggaaaaggatgaaaggcaaatggcaatggccactgaccaagtgagccctaggtcacaggtgtctaggacaagcagcggagcggcagctggttcctctgaaagcagaggcactgatgacagcacaaagcgacgaaagttgtctttagcaaaacatggacctgagagttcgacatccagtgatgaaagtctttcagcacccccttgtgttgtgacatttagtacaggagtgaaaatagtggctgtagccgctggtggtcgtcatacattagcactatcagatttaggtcaggtgtggggttggggatatggaggagaagggcaactaggtttgggttctagaatccgaactgtttcttctccccatcctgtaccgtgcattgaatcagcactatacaccaaggataggccatcagctatgaaaggtaacaaggctgctgaaggacatgtcagtaaagtcttgggaaattgcgtgagggcaattgcttgtggaggtcgtcacagtgctgtagtaacagattcaggagcacttcttacatttggatgggggctgtatggacagtgtggacaagggaatacagatgatgttttaagtccaacgtgtgtatcgtctatcctgggaatcaagatgcaagatgttgccgcaggtttgtggcacactgtatgtacatctgtagatggtgatgtgtattcgtttggaggaaaccagtttggacagcttggcactggttctgatcaggctgagactcttccaaaattggtagatgctacaagcctggagaataagaacgccagatccgtttcttgtggagctcgccatagtgctattataacagatgaaggtgaggtattctgctggggatggaacaagtatggccagcttggccttggcgactcaatggacaggaacgtgccttgcagtgtacgtgtggacgcttaccacccgctaaacgtatcatgtggctggtggcacaccttggtgctcgcggagtcgcctgcttgaaacctgacaaagaaattaccttagattgacaattttgttaggaacttgtaggctcgtgcaggtacggtgatgctgcatttcatcgtgtacatacatggcagtgcatacagatatgtgtattcattctttgcggtgcgctcttcgacctgtgcgacgtagacgaaagcttgtatcgcactgcgtatacagttgaataggcttgcctcgacaaattgtgctcctccattgctagtagtggaaaattttccacaagcaacaatgcaagacagggtaaccggtttacgtgattgctaactccggacggacgtgatcctcgttacagaagatggattt

SEQ ID NO: 78170 - DNA, 2257 bp, Zea Mays
ccactcccactcccacccccaccccctcctggccgcgatccttgcgatgtggacgcttctcgggtcgacacgtctgcaggcgaaccccccggcctcggaggctcggacttccagaaccttcctgccgcttcctggccacgaatggccgtcccgatccagcgtcccagcgcgcgccacgtgtcagagatcggccacgtcggcgtccgatgtggcgctcccgcccccgaagaaactgatacggccccaaccctcgcgtctcagcctcacgctcggaagagtaagtggccgccgcaagcccgcaaccaacaccaacgctttgctcgcttgctccgctgtccgctcccgtcggccagcgatcgaaatcagcggtggattcggaggcccaggctcccggaggagatgaacggccgcggcaccggcggaggagggggaggggaggatgagatggaggaggacagcggccccagctgcgcgcagggggagggcgcggggaataaggagcgggtggtgctgatgtgggggtacttgcccggcgtgtccccgcagcgctcgccgctgctcgggccggtccccgtaaggttgcccccgacggcggcgactgccgccggtgatgggtggagagacgtgtgcggcggcggttgcggcttcgcgatggccatctctgagtctggaaaactcctcacttggggttcagctgatgacatgggccaaagttatgtgactgctgggaagcacgagaagcttttccacttcctagcagtgtcgtgatagtgcgcgctgatgctggatgggctcactgtgttgcaataactgatgaatatgatgtttatacatggggttggaaagaatgtgttccaactggaagggttattggagaccagtcttcagttggaaccatggaaaaggatgaaaggcaaatggcaatggccactgaccaagatataataaaggcaactccattacagtgagccctaggtcacaggtgtctaggacaagcagcggagcggcagctggttcctctgaaagcagaggcactgatgacagcacaaagcgacgaaagttgtctttagcaaaacatggacctgagagttcgacatccagtgatgaaagtctttcagcacccccttgtgttgtgacatttagtacaggagtgaaaatagtggctgtagccgctggtggtcgtcatacattagcactatcagatttaggtcaggtgtggggttggggatatggaggagaagggcaactaggtttgggttctagaatccgaactgtttcttctccccatcctgtaccgtgcattgaatcagcactatacaccaaggataggccatcagctatgaaaggtaacaaggctgctgaaggacatgtcagtaaagtcttgggaaattgcgtgagggcaattgcttgtggaggtcgtcacagtgctgtagtaacagattcaggagcacttcttacatttggatgggggctgtatggacagtgtggacaagggaatacagatgatgttttaagtccaacgtgtgtatcgtctatcctgggaatcaagatgcaagatgttgccgcaggtttgtggcacactgtatgtacatctgtagatggtgatgtgtattcgtttggaggaaaccagtttggacagcttggcactggttctgatcaggctgagactcttccaaaattggtagatgctacaagcctggagaataagaacgccagatccgtttcttgtggagctcgccatagtgctattataacagatgaaggtgaggtattctgctggggatggaacaagtatggccagcttggccttggcgactcaatggacaggaacgtgccttgcagtgtacgtgtggacgcttaccacccgctaaacgtatcatgtggctggtggcacaccttggtgctcgcggagtcgcctgcttgaaacctgacaaagaaattaccttagattgacaattttgttaggaacttgtaggctcgtgcaggtacggtgatgctgcatttcatcgtgtacatacatggcagtgcatacagatatgtgtattcattctttgcggtgcgctcttcgacctgtgcgacgtagacgaaagcttgtatcgcactgcgtatacagttgaataggcttgcctcgacaaattgtgctcctccattgctagtagtggaaaattttccacaagcaacaatgcaagacagggtaaccggtttacgtgattgctaactccggacggacgtgatcctcgttacagaagatggattt

SEQ ID NO: 78171 - DNA, 2244 bp, Zea Mays
ccactcccactcccacccccaccccctcctggccgcgatccttgcgatgtggacgcttctcgggtcgacacgtctgcaggcgaaccccccggcctcggaggctcggacttccagaaccttcctgccgcttcctggccacgaatggccgtcccgatccagcgtcccagcgcgcgccacgtgtcagagatcggccacgtcggcgtccgatgtggcgctcccgcccccgaagaaactgatacggccccaaccctcgcgtctcagcctcacgctcggaagagtaagtggccgccgcaagcccgcaaccaacaccaacgctttgctcgcttgctccgctgtccgctcccgtcggccagcgatcgaaatcagcggtggattcggaggcccaggctcccggaggagatgaacggccgcggcaccggcggaggagggggaggggaggatgagatggaggaggacagcggccccagctgcgcgcagggggagggcgcggggaataaggagcgggtggtgctgatgtgggggtacttgcccggcgtgtccccgcagcgctcgccgctgctcgggccggtccccgtaaggttgcccccgacggcggcgactgccgccggtgatgggtggagagacgtgtgcggcggcggttgcggcttcgcgatggccatctctgagtctggaaaactcctcacttggggttcagctgatgacatgggccaaagttatgtgactgctgggaagcacgagaagcttttccacttcctagcagtgtcgtgatagtgcgcgctgatgctggatgggctcactgtgttgcaataactgatgaatatgatgtttatacatggggttggaaagaatgtgttccaactggaagggttattggagaccagtcttcagttggaaccatggaaaaggatgaaaggcaaatggcaatggccactgaccaagtgagccctaggtcacaggtgtctaggacaagcagcggagcggcagctggttcctctgaaagcagaggcactgatgacagcacaaagcgacgaaagttgtctttagcaaaacatggacctgagagttcgacatccagtgatgaaagtctttcagcacccccttgtgttgtgacatttagtacaggagtgaaaatagtggctgtagccgctggtggtcgtcatacattagcactatcagatttaggtcaggtgtggggttggggatatggaggagaagggcaactaggtttgggttctagaatccgaactgtttcttctccccatcctgtaccgtgcattgaatcagcactatacaccaaggataggccatcagctatgaaaggtaacaaggctgctgaaggacatgtcagtaaagtcttgggaaattgcgtgagggcaattgcttgtggaggtcgtcacagtgctgtagtaacagattcaggagcacttcttacatttggatgggggctgtatggacagtgtggacaagggaatacagatgatgttttaagtccaacgtgtgtatcgtctatcctgggaatcaagatgcaagatgttgccgcaggtttgtggcacactgtatgtacatctgtagatggtgatgtgtattcgtttggaggaaaccagtttggacagcttggcactggttctgatcaggctgagactcttccaaaattggtagatgctacaagcctggagaataagaacgccagatccgtttcttgtggagctcgccatagtgctattataacagatgaaggtgaggtattctgctggggatggaacaagtatggccaggaacgtgccttgcagtgtacgtgtggacgcttaccacccgctaaacgtatcatgtggctggtggcacaccttggtgctcgcggagtcgcctgcttgaaacctgacaaagaaattaccttagattgacaattttgttaggaacttgtaggctcgtgcaggtacggtgatgctgcatttcatcgtgtacatacatggcagtgcatacagatatgtgtattcattctttgcggtgcgctcttcgacctgtgcgacgtagacgaaagcttgtatcgcactgcgtatacagttgaataggcttgcctcgacaaattgtgctcgaaactgggatctacaactcttgacaggttacgctgctgctccattgctagtagtggaaaattttccacaagcaacaatgcaagacagggtaaccggtttacgtgattgctaactccggacggacgtgatcctcgttacagaagatggattt

SEQ ID NO: 78172 - DNA, 2231 bp, Zea Mays
ccactcccactcccacccccaccccctcctggccgcgatccttgcgatgtggacgcttctcgggtcgacacgtctgcaggcgaaccccccggcctcggaggctcggacttccagaaccttcctgccgcttcctggccacgaatggccgtcccgatccagcgtcccagcgcgcgccacgtgtcagagatcggccacgtcggcgtccgatgtggcgctcccgcccccgaagaaactgatacggccccaaccctcgcgtctcagcctcacgctcggaagagtaagtggccgccgcaagcccgcaaccaacaccaacgctttgctcgcttgctccgctgtccgctcccgtcggccagcgatcgaaatcagcggtggattcggaggcccaggctcccggaggagatgaacggccgcggcaccggcggaggagggggaggggaggatgagatggaggaggacagcggccccagctgcgcgcagggggagggcgcggggaataaggagcgggtggtgctgatgtgggggtacttgcccggcgtgtccccgcagcgctcgccgctgctcgggccggtccccgtaaggttgcccccgacggcggcgactgccgccggtgatgggtggagagacgtgtgcggcggcggttgcggcttcgcgatggccatctctgagtctggaaaactcctcacttggggttcagctgatgacatgggccaaagttatgtgactgctgggaagcacgagaagcttttccacttcctagcagtgtcgtgatagtgcgcgctgatgctggatgggctcactgtgttgcaataactgatgaatatgatgtttatacatggggttggaaagaatgtgttccaactggaagggttattggagaccagtcttcagttggaaccatggaaaaggatgaaaggcaaatggcaatggccactgaccaagtgagccctaggtcacaggtgtctaggacaagcagcggagcggcagctggttcctctgaaagcagaggcactgatgacagcacaaagcgacgaaagttgtctttagcaaaacatggacctgagagttcgacatccagtgatgaaagtctttcagcacccccttgtgttgtgacatttagtacaggagtgaaaatagtggctgtagccgctggtggtcgtcatacattagcactatcagatttaggtcaggtgtggggttggggatatggaggagaagggcaactaggtttgggttctagaatccgaactgtttcttctccccatcctgtaccgtgcattgaatcagcactatacaccaaggataggccatcagctatgaaaggtaacaaggctgctgaaggacatgtcagtaaagtcttgggaaattgcgtgagggcaattgcttgtggaggtcgtcacagtgctgtagtaacagattcaggagcacttcttacatttggatgggggctgtatggacagtgtggacaagggaatacagatgatgttttaagtccaacgtgtgtatcgtctatcctgggaatcaagatgcaagatgttgccgcaggtttgtggcacactgtatgtacatctgtagatggtgatgtgtattcgtttggaggaaaccagtttggacagcttggcactggttctgatcaggctgagactcttccaaaattggtagatgctacaagcctggagaataagaacgccagatccgtttcttgtggagctcgccatagtgctattataacagatgaaggtgaggtattctgctggggatggaacaagtatggccagcttggccttggcgactcaatggacaggaacgtgccttgcagtgtacgtgtggacgcttaccacccgctaaacgtatcatgtggctggtggcacaccttggtgctcgcggagtcgcctgcttgaaacctgacaaagaaattaccttagattgacaattttgttaggaacttgtaggctcgtgcaggtacggtgatgctgcatttcatcgtgtacatacatggcagtgcatacagatatgtgtattcattctttgcggtgcgctcttcgacctgtgcgacgtagacgaaagcttgtatcgcactgcgtatacagttgaataggcttgcctcgacaaattgtgctcctccattgctagtagtggaaaattttccacaagcaacaatgcaagacagggtaaccggtttacgtgattgctaactccggacggacgtgatcctcgttacagaagatggattt

SEQ ID NO: 78173 - DNA, 2215 bp, Zea Mays
ccactcccactcccacccccaccccctcctggccgcgatccttgcgatgtggacgcttctcgggtcgacacgtctgcaggcgaaccccccggcctcggaggctcggacttccagaaccttcctgccgcttcctggccacgaatggccgtcccgatccagcgtcccagcgcgcgccacgtgtcagagatcggccacgtcggcgtccgatgtggcgctcccgcccccgaagaaactgatacggccccaaccctcgcgtctcagcctcacgctcggaagagtaagtggccgccgcaagcccgcaaccaacaccaacgctttgctcgcttgctccgctgtccgctcccgtcggccagcgatcgaaatcagcggtggattcggaggcccaggctcccggaggagatgaacggccgcggcaccggcggaggagggggaggggaggatgagatggaggaggacagcggccccagctgcgcgcagggggagggcgcggggaataaggagcgggtggtgctgatgtgggggtacttgcccggcgtgtccccgcagcgctcgccgctgctcgggccggtccccgtaaggttgcccccgacggcggcgactgccgccggtgatgggtggagagacgtgtgcggcggcggttgcggcttcgcgatggccatctctgagtctggaaaactcctcacttggggttcagctgatgacatgggccaaagttatgtgactgctgggaagcacgaggagactccagaagcttttccacttcctagcagtgtcgtgatagtgcgcgctgatgctggatgggctcactgtgttgcaataactgatgaatatgatgtttatacatggggttggaaagaatgtgttccaactggaagggttattggagaccagtcttcagttggaaccatggaaaaggatgaaaggcaaatggcaatggccactgaccaagtgagccctaggtcacaggtgtctaggacaagcagcggagcggcagctggttcctctgaaagcagaggcactgatgacagcacaaagcgacgaaagttgtctttagcaaaacatggacctgagagttcgacatccagtgatgaaagtctttcagcacccccttgtgttgtgacatttagtacaggagtgaaaatagtggctgtagccgctggtggtcgtcatacattagcactatcagatttaggtcaggtgtggggttggggatatggaggagaagggcaactaggtttgggttctagaatccgaactgtttcttctccccatcctgtaccgtgcattgaatcagcactatacaccaaggataggccatcagctatgaaaggtaacaaggctgctgaaggacatgtcagtaaagtcttgggaaattgcgtgagggcaattgcttgtggaggtcgtcacagtgctgtagtaacagattcaggagcacttcttacatttggatgggggctgtatggacagtgtggacaagggaatacagatgatgttttaagtccaacgtgtgtatcgtctatcctgggaatcaagatgcaagatgttgccgcaggtttgtggcacactgtatgtacatctgtagatggtgatgtgtattcgtttggaggaaaccagtttggacagcttggcactggttctgatcaggctgagactcttccaaaattggtagatgctacaagcctggagaataagaacgccagatccgtttcttgtggagctcgccatagtgctattataacagatgaaggtgaggtattctgctggggatggaacaagtatggccaggaacgtgccttgcagtgtacgtgtggacgcttaccacccgctaaacgtatcatgtggctggtggcacaccttggtgctcgcggagtcgcctgcttgaaacctgacaaagaaattaccttagattgacaattttgttaggaacttgtaggctcgtgcaggtacggtgatgctgcatttcatcgtgtacatacatggcagtgcatacagatatgtgtattcattctttgcggtgcgctcttcgacctgtgcgacgtagacgaaagcttgtatcgcactgcgtatacagttgaataggcttgcctcgacaaattgtgctcctccattgctagtagtggaaaattttccacaagcaacaatgcaagacagggtaaccggtttacgtgattgctaactccggacggacgtgatcctcgttacagaagatggattt

SEQ ID NO: 78174 - DNA, 2002 bp, Zea Mays
ctcgcctcgcctctcttgtactgcccccacgaagcattcgtgctcgtttcgcctcgcgcccgcgctgctgtcctgctgctgctattttgccattgcatccatttccgggggacggagtggaggaggagggcgtcgcctgcgttgcttcgcgtgggaagcgtagcgtgcttcgtttaggcctctcgccaatatccgagggttaatctagagaggcctttggctttgccagacgcgcctgtacgcgcctttctgggaggcagccgcttgctctcgcctccaatggccgagatctgctgcgaagaagccaagtccacgccggcgaccgccgtggctgcggcttcagtctccgccacggccgctgcggccgccgccgtggcagtggcctcctcggcgttagagaggaggcgacgcaggttggagatgaggaggttccgcgtcgcgggcgatcccgaggcgccggtcgcggaggacgtccgcgccgccaagcggcagaggctggcgcgcacgctgtccagcacctgccccgacgcgggctcaggctcgggctcggactccgacaggcctgccctaccggagcggttgcccaggtacggggtcacctccgtctgcggccgacgccgcgagatggaggacacggtctccgttaggccggactttgtgcccggcaccagcaaacagcacttcttcggcgtcttcgacggccacggctgctcccaccaaccatgtgccagaacatgatgcacgaggtggtcgcggacgagcacaggaaggcagattgttctggcgaagagacggcgtggaaggccgtgatggagaggagcttcgcgcgactggacgagcaggccgccagctgggcgaccagccgcagccgcgacgagccctcctgcaggtgcgagcagcagaagcccttgcgttgcgatcacgtggggtccaccgccgtggtcgccgtcgtcagccccacccacgttgtcgtcgccaacgccggcgactcccgcgccgtcctatcccgcgccggcgtccccgttccgctgtccgtcgaccacaagcctgaccggcctgacgagctggcgcgcatcaaggcggcgggcggccgcgtcatttactgggacggtgctcgtgttctcggcgtcctcgccatgtctcgagccataggcgacggatacctgaagccgttcgtgtcgtcggagccggaggtaacggtgacggagcgcaccgacgacgacgagtgcctgatcctggccagcgacggcctgtgggacgtcgtgaccaacgagatggcgtgcgaggtcgtccgcgcgtgcttccacagcaacggtccgccggcgccggccgctcgggcgaacggcgcggccctccgggcagccgagaacggatccgcggccgccaagggcgtgagcgtggaggattccgacaaggcgtgctccgacgcggccatgctgctggcgaagctggcgctggcccggcggagcgccgataatgttagcgtggtcgtcgtggatctccgccgggggatatgatttgccttccttcctttttagccctcttggaatccaagctaatttctcccccgttttcttccatacttttaggttctgttttggtttagtattaatactgtagtagttaccaaccagacgcttttcttctctcaaacgaggaattaaaagccagtcggaccaaggaaatagaacatcgaattgcacacagatgcacaaggtagtggtaatcgttaatcatagctttttttggccgtcgattaacgcgctaaaaagtgctgattccattctttgactgaagtagattaacggggcgattggtgtagaaattggcgctaagaccacgtttagcgggagcagattgcgattggttggcccaggcaggcggtaggattcggagacggattaacaaaggcacggcaagatgctgatctatctgtggggtgtgggcccgtcgtctatcgagtgaagggaaatgctccgaagttctcgtttacggaaatgag

SEQ ID NO: 78175 - DNA, 1957 bp, Zea Mays
ggcgacggcccccctgcccggctgcccctgcccgcctcgcctcgcctctcttgtactgcccccacgaagcattcgtgctcgtttcgcctcgcgcccgcgctgctgtcctgctgctgctattttgccattgcatccatttccgggggacggagtggaggaggagggcgtcgcctgcgttgcttcgcgtgggaagcgtagcgtgcttcgtttaggcctctcgccaatatccgagggttaatctagagaggcctttggctttgccagacgcgcctgtacgcgcctttctgggaggcagccgcttgctctcgcctccaatggccgagatctgctgcgaagaagccaagtccacgccggcgaccgccgtggctgcggcttcagtctccgccacggccgctgcggccgccgccgtggcagtggcctcctcggcgttagagaggaggcgacgcaggttggagatgaggaggttccgcgtcgcgggcgatcccgaggcgccggtcgcggaggacgtccgcgccgccaagcggcagaggctggcgcgcacgctgtccagcacctgccccgacgcgggctcaggctcgggctcggactccgacaggcctgccctaccggagcggttgcccaggtacggggtcacctccgtctgcggccgacgccgcgagatggaggacacggtctccgttaggccggactttgtgcccggcaccagcaaacagcacttcttcggcgtcttcgacggccacggctgctcccacgtagcaaccatgtgccagaacatgatgcacgaggtggtcgcggacgagcacaggaaggcagattgttctggcgaagagacggcgtggaaggccgtgatggagaggagcttcgcgcgactggacgagcaggccgccagctgggcgaccagccgcagccgcgacgagccctcctgcaggtgcgagcagcagaagcccttgcgttgcgatcacgtggggtccaccgccgtggtcgccgtcgtcagccccacccacgttgtcgtcgccaacgccggcgactcccgcgccgtcctatcccgcgccggcgtccccgttccgctgtccgtcgaccacaagcctgaccggcctgacgagctggcgcgcatcaaggcggcgggcggccgcgtcatttactgggacggtgctcgtgttctcggcgtcctcgccatgtctcgagccataggcgacggatacctgaagccgttcgtgtcgtcggagccggaggtaacggtgacggagcgcaccgacgacgacgagtgcctgatcctggccagcgacggcctgtgggacgtcgtgaccaacgagatggcgtgcgaggtcgtccgcgcgtgcttccacagcaacggtccgccggcgccggccgctcgggcgaacggcgcggccctccgggcagccgagaacggatccgcggccgccaagggcgtgagcgtggaggattccgacaaggcgtgctccgacgcggccatgctgctggcgaagctggcgctggcccggcggagcgccgataatgttagcgtggtcgtcgtggatctccgccgggggatatgatttgccttccttcctttttagccctcttggaatccaagctaatttctcccccgttttcttccatacttttaggttctgttttggtttagtattaatactgtagtagttaccaaccagacgcttttcttctctcaaacgaggaattaaaagccagtcggaccaaggaaatagaacatcgaattgcacacagatgcacaagattaacggggcgattggtgtagaaattggcgctaagaccacgtttagcgggagcagattgcgattggttggcccaggcaggcggtaggattcggagacggattaacaaaggcacggcaagatgctgatctatctgtggggtgtgggcccgtcgtctatcgagtgaagggaaatgctccgaagttctcgtttacggaaatgag

SEQ ID NO: 78176 - DNA, 11478 bp, Zea Mays
acttttgtaatcactccgataaaataatataaattttttgtaacttgtaaaatttggtaataagatttccgctgcaaaaatattggtgtgtgtgatttgtgttacttaatcccgcggttctggttgtaagtggtttatccggtgtccttggggcaatcggacggatcctgttaagttatctggtgcacatgcatggccgtctgaggtctttgagacaaggacaggtgcatgtgggcccgataacttggaggttctgccacagctggtatcggagctggattaagtatatacagtcacatacgtattttcaaaacaaaagttttggttttagaaaacctattttcaactaaacacattgtttggctttgaaaaacagttttgaaaaactataatgctagcgacattctctattaagccataaagtaaggactatcaggtggcttagttgaaaaccataacccacaaccgggtgggtattgcatacatgtgtattgttatttttgaggccattcagttttgaatggatcgacgctcaaggtaaggtgagatgtgagagcatgaccgaacaaccgtcggtctagggaagagtgtaaaaagcgcttgattatatacatattccacatatatatatgaaggctgtgatgtggagtatttacttttccgggaattcagtaccccatgcgtgtgtatgggtatacagacatgggaatactgagaaatgtaatgtacttgcaacgacgcacctacgctcaggtaagaaggtgagtgaccataatgagttgccctatggttaaagtgtggcaacggcgcctatgcgtggctcggcgcttaatgatgagctggcctccatatagcaatatatggagtataaattgtgataaactatcatgtgtgaactgcatcattgggaattgggctgtgatggaattttctgcaggtacactaaccctgaaaacgtatgtgtagttgacgactagtaaaataccgagagagtcgtaagtatgccaccgatatagaacgctattgccgcagtatgttggcaaaatcagtgaggacgaataagacgagcatgcatcttgattgttgcattatgtttgttacctatacacccaaaatgcttctctcacctttattccaaaacttggtgattgtaaatgatgtggtgtcctagggatacaggtttagattgcttttagcttttcataatttgaccattagtgcaaatgcgtttgcccttgtgcttgatgtgtcgatagaaggttagtgacttgttttgcccaaacccaaaattaggccatgttcttccttggtgaacttagacccaaatttgaattgtccattatcactccatgacaaagcccatacaaataaatgcttagataatttctgtgttgaacataaaatgtacccaagcttaaaacaagaatctcaagtcatgtctccttctagaaccattcccttgttcagttgatgcaggttgaggtctctattgtatttggcctctccttgcggattatcttgtcacttcatcaacctaacccagaacagacctgtctgagtattttcttgaaattgatgcctttggtttccccatatctatccaaggcatacccacttaatcttatgattgttttccgtccgtatctaatagatactaatccttgtcctcatgatctctataatgggcgtagaaatatttttggactaaagcaacagtctcccatcatactcctttcatcaagttaggttttggccatatcgtgttcatttcatcgggccatgatctatttggctctctacttgtaaccattcctacaggtggagtctcttttgtatattgtcatccttgaccagtctatttgtgttgtgtgagatttcttattggttatgtctagtattggcgttatgactaaaattgatgatgccacgccaaaaccgagggcctcctgtgggtatacacacaaggttgtgctgctcggtacacgctagtatcacagttagtagtcataatccattatgagactatatcgatatgttatctctgcacaaattattcttaccacgtgagattcattattggtgccagttttgtaatggtgtcatggttaaggacttatggtaccgcggcgaaactgagagccccttgtgaatgtacacgcaaggttctgctgcttggcgcatgccgatatcgaagtctctagtcatgatccgttataggattacactggtgtgttatcttccgtggatatcttccttgaaacgatttctatgttgtttgtcaagtgaccaagcaacatctatcatctctatgggatcaaaagggcataccactttcatgtgtggtcttatttcttttgatcttggtagtgactactcatacaagttccctttacatcctttcttgtaaaggtgaagtcttggagctttttagtgttggaaaacagctaattagctctcaaattggagattgacttttcctgctgctgagatgcaggagtttgttcattcgctctcttatttaatccatgtattccctcaccaagtcagttcatcttgcatgagggaatggatgaacaatctgaccaaatggatttttacccaaatacataatctcttgttaacagggtgaactctcaacccttggcttaccgatggtactgagaggacctgctcaatgtaagtttaacaagttggtttttactaacttgtaactgcccaatgaacaaaggttgagtttagagatcgattgtcgagttgtctaaactcactctggtttaacccaccctgaagaaagcacttataagaaatgagattaagtcggccagtaaccacctaatcatcgccctagtcatgcctcgaacgcctcacgtgtgcttttccagcatgtgtgatcaagtcgatccatgcctagtgctcgataaaatggattggttgcgaaggcagcatctacagatccattcgcggatgatttttctcgaatctataccatctttcatagacttgaattctcgggttaaccacatgttaaccacgacagtattcgacgtccacatccgtctcatgcgctacgaactcactgtgacgcttgttggtaaacttcattttgtatgttttacccaagatggtgcatctgattctgttggggtaaaatcgcctatttgctgctcactcaacagactcagatagtacagtgtcatcagaaaagcaaactgcacacatggaaccttatgtgttcctctggcagatatcgtctctattggtggacatttctaaatttgcctaaggcgatacatgttatgtccgctagagaaaccgcattctgaggcactcgccttcgcccaagactgtcttatgattatcgctgatacgaacatgggttacatacttctctacccttagaagtctttcgatccgaatctcgggacgagattcttttaaggggggaggattgtaacaccccaggtgtttatattccgctcgacaacgagtacggatttaagcacgtaatcagtggataaaatggatttttaaattctaaacatcttcgtctatcgcgatttttatatcgcatcggtgtcgtctgtcgcgagcgcgacatcgtttttatttctatctatccgggctcttcctaaaattttcgtgatgttcggaacatatttgttccgaaaatcggtgcgtccggtgattatttaaaattcatcgttcgcgcgaatacgaattcggaagcccgactcactcggatgattttatctcggacaaattcagttgaacttgacgactaaattgttcggggtaaaataattcagctcgcgcgaaattgtgcgtggggtttggatccaacttatccatccgcacactgttttagcgacgaaatcatgtgtgcattagccgatatggttctggctaatattagtcgaatcacgcagattaaaataccgaagctgaaatccatttgattcggtatgttatttctcgcctcggtctcaaattagattttcgtggctcgtgtcgtaataattcagactacggatgaattattaagtttcgaatcaaatcaactatgtttaggcatcgggtaaatttttatccgatttcgactaaactagtatggtctcagaataatgtatctgatatctagttcgtttccgtgttgtccgaaacagtcacgaaaattatctgattttaggagtactcaccaaatcaaatcctatctaatttttcttttatgcctgatattgttttgggccaatttatttgtatctcttttaaaccttagtcctattatccacttacttttaagtctccattaacgaaaatgggggaaatccctttattacttcaacccatgtcacgcttcaagccttgtcttctatcgacattatcttcagccaccacacagcaggtcacgtaaatctccttctcacgtctcttgctcccttgttcttatctcaagccatcgtaatatcctagattccagtacacgtgccagctcgggaattctctctgcattctatcacaacacgtcatcagccatgcagatcaagttcttgataagttttagtgttcgcctctgtgtacataaatgcaccatgcgcataagctcagctcgccggtcgagctccctgcttccatggccctcggcttctccagctgccggtgcttgccctctgccatggccgcgccggattgaagcccctgccatggcacttcgcttcctctgcgacgttctcctccctctaatctttctgctcgccggcagtaatatccagtcgcgccctgggtttgcccgaagctatgcgcgcccggtcgatctccctgctccagcgctgcgcccgactccagccagctctgctcctctttctctctgctcggcgtccttcctctgcccgctgagtccctccatcgcctgctcctatgcggcgcggaacttcctctgcgtccaggtccctcagctcgcgtccatgccgcggcgtcctggtccctacttgaccgtgtcactctgcgctcgcgtcgctgtctggttccgagcgcctgggtcttctttcccctgcgctcggtcatagtcgctgcgagcctgcgagccgtgaaactccctgtgtcgagctcggatccctgcgcagcggagcttttcccctagccaagatcgtcattgcgcgcagattttctttgctgctcgccgcgctcgattcgtcgtgcgctgggcgctgtccggcgccggtattcgccgaccccgcctcaccatgggtgtgtgtcatcaatctcgccctgttctgtccactcgatgtcgcgtgcttctgtgtcgtttgctacgcttggcacatccgtgtcattcgtgttcgacatgtccccggcacggttgtttgcagctgctcggataaacttctctgtttcggcgtgttcgccatcgaccgcccccggtgctcgacgaatggctggaacccggaattcgtcgtcgtttctcatccgcgatctcgtcaacctctgctcgacaagtgttcgatgaagggcctgagccaagtgttgttgctacttccacgaatttctcatcgaattggtacgttaattaatcacgcgatgcggaagacgaaccaagtcgatcccaagcgcgggctaatccgcaggatgatgttgatggacaatccggaagatggatagacgaaacaagtatcagaacaaggatgatcgtcaagtggacatcgtctaacaacactaacctagtgtttcttccagacaagccccggtgcatgcaaccccttccttgtgtttttaaattatttttgcacactttaagtctagtgaaatgtgcattaggtttatagaagttgcttggaaacccttcgatgcattgcctaccttgaaatccatcccttttatagatacttctggtgaagtatcaaaatatgatttacaaaaaaaatgcttagccctgcttataggcagatagagtttgtcctttgcacttatgcctagctcaggttgatcctgaggaaggatgatctctacctgcacggatattttcattgggagcatggtgggatcttactgtaaagttccctataatgctcttttcatccttagaaacacaaaacaatcctaagggtggaagtacttaactcgagacttgggctaggaacagatgatgttccgtccgggtcaattaaggattggatgcgtatgtaggcctgatagatcaaggactatcttaactagccacatgccctggaaatgggacagggtaagcttgaacccggctattccatatgtgaaaagacaaccgcgcactgggcgtgggagatggtgggagtagcgtgtgccctcctggctagaggctggatggaggagtactgtgctcccgggtagcgcggaccggttcacgttgtggaggatctgtgggaacggttgacatatgcaagggttaagtgctacatatgtcgtgtggttagagatcctcagctgagtaaatcgattcggatcgccgttatatccccggagagtggagacttgatcactgacctgcaacctaagtcaggatgtgaatctcatgaataaaaatgatgttgtattgatgatatggtgaaagtagaccatatgcaaacaaagtctattaatatttaatttggcgttaaaatattggaagtaaggactcactttagtaagctatttctgcaaaagtatctaagttgattcttgctaaagcctctccttgattcccaaatccagcatacccttgagagtcttttctttagtcgggtaagtcttgctgagtaattccatactcagggttttattccctgttgtttttcaggttctatctttgtgctgcttttgatggtgttaagtgccggtgggctcggccttcttatataagtataacccgtctttatcttcttactgaggatggtcatttgagctagcatatatttcaaacttatacttttgtaatcactccgataaaataatataaattttttgtaacttgtaatatttggtaataagatttccgctgcaaaaatattggtgtgtgtgatttgtgttacttaatcccgcggttctggttgtaagtggtttatccggtgtccttggggcaatcggacggatcctgttaagttatctggtgcacatgcatggccgtctgaggtctttgagacaaggacaggtgcatgtgggcccgataacttggaggttctgccacagagccgatttttggaaaatattgtcaaaattacacgaagtaagcttcgaattacagcttcgtcagcctgcacacaaaagagggatctctctttccaaagcatggctatctttatttttacaaactacagatcttctttctttacgaagcatgaaaagaagggaaggtgttttttcgccgaaggctcaataacggtatgtatgtaagtttcatgcatcgtaaagaaatagattataatagtttacatattcaatccaaagttacacacatcaaatattacagcttcgttacaataaaaagcacaatgtccattctagtgtctcttacatcgaccatttaaaaatgtttttacaataagtgctagtcttctttcaggattttctcggaaacttcatttagcaatctattgacgacttcgtcaacaatagattcagccatattaatgatctccagtgcttccttcgtttctggatcggccaggggatcgaacggttccggtggcggagataattcagctaaaataggaaaaagttaatcagtccgaagccataaaaaccaatgtcgaagctaaaagccaagaaacaatacctatacgtttttcgtgctctgcagcttcttcagcttgtcttgcttctatcagggcgtcatgggtgtctttttcacttttctttataatttcatgagccatctctcggccaccattcacccagacatcattatagaatttttcgcccatcaaggttgcttcagctgaaggatccttcgtgtcgtctgtggagaaggcagcttcggcctgggccatagtcttgatgtgatcacatcccgccttctccaagatagctgaaatcccccgtgcactagaaaatgcacagacatccccgcgatcacttaagatttcttcaaagctcttggcctccccacttatccattcaataacgccttcggggtcgcctcgtatgaagttttcttcagtagagtaggcgcccacgttggcgaaactgatttttattttcttcacacggtccaaggatttttcaaagcatctttccttggatgtgcgaagttcttcaatgtttttctctaaattatttttccaatattcgctgatttctcggttagcttctgcgagcgcgcatttttctttagcttcggcaagttgcctccgaaggtcttcaatttcaatcttttaggcttcggcctgggctttgaagctagcttcatcttcttttactttgtaaccagagagaataagattgtcttcttcaagaccttcgtttctcagttcaattacctttgaacgaaggttgttcagggccattgtatagccttcgtcctctatatttttctatgccctaagggcattactaagaatcaagccctgcaaggtggaggaaagaataagtatgacaaataaaatacctcatttttcaaatctagagttagtttttatacctttatgctattgtatgctaggctatcagcaagtttgtccttcgataaaatcgaaagaccgtcttccagcttcgggaatccgatgcttttacctatctctcgaaaaacgaatatttcttttgttatccaggagacagtacaaaaagtcttcttcgccactgccattgaacactaacgcccccttcggatatttcaatttttaggcatagtgttgcgcttctaacatttcttcttgggatagtacctttcccgaagcatgacgaataatgtagtcaatacttttgttcgacgcttcgggaccaggagcttcaattttttcagttgcaatccgctctgttgatttgtccttagggtcagcacgctccatctcggtaggcactgaaggcccagcttcggttttagcctgaattattgcagcttcgacttcagcctccttagtatcaacttcgggttgtgacttggaagcttcggcaactttccttgtaggagtatgactcaaggtttttgttgtttctaacacaacatccagaacatttgccatccttctcctcttaggagttacgacagaacccatttgtaccttcgatactgttgcctctgttgaagggctcaaaatctctggcatcttcattatttcttcaatttttggctcttcagccttatcaaatttcgtttcaaccagcttgactgtaagcaccttcggcattaaagtcggctcttcagtgctctgcgcagttgggatagtttcttttattttgctagcagaagaggtccctacgccaaattcaggcaccacggtcggtttaatgtaatgcggccggtgggtaagaaccttcacctttttgcccttcggcacaggctcaactggggtggccgaagcagcagttttcctctttttcccctgtccccgtagtgggtagcggtaatcggggtatacgaagccgatggcgtcaaaaactctgttcagtctttttctttccccgaccttcgaaagctgcagacaaagcattatcttccgccttggaatatgctccaagcagttcatcacttgtagcttcgatacgctttagccagtcgttgtttggctcatcaaacttctccctgcatctgaaggtatacttcagctggaccagaccacctacgctagagtcggtggtggtctccttcggcatttcccagctgtctacaagcggccataccctaaaggctatatgttcttgaattaaatctcttgtcccaataaaggaacaaatagtgctgaaggccctctgacacgcttcaattgtcgcatgatgacttccttaatatcttccctcgctttcaaatcattcttcacataaaaccattcttccatccaagcttcgggccatctcttccgaaatgttggcaccgggtggcttgcgttggggcgagcgataaatccatagcaaccgaagttgttgtggtactgttctttacccatggccttcgtctcatatagaagttcatgcatactgcagaagcacttcgcgcttggctctagcccttgactccttactgcccagacaaaaatccccatccttattatagcttcgggggtaatctgatggaggaagatctggtagattttcaacacttcaactacaaacttgctcaaagggaaccgaagcctagccttgaagaagcttcggtaaattacaacttcgttttccacaagggcagggacgttgttgtctccaccagccctcacaatagacatgtcccgaaaataccgtcctctcatgttctcaagatgactctgtttaatggttgattttccgaagatagaatggcttggtcgccagggccgatcttcagaatcttcatccccactttccacatcataactatcgctagcaccagtatcttcagataaaccttcgagtatctctctagtaatcttcttagtgtttgtctttgccatcgattcaacaaatccagcaacataaggatccacagccttcttctcctcaaacagcttcgcctcttcagtcagtttcgtctccacaacaaccttcttttttgggacattttttcaccagacatggtaaaaatgcgccttttaaaccgaagttcagagagcttgaaaatctagcgagcgctagtgagcaggagctaaaagattgagaaaataatgcaaatggcagaaacaacgtatcaaatgcagctggtgtgagtccatatttatacgcccagtgtgctgcaaattggagggccccgtctgtcattgattattgctattctagcaaagggaaggtgttttttcggacctttggcttaaggcctttgtccatatcatagtctgaattcgttatcttaacaaattaatactgcgaggggctactattgggggccttcgtcttccgaaggtcctcaaaaacatgatttaacaatgtttcccaagtgtaatatatgaacaggtaccttcggactcgggttaaaaccatatacgatgtgaaaaacatggtcgagacgaaggctagtgttgctccgaagctacgcgcaagggagcttcggcccaatggcagaaaaaaggaaccgccataaaagggaaaagactatctagtcctcgttgggttgtccataagtcaatagtaaatatgaagggcatgaatgtaaatttacacaggctacgccctgttcctataaatagatgaatagtacccacgtactgttcacgctgacttgtactcgctcgtgcgtcacgcttgtacttttaccttctatcaagccaaaggtacaaatgtaatcctgtgttattcttattcattcatgattatataataaaagatatattatgatgtcatacgattatt

SEQ ID NO: 78177 - DNA, 1911 bp, Zea Mays
acgttcgtcaatcatgtcctgacccgcaacagacactcgcgcaacctcctcttcctaccctatctgagctgcctcgcccccgtcctgcaatcgctgcaacctgaaggatctgcagcgatggtgaggaaagccatcaccgccacatgggacgagcggcagacggtgactggcgagcacacaatcccccacccacaaaggccggccgtcgctactactttgacccccttcgtcggcgatgagaaccaccaagtacgtcgtcttgcacaacatcgctgccacttcgcgtgctgctcaaagctggagtggacgggactctcattgttcaacatattaatcatatctcattgtgttgaacaaggtggttgatatgcttccacacctaaaaacatgacattgtgcgggtcggtgtgccaccgcctgtagggtgttcgaggaaaatgccagtgaaggatgtggttccgttgaccagcatggtgtacattggattttggaagacaatctcacacctggatctgagtgtcttgtttatacttttgcattttctgatgtggtcatattataatatgatttaatacaccttgcattagttttatagtataggactataaattcattttctatgccctctataaatttgcatgtaattctttgtttgagatcattggaaaagattccttatctacctggttatgagaagaaaaaatagctatactgcataattgattattggaaaaaaaatccaaagaaattaacatatgttagctatagaattttcagtttttatattttttcacgtttgagattcatcttgtagttattcattgcaatggaatgaatgcatggttgtccactattagacgtggatgagtctgggtatataaactaaactgaactcctcttggagtagaaataggtattgatttttgcacattgtttcgatttgtagtcttgtgacctcaatgttaactatttcacttttgataaattgtaattttatggtgcactgaggaaccaacacagatgaaggataaaattctagggagaatgctctaaaagagctgcaacgtgcacctctattgattcttggcctggtgctatcatccatgccatctagcactgcagaccaaaaggaggtaatgaagggattaattgtatttgctagcgattggaaatcgattatagtttgaacgaggaattcagggtgatcccaggactgagagaatatggcgaccactacttcgacacagacaattgatggctcatacagtcataccactgtatggttgtgtgaaaatcccacttggtccctggataggaatgatatcttgcaagtaatattcaatatggaggcgtaattgtgtttaatagtcggcatgccttagtaatgtgtacaaccttctacataaagcttgaccaaggacaatggggatgctagagaaggatatgtgaatggagaatgtggtgtatgttttgtcttgtacgggtgcagaaacattgatgttttcaaataaatgtctttgattcaaataattctcggtggagaagttatgagatcaaatttacaaagcacttcaactctttatgttgttctattggggttttaacctcaacttataacactttatgttttttgccgatcaaacagcatgggactttggtccactaatttggattaagcggccattaaatatgattatatgccgtagcaacacacgggtattaaactagtaacaatagaagcacaaaagattcagccaaccatgaagccaagcctgtgataaccagtttcttgacaatgcctagcaagaatttagcccacaaatcaggctttattgttacaaaatgagcagacccttgctgtttcgcaacatgtgggacgcgcgcaataaaagaaactaagaacaatttgac

SEQ ID NO: 78178 - DNA, 2971 bp, Zea Mays
ctagtcattttctcagccgccacaaagacagccgcctccctgggatttttttttcttttcttcttcctggccgaccgcacctcccacttctattcctgccggccgccagggagattctctctttcttttctttatctcaatgatgtcttgtcgttgcatttggtcacgatgtgatcctcagtatgctcttttccttcttatccagtgaggattagagcaagccagaggcagattcttttcactttcgtggttctattcttttctactttgtgcgttctctagcatctggccgctagttcctgcagcgcatgcagttcattcgttacaccactggccgtacagccacatgaaggccatatgcctcacggtctcactttctgttttttttctctctgcatcacttgaactcagagccgagaaaaaaaaaataccgtgttgcacgaggctatttctggttacacgatccagcctcaagtattcgatccctctcttctgtgtgaatgtatgtatgagatgtgtcttcttgtaatttatgggatcgagtacggaggtctaaaacgtggatctggttcccaacatttttctgtgaatccagtcactggattaaactaacagtgctctgtgcacttcgaccgatccggattttagggttaatttagttagggttgagccctaactggatctgcgtttctgttacttgactctgtttcttggccgtggatcgttggatcctgagccctgtgcaccgtctctgttgatggtgtgccgattagggttaggttgtaaaccctaaccctaaacagttgtgagtgctctctctggtttgaggccgagacactgtctcttacattggccaaacctaaatcttagggtaagggaaaaccctaacccgagagcatggactctttctatctattctaatctctctgttctcgggtgatgaataattattaaaaaaaaatgagttcaatcacatgaatctgagacctttctgcgatctcataaaaccgaatgcggattaggagatctagggttcttaggttggctttgataccattgttagaatctatactgcctaggatcgattcctaagtccctataaaaccaatccgtaactggaactggaagtataatcttgatgacgagtagttctgatctactaagaggaatagaggaatacacacctttgttgttgctatcttcataccgtcgccctgcagagaagcagcaggcatcgggatccgtgccgccgtaggttgttgcgtttccaaacactccgacgcctaggcgatgggggcctctgaggactagggttttggggcgaggtactagcgttagtctttcctgcgaccccttagtcctatatatatagcgtcgtgtgtctgggggctccaaccgaggttagcgtgggccctcccgatcaagggcccgattaaaggaacgatagttggattaagcccaatccagtctctattgaccggctgtagaggacacacccaacaccctgacctcctcttcgcctggtcacctgaagctcctccgcttctgtagaaccggccggtaaccaaaccagctcgtctacaggaggaataggatatatacaccgatctcaaaagggatcaaaaggttccagatcccagcggcttagtatatggctaaaggtagaacaagcatggactgacgtgaagctacctaagttggtgcagcgacagtgataagaagggctaagcattttcttcttcttcttctagttaaccacctgtccacctagtacactattatattgtgcacaatagtataaacaagctaggcaccagtgcaccacaagtgcaagtctgtgccctctagcaccaggaaaaaagttatttttcttttttttaattacccggacatcataaaacttcactggttattcagttaacaattggttggtcgtgcgccgttgttcaaccatcgccatcacgcagctctcactggcgctgcacgcctgcacggttacatatacttctctattttcttttgaaagacgattgactactctgtttttaccaaggaacatgagtacgagtataaaagctgtcctgttacaaaaggtttagagcgtagatacatccagcagcagcatgttccctgtagttagcaggtctcttcaccttcacctttgcaacaatctaagtgatcagtctccttgaacagatgtatctaatttcttgttggcccctatctgagcgctaaaacactgaaacgaaccacctgatggtgctagatctctgcgaaggcgcagacggtccgtggcaccggcccagacaggccgcgacctaagcgcaggagtggttcctcctctgcacgctttcggacagtccgcacctggggccggatgatccgcggtgtcgtagaggacttttttctccgcgaagaaccctagaacttacctcccggaagtgattccgttgagggggagagttacaaggcgttgctccggttcagcagaccacccgatgcgtttctaatcggcgtagagtcgaaaagagattgttgtggaagattaaactagatctaaatctaaggctagattactcctactcccaggaattggaagaacgatacaattgaggtaaaattgataagtagatttgattgaatcgattgttagcccttcagctatataaagggtggaggtatggacccaatacaagtcggttctcaagttaaccccacagtatttgctaacaaattccgctataaatctagaactcaaactgattctgtgcacgcgtggactgcagacagtttggaccgcggaccatttggccacagaggcggacagtccgcatggtatttttgctgttcaacatttctgcaccaaagacagacaaaagacatcatctcagttcaaattgatcaagtgagacctacaaaaattggtcgctagccacgccatagttgtaattgtcctacaacagggcctcgt

SEQ ID NO: 78179 - DNA, 1161 bp, Zea Mays
tttccatccggcacttgatgggggatgtgctgcactctcagcccggcgctgccgacgtggccgtctggcccggcgagctcgacgagcagctcataaccgagctcctcagcgacgacagcctcctcctcggagccctgcagcaggcccccgccggcgactcggagcactgctgctcgagtgacccaggcggcgcgtcatctgctcccgcgccgtgcatcagtggcgacggcggcaccgcgaccgagcaggagctgctgcttccgcagccggaggcggtaagcagggccctgtgctcggtgtacaccggcccgacgatccgcgacatcgagaaagcgctgtcagcgtccaagccgtacccctggagcaggagccgctacagcccaatgcatctgttgggagcggtgagccgagcgccggagaagtacacgacgaaggtgaagagctgtgacggcaagacgccgagcgacgggtacaagtggaggaagtacgggcagaagtccatcaagaacaacccccatcccaggagctactacaagtgcacgagttcccggtgcggcgcgaagaagcatgtggagaaatcgccggacgacccagagatgctgtcggtcacgtacgagggtgcacacctgcacggcccgcagccgctcttcccgcgccggcggcagtggctgccggtcggcatgggggcgacgacgacgaagcaacagcagcagcaggcctgcagtgcctcctccctgtccccagccgcgcttgcgagcgacgacgcgggcggcggctggccatcgagctcgcagcaattagtcacaagcaacgtccaggcgcgagagcccacggctgctgctgctgcgggcgaaagcgaaacggtgccggggcctcagaccgccggacacgcgggtgacgccgcgtcaacgcagacgcacctgctgctgctgaccgcggactcgtgcgacgacggctccaccgcctccatgccgccgccgcggctggctgctgcgacatttcactgtgactcgccgccggcgcctaccacctggtcgtgctctgtgttagaatctatactgcctaggatcgattcctaagtccctataaaaccaatccgtaactggaactggaagtataatcttgatgacgagtagttctgatctactaagaggaatagag

SEQ ID NO: 78180 - DNA, 2053 bp, Zea Mays
ctgaaatcgtgttctgcctgtgctgattacttgccgtcctttgtagcagcaaaatatagggacatggtagtacgaaacgaagatagaacctacacagcaatacgagaaatgtgtaatttggtgcttagcgatgccaagcggttgatcggcaggaggttctctgacccgtcagtgcagagtgacatgaagctatggccgttcaaggtcatcccagggcctggtgacaaacccatgattgtagtcaactacaagggcgaggagaagcagtttgctgctgaggagatctcctccatggtcctcatcaagatgaaggagattgctgaagcctaccttggttccaccatcaagaacgcagtggtgacagtgccggcctatttcaacgactcgcagaggcaggccaccaaggacgccggtgtcattgcgggcctcaatgtgatgcgtatcatcaacgagcccactgctgctgctattgcctacggtcttgacaagaaggccaccagctccggcgagaagaacgtgctcatcttcgaccttggtggtggcacgtttgatgtgtcgctcctcaccatcgaggagggcatcttcgaggtgaaggccactgcgggcgacactcaccttggcggcgaggacttcgacaatcgcatggtgaaccacttcgtccaagagttcaagcgcaagaataagaaggacataagcggcaacccccgtgcactgcgccggctgcgcacggcgtgcgagcgcgccaagcgcacgctgtcatcgactgcccagacgaccattgagatcgactccctgttcgagggcatcgatttctactccacgatcaccagggctcgcttcgaggagctcaatatggacttgttccggaagtgcatggaacctgtggagaagtgcttgcgcgacgccaagatggacaagagcagcgtgcacgacgtcgtgctcgtcggtggctccacccgcatccccaaggtgcagcagctgctgcaggacttcttcaacggaaaggaattgtgcaagagcatcaaccccgacgaggctgtggcgtacggcgccgctgtccaggctgccatcctcagcggcgagggcaacgaaaaggtacaagatctgctcctgctcgacgtcacgccactgtctctcggcctggagactgcaggtggcgtcatgacggtgctgatcccgaggaacaccaccatcccgaccaagaaggagcaggtcttctccacgtactccgacaaccagccgggcgtcctgatccaggtgtacgagggtgagcgcgcgaggaccaaggacaacaacctcctcggcaagttcgaactctccggcatccctcctgctccccgcggcgtgccccagatcacggttaccttcgacatcgatgccaacggcatcctcaacgtctctgccgaggacaagaccaccggccagaagaacaagatcacgatcaccaacgacaagggccggcttagcaaggaggaggccaagaacgcgctcgagaattatgcctacaacatgaggaacaccatcaaggacgacaagatcgcctccaagctccccgctgaggacaagaagaagatcgaagatgccgttgacggcgccatcagctggctggacagcaaccagctggctgaggtggaggagttcgaagacaagatgaaggagcttgaggggatctgcaaccccatcatcgcgaagatgtaccagggcgagggcgcgggcatgggcgctgctgctggcatggatgaggatgccccgtctggtgggagcggtgctggtcccaagatcgaggaggtggattaagttggttagtgttcgaggtttggtttggtgaggtgtgaagtgcctgaactctgatggttgtttgtgaggtgtggtcgcaatagctgcggcctgtggtgaacttctcagaaataaataagttttcgttcctaatttgttttttttcaattcatgtgttggtcgccttgtttcgtatcgttgcttttcatgttaaacaggtactcttgtcatgcaagtgatgatgtgaatacgaggcactgcataatttgcacaggac

SEQ ID NO: 78181 - DNA, 348 bp, Zea Mays
caagtgcccaagttatgtactacggtagccactacaacaagccaagaaaattccgccccgcaccagcctccaccagaaatcaatactgcacatatatgttgtaggaagccatgaacttcgtattgaataccttcgaaataggacgaggacaaagataaagatattaagctccgtcgcaacagcatatagaaaccaaggtgagtagtgacgggataagatgttcacaatttcgtgtccaaaatattataggtagaagtcaatattgccctcgcagtgttttgtaaatcacatgtacagatcttacgggtatacttgtaatttcatacgaatgtatgatctactataaat

SEQ ID NO: 78182 - DNA, 437 bp, Zea Mays
gaataacccacgaggaccactccaccaggcagcaggcaccaacttcgcttgactcgcttcgccccaaacggcgatagccaaccgcgatcgatagatgttcaagcgcaccggcggcagtcgacgaagggtgagcccatgtactcaagcagcacgccgtagctgatctccccatcgccgattttcaggtcacccgtcttgcactcttgcttttgcttgtgaaaaagtggtcccactcccgttaggcttgctgccttcagtgagaattgtcacggagtgcagaaccgttgcagcgctgacgttttatgggcctgctgttgtatctaaatacaggcttgcatgatattagagactattagttcatagcttgtattctttttgacaattgtaacatgctgcctgcttgtaactggtgtacttggtgttcgtttcatcaaatg

SEQ ID NO: 78183 - DNA, 828 bp, Zea Mays
catgactcgaacggccgtcgagcccaaacctagcgatcgcagagagttgcgcccggaccccggaccgcgccgacccggctcgcaaactcctccacaaccctcgtcgccgccggctgctccacccccgccaccgccatgggacgatggtgtcgcagctggtgaagcacgagcgcatcgagaccaccgttgccaaggcgaaggaggttcggcggaaggcggatcagatggtgcagctagggaaggagggtactcagcatgcagcaagacgtgctgctgcctttgttcggggtgatgatgtcgttcataagctatttactgagctggcctttcgctacagagatcgagctgggggctacacaagaatgttaagaaccaggatacgtgttggtgatgctgctccaatggcatacatcgagttcgtggatagggagaatgagcttcgagaggccaaacctgcaacgccgccgcctcctcaacgagtccctcttgatccatgggccaagtcacgtgctagccaacagtgggcaggacctaaaatcaccaagagctcggaaacggacggcttatgagctaattgcaaggctgtgtccaaacaggaggaagtttggaacgagagagatgtatctctgctttgcttattggagttgtaacagatccaactacatgatcaaattcgtgtatgcatcagtctgccagtcctgtgtggctgtgtccgtggatcgttatgtcagattagtttctgatgatgtgtcttttcaccgtttgcctgttctgaaccaaaagaatgttatagcaatcagttccacagaaaaaaaaaacgcacaagaa

SEQ ID NO: 78184 - DNA, 880 bp, Zea Mays
catgactcgaacggccgtcgagcccaaacctagcgatcgcagagagttgcgcccggaccccggaccgcgccgacccggctcgcaaactcctccacaaccctcgtcgccgccggctgctccacccccgccaccgccatgggtaaattccgcaagcttggccgcgattactcccaacgcatctgcatgctcaggacgatggtgtcgcagctggtgaagcacgagcgcatcgagaccaccgttgccaaggcgaaggaggttcggcggaaggcggatcagatggtgcagctagggaaggagggtactcagcatgcagcaagacgtgctgctgcctttgttcggggtgatgatgtcgttcataagctatttactgagctggcctttcgctacagagatcgagctgggggctacacaagaatgttaagaaccaggatacgtgttggtgatgctgctccaatggcatacatcgagttcgtggatagggagaatgagcttcgagaggccaaacctgcaacgccgccgcctcctcaacgagtccctcttgatccatgggccaagtcacgtgctagccaacagtgggcaggacctaaaatcaccaagagctcggaaacggacggcttatgagctaattgcaaggctgtgtccaaacaggaggaagtttggaacgagagagatgtatctctgctttgcttattggagttgtaacagatccaactacatgatcaaattcgtgtatgcatcagtctgccagtcctgtgtggctgtgtccgtggatcgttatgtcagattagtttctgatgatgtgtcttttcaccgtttgcctgttctgaaccaaaagaatgttatagcaatcagttccacagaaaaaaaaaacgcacaagaa

SEQ ID NO: 78185 - DNA, 1382 bp, Zea Mays
ctgattttgctgcaagggtccaatttttgaggaagggtcaggctttgagtctgcattcaagcttttccatggccgagatggaatagttcccctttcagaaagatcatatgtatctgatgaaaaccacaatgagagcattgatgtcaggactgaacctgctctgccgtttaatccattggctgctagagcagccacaataagtctatcagcatttggaccatttggttttggctttttcaacggcaagggcaaaaggcagaacaagaaacccaacaatctagatcagtcccaccagaagcccaagacaccagatcagtcttccatgaaacaaaaaggagtcaacccaccatcacatgaggcattcagcgatgagtggttggaaaatggccagtgcccacttgcgcggtcttaccgggcaatgagtggtgttttgcccctcgttgccaaggccttacagccaccagctggtatgaagctgaagtgcccacctgctgtggttgctgtccgagctgcccttgcgcgaactgcgcttgtgaaatccctccgaccacagcccctgccctcaaagatggtagccattgcactactggggatggcagcaaacatccctcttggggtgtggcgggagcacaccaagaagttctctcctcagtggtttgcagctgtccatgccgctgttccgttcattgcaatgctgaggaagtctgttgtgatgcccaggactgcgatggcattcaccatagcagcctccattgttggccagacaattgggtcaagggctgagcgcatccgtctaaggaatcaggcggcaaatggtactggtgattcttcaacgcacactgctatgtatccaaacaagaatgggcattgcagcgacactgaaggcaaggcatgggaccctcttgcgacgaagataacaggctcaactgctaggggttctcctgcaccaaccccaagcgtgtgcttctgattgtgttaagcatgtgattcacgcacacctgtgaagagattatacatgaaccagtttatcttatagtgccatgtaattgccttgtgtgtcccagaaaactgagctgcccgtgtgcgataagtagaataagaggtgctaccccactgtttgctgtgttgctatggtcgagattgatgtattgatgctgctgcatttctttctttttgttaatgtgtggtggcgtttctcgcttctgtaaagcagctgaagctgtcacatcatttgatcagttgaagctgtatgttaccatgtgtgtgccatttaatgtttggagttatgaaatgaggcacatgtctcgaccctgaaataacatatagttcttctgcactgtgagaatgctgccctctgttcatgtctatattttagttcaagg

SEQ ID NO: 78186 - DNA, 1799 bp, Zea Mays
ctgaattgatatgatctgggatcgattggcgtatttggcaagcgggctccgattgtctcgatttcgcacggggcagatctagttgttttttcgtaccgaatttattgggggaattgctggttcgcgagatgctaagcaattgagagatctgcttgactccggggtgggacttggagcatgtggaatggggttagctatgcgattgcgtttttttcccgatcaatattggacaagggcacgggcacgccttgttatccttacacgagtctgaaggatggaaatgttttttggcagctttctcagtgaatcagtatcaccgcagaaccttttcggacacccggatgttgagaaatgcccattcctgaggaatatcaatggagctacaaccttttccctcgcttctgctttgccagtagctgctcaaggaggcaagggtccaatttttgaggaagggtcaggctttgagtctgcattcaagcttttccatggccgagatggaatagttcccctttcagaaagatcatatgtatctgatgaaaaccacaatgagagcattgatgtcaggactgaacctgctctgccgtttaatccattggctgctagagcagccacaataagtctatcagcatttggaccatttggttttggctttttcaacggcaagggcaaaaggcagaacaagaaacccaacaatctagatcagtcccaccagaagcccaagacaccagatcagtcttccatgaaacaaaaaggagtcaacccaccatcacatgaggcattcagcgatgagtggttggaaaatggccagtgcccacttgcgcggtcttaccgggcaatgagtggtgttttgcccctcgttgccaaggccttacagccaccagctggtatgaagctgaagtgcccacctgctgtggttgctgtccgagctgcccttgcgcgaactgcgcttgtgaaatccctccgaccacagcccctgccctcaaagatggtagccattgcactactggggatggcagcaaacatccctcttggggtgtggcgggagcacaccaagaagttctctcctcagtggtttgcagctgtccatgccgctgttccgttcattgcaatgctgaggaagtctgttgtgatgcccaggactgcgatggcattcaccatagcagcctccattgttggccagacaattgggtcaagggctgagcgcatccgtctaaggaatcaggcggcaaatggtactggtgattcttcaacgcacactgctatgtatccaaacaagaatgggcattgcagcgacactgaaggcaaggcatgggaccctcttgcgacgaagataacaggctcaactgctaggggttctcctgcaccaaccccaagcgtgtgcttctgattgtgttaagcatgtgattcacgcacacctgtgaagagattatacatgaaccagtttatcttatagtgccatgtaattgccttgtgtgtcccagaaaactgagctgcccgtgtgcgataagtagaataagaggtgctaccccactgtttgctgtgttgctatggtcgagattgatgtattgatgctgctgcatttctttctttttgttaatgtgtggtggcgtttctcgcttctgtaaagcagctgaagctgtcacatcatttgatcagttgaagctgtatgttaccatgtgtgtgccatttaatgtttggagttatgaaatgaggcacatgtctcgaccctgaaataacatatagttcttctgcactgtgagaatgctgccctctgttcatgtctatattttagttcaagg

SEQ ID NO: 78187 - DNA, 1681 bp, Zea Mays
aggtgtgacggcggcgtggacgcgtcaccgtcacgtcgcgtggcgcagagcgagagcggtatatgcgtatgccggccgcacgacgcccgaatgctgaccacacgacacaacaagtacccaaccactccttgattcccctttcctccctctcgcattcgtctccaccagccggtcggacttcttgcgctccaagaactcggcgagaaccttttcggacacccggatgttgagaaatgcccattcctgaggaatatcaatggagctacaaccttttccctcgcttctgctttgccagtagctgctcaaggaggcaagggtccaatttttgaggaagggtcaggctttgagtctgcattcaagcttttccatggccgagatggaatagttcccctttcagaaagatcatatgtatctgatgaaaaccacaatgagagcattgatgtcaggactgaacctgctctgccgtttaatccattggctgctagagcagccacaataagtctatcagcatttggaccatttggttttggctttttcaacggcaagggcaaaaggcagaacaagaaacccaacaatctagatcagtcccaccagaagcccaagacaccagatcagtcttccatgaaacaaaaaggagtcaacccaccatcacatgaggcattcagcgatgagtggttggaaaatggccagtgcccacttgcgcggtcttaccgggcaatgagtggtgttttgcccctcgttgccaaggccttacagccaccagctggtatgaagctgaagtgcccacctgctgtggttgctgtccgagctgcccttgcgcgaactgcgcttgtgaaatccctccgaccacagcccctgccctcaaagatggtagccattgcactactggggatggcagcaaacatccctcttggggtgtggcgggagcacaccaagaagttctctcctcagtggtttgcagctgtccatgccgctgttccgttcattgcaatgctgaggaagtctgttgtgatgcccaggactgcgatggcattcaccatagcagcctccattgttggccagacaattgggtcaagggctgagcgcatccgtctaaggaatcaggcggcaaatggtactggtgattcttcaacgcacactgctatgtatccaaacaagaatgggcattgcagcgacactgaaggcaaggcatgggaccctcttgcgacgaagataacaggctcaactgctaggggttctcctgcaccaaccccaagcgtgtgcttctgattgtgttaagcatgtgattcacgcacacctgtgaagagattatacatgaaccagtttatcttatagtgccatgtaattgccttgtgtgtcccagaaaactgagctgcccgtgtgcgataagtagaataagaggtgctaccccactgtttgctgtgttgctatggtcgagattgatgtattgatgctgctgcatttctttctttttgttaatgtgtggtggcgtttctcgcttctgtaaagcagctgaagctgtcacatcatttgatcagttgaagctgtatgttaccatgtgtgtgccatttaatgtttggagttatgaaatgaggcacatgtctcgaccctgaaataacatatagttcttctgcactgtgagaatgctgccctctgttcatgtctatattttagttcaagg

SEQ ID NO: 78188 - DNA, 1789 bp, Zea Mays
aggtgtgacggcggcgtggacgcgtcaccgtcacgtcgcgtggcgcagagcgagagcggtatatgcgtatgccggccgcacgacgcccgaatgctgaccacacgacacaacaagtacccaaccactccttgattcccctttcctccctctcgcattcgtctccaccagccggtcggacttcttgcgctccaagaactcggcgagttcttcgtatttcatttgtttgtgtgttgcgaagcggttggagttctttcaattatcaggatggaaatgttttttggcagctttctcagtgaatcagtatcaccgcagaaccttttcggacacccggatgttgagaaatgcccattcctgaggaatatcaatggagctacaaccttttccctcgcttctgctttgccagtagctgctcaaggaggcaagggtccaatttttgaggaagggtcaggctttgagtctgcattcaagcttttccatggccgagatggaatagttcccctttcagaaagatcatatgtatctgatgaaaaccacaatgagagcattgatgtcaggactgaacctgctctgccgtttaatccattggctgctagagcagccacaataagtctatcagcatttggaccatttggttttggctttttcaacggcaagggcaaaaggcagaacaagaaacccaacaatctagatcagtcccaccagaagcccaagacaccagatcagtcttccatgaaacaaaaaggagtcaacccaccatcacatgaggcattcagcgatgagtggttggaaaatggccagtgcccacttgcgcggtcttaccgggcaatgagtggtgttttgcccctcgttgccaaggccttacagccaccagctggtatgaagctgaagtgcccacctgctgtggttgctgtccgagctgcccttgcgcgaactgcgcttgtgaaatccctccgaccacagcccctgccctcaaagatggtagccattgcactactggggatggcagcaaacatccctcttggggtgtggcgggagcacaccaagaagttctctcctcagtggtttgcagctgtccatgccgctgttccgttcattgcaatgctgaggaagtctgttgtgatgcccaggactgcgatggcattcaccatagcagcctccattgttggccagacaattgggtcaagggctgagcgcatccgtctaaggaatcaggcggcaaatggtactggtgattcttcaacgcacactgctatgtatccaaacaagaatgggcattgcagcgacactgaaggcaaggcatgggaccctcttgcgacgaagataacaggctcaactgctaggggttctcctgcaccaaccccaagcgtgtgcttctgattgtgttaagcatgtgattcacgcacacctgtgaagagattatacatgaaccagtttatcttatagtgccatgtaattgccttgtgtgtcccagaaaactgagctgcccgtgtgcgataagtagaataagaggtgctaccccactgtttgctgtgttgctatggtcgagattgatgtattgatgctgctgcatttctttctttttgttaatgtgtggtggcgtttctcgcttctgtaaagcagctgaagctgtcacatcatttgatcagttgaagctgtatgttaccatgtgtgtgccatttaatgtttggagttatgaaatgaggcacatgtctcgaccctgaaataacatatagttcttctgcactgtgagaatgctgccctctgttcatgtctatattttagttcaagg

SEQ ID NO: 78189 - DNA, 616 bp, Zea Mays
cttgactccggggtgggacttggagcatgtggaatggggttagctatgcgattgcgtttttttcccgatcaatattggacaagggcacgggcacgccttgttatccttacacgagtctgaaggatggaaatgttttttggcagctttctcagtgaatcagtatcaccgcagaaccttttcggacacccggatgttgagaaatgcccattcctgaggaatatcaatggagctacaaccttttccctcgcttctgctttgccagtagctgctcaaggaggcaagggtccaatttttgaggaagggtcaggctttgagtctgcattcaagcttttccatggccgagatggaatagttcccctttcagaaagatcatatgtatctgatgaaaaccacaatgagagcattgatgtcaggactgaacctgctctgccgtttaatccattggctgctagagcagccacaataagtctatcagcatttggaccatttggttttggctttttcaacggcaagggcaaaaggcagaacaagaaacccaacaatctagatcagtcccaccagaagcccaagacaccagatcagtcttccatgaaatgttctcttccatggttttttc

SEQ ID NO: 78190 - DNA, 1999 bp, Zea Mays
atgaaattgagcaaaattgggataatattttgacaaatgtcatgggaactttgaatatgttgggtctggcaaagcgagttggtgcaaggtttttgttgactagcacaagtgaagtttatggtgatccacttgagcatccacagaaggagtcatactggggacacgttaatcctattggtgttaggagctgttatgatgaggggaagagaacagctgagacttcaactatggactatcatcgtggtgctggtgttgaggtgcgtattgcccgcattttcaatacatatggtcctcgtatgtgtctcgatgatggccgtgtggtcagcaattttgttgcacaggcactacgaagacaaccaatgacggtttatggtgatggaaaacaaactcgaagtttccaatatgtttctgatctggttgctggattgatggctctaatggagagtgatcacattggtcctttcaacttgggaaacccaggagagtttaccatgttggagctagcacaggttgtgaaggaaacaattgacccaatggcaaccattgaattcaaacccaacacagctgatgatccccatatgagaaagccggatatcaccaaggctaagcaactgctacattgggagccaaacgtctctctcagagaaggccttccgctaatggtcaaagacttccgtcaaaggatctcggatgagtaatcgaggcaatcctacgatactggtgaccggtttgattctgaactatgctgcaaatacagtcagaagctctttatcgattggagccatgcagtacagtgtactgtgtacacagagactgtagaatcacccaggccccatttggaatgtggggatccatacaatttccactggatagtactgtttctgtgaaataactgaaaagttcatgggaagttcgtgttaatcttttttttttatatcttggtggggcagaacagaagcagtcaaatatttttttgtgcatatgtgaaattccagagttgtgggtggtgagagataggatacaatgctgtatgtatttcaggaacttctgtaacacgagaacattcatcatgtgaaaaaatgtaactgaatgtgttggccagctcgctcttgctgtacattcaactgacagtccacaaattccccattctcaagtgaaaaataacagtctcgtatacagtatctgagcagttttctggatacatttgtcatcagaagttgacttccaaaaacatcgaagctttgcaacacagtaggtgtttctgcaaattctgcagccttctacttgagatgcacactgaaactcagcactctgctcaggctgacattattcccacccgtttctggtacaccaccagcagctctgacaacggcaaagccggaggcgccactgtaccgccccgtccctccgacgaccgcgacgtgagactcctcctggtcgtcgcggcggacgccgaagaagctgatgctgtcgcccgcgccgtcgccggcgaacgaggccttcacggccaccatatggctgccgttgtcagccacgccggtgacgaggacgccctgcagcctcccatccagaggcagcccgaactccttgctgccgcggagccgctcgtcgaccacggtgaccgcggcaggccggagcgcgtccggcctcgtcaaggcgcgcagccagcggctgccgattggcccctcgtccgtgaagaccgggcgccgcgtggaaggagctgtgggtttgggcgacgcgacgccggtgccggtggtgtacagcgtgatcgtttgggcggagctgcgggacggcggcgacggcgaggaaccgcggcgtgccggacgggcgctggctgccgtgctcgtcaccgcgagcaggagcgcgagagcggcggcgcaggcttgcttgaggatgcgagtgcgagattgcgcgtgcatcttcgggcccggccggggccgtgcgtgtgtgtttttgcgtctggttggagcgtgtttaagtggtgcctgaaaggattttt

SEQ ID NO: 78191 - DNA, 2560 bp, Zea Mays
cgccacgtagctctcgaccgcgctctcgccccgcctccctctcgcccgcctctcgcccgggcgggcgctccagcgcgggcgagagcgagtcccacaccataccaggtcaccatacccgcctccgccgcctggccgcgctctcccgccatgaagcagctccacaagtcttcccccacccaagcgccatcgccggcgcacgcaccggctcccaaggcagccaagccggcgcgccctggcccgcgctcctggatcgggtatatcctccgcgagcagcgcctcctcttcgtcctcctcggcgcgctcatcgccaccaccttcttcctcatccgtccctacttctcgctctccccgtcctcccacctccccgacgtccgcccgctcttctccttcgccgcccgctccgctgtcccgcccggcttccgcccgcccccgcgccgcgtcgtcgtcacaggcggggcagggttcgtcggcagccacctcgtcgaccggctcctagagcagggggacagcgtgatcgtggtcgacaacttcttcaccggcaggaaggagaacgtcgcgcaccacctccggaacccccggttcgagctgctccgccacgatgtagtcgaaccaatcctcctcgaggtcgaccggatctaccacctcgcatgccccgcgtcgcccgttcattacaagtataacccaatcaagacgatcaagacaaatgtcatgggaactttgaatatgttgggtctggcaaagcgagttggtgcaaggtttttgttgactagcacaagtgaagtttatggtgatccacttgagcatccacagaaggagtcatactggggacacgttaatcctattggtgttaggagctgttatgatgaggggaagagaacagctgagacttcaactatggactatcatcgtggtgctggtgttgaggtgcgtattgcccgcattttcaatacatatggtcctcgtatgtgtctcgatgatggccgtgtggtcagcaattttgttgcacaggcactacgaagacaaccaatgacggtttatggtgatggaaaacaaactcgaagtttccaatatgtttctgatctggttgctggattgatggctctaatggagagtgatcacattggtcctttcaacttgggaaacccaggagagtttaccatgttggagctagcacaggttgtgaaggaaacaattgacccaatggcaaccattgaattcaaacccaacacagctgatgatccccatatgagaaagccggatatcaccaaggctaagcaactgctacattgggagccaaacgtctctctcagagaaggccttccgctaatggtcaaagacttccgtcaaaggatctcggatgagtaatcgaggcaatcctacgatactggtgaccggtttgattctgaactatgctgcaaatacagtcagaagctctttatcgattggagccatgcagtacagtgtactgtgtacacagagactgtagaatcacccaggccccatttggaatgtggggatccatacaatttccactggatagtactgtttctgtgaaataactgaaaagttcatgggaagttcgtgttaatcttttttttttatatcttggtggggcagaacagaagcagtcaaatatttttttgtgcatatgtgaaattccagagttgtgggtggtgagagataggatacaatgctgtatgtatttcaggaacttctgtaacacgagaacattcatcatgtgaaaaaatgtaactgaatgtgttggccagctcgctcttgctgtacattcaactgacagtccacaaattccccattctcaagtgaaaaataacagtctcgtatacagtatctgagcagttttctggatacatttgtcatcagaagttgacttccaaaaacatcgaagctttgcaacacacagctctgacaacggcaaagccggaggcgccactgtaccgccccgtccctccgacgaccgcgacgtgagactcctcctggtcgtcgcggcggacgccgaagaagctgatgctgtcgcccgcgccgtcgccggcgaacgaggccttcacggccaccatatggctgccgttgtcagccacgccggtgacgaggacgccctgcagcctcccatccagaggcagcccgaactccttgctgccgcggagccgctcgtcgaccacggtgaccgcggcaggccggagcgcgtccggcctcgtcaaggcgcgcagccagcggctgccgattggcccctcgtccgtgaagaccgggcgccgcgtggaaggagctgtgggtttgggcgacgcgacgccggtgccggtggtgtacagcgtgatcgtttgggcggagctgcgggacggcggcgacggcgaggaaccgcggcgtgccggacgggcgctggctgccgtgctcgtcaccgcgagcaggagcgcgagagcggcggcgcaggcttgcttgaggatgcgagtgcgagattgcgcgtgcatcttcgggcccggccggggccgtgcgtgtgtgtttttgcgtctggttggagcgtgtttaagtggtgcctgaaaggattttt

SEQ ID NO: 78192 - DNA, 1734 bp, Zea Mays
attttgtctgggcaggacttcttcgtgaattcacgcggaaacaggctcttcacttgcatgtggacaccgaggaaatcggagtgcaaagttttgatctttatctgccatggatacggagccgagtgcagcatatccatgggagacacagtcgctcgattagtacaccgtggatacgctgttcacggaatcaaccacgagggccacggcaaatcttcaggctcgaaaggctacctatcgagcttcggcgacgtcgtcagagactgctcggacaatttcaagagtgtctgtgagaagcaggagaacaggctgaagaagaggttcctctacggcttctccatgagaggaaccgtggtgcttcagctccacaggaaggatcctctctactgggacggtgccgtgctgcttgccccaatgtgcaaggtccgatcgttaacgcactgaagatgatcagcaccgtcgcgcctagctggagagtcatccctgccacagacatgatcgacaaagtctgcaaagaccctcagctcaagaaagagatccgttccaacccgtacatgtacaggggaaacctcgcactgcaaacgggccgcgaactcctctccgtcagcctagacaccgagaagaacctgcacgaggtctcgttgccgttcttggtcctgcacggcacggacgacgtcgtggctgatccttccgggagcaggctgctgcacgagagggcgtccagcagggacaagacactgaagctgtatcccgggatgtggcacgtgctcatgggcgaacgtccggaggacgtcgagcgtgttttcgccgacgtgatctcgtggcttgaggacagggtcggcgtgtcacagtgtaacaccccgggatgcacaaacaccccggaatgctactgaactacacttctaacatctatataaaattttggcagcatttcctttgcaaaattgcataaataagggggggacaacagtgtataaacatatatcatgacaaaaacataccaagtattattaatcggctagcaaagggaagttaaacatacgatatgaactgaattaaccagtgcgcacgactagcaaaaaaataaacttcttttgacaacaagtttctaattaaatcatggctacgcctgggcagcgctattatgagagtgaaagtggacgtgctgctactcccctcattcccaacatgtatcaagtacctgcattgagtaatgcaagagtgagatgacacatctcagcaagtaaaataatatcaaactgtttaaccacataagaatattgttttaccaccacttgatttcacaaccttcttattacaaaggtgcagcacgtatacaacgtacaacactcctagctaccacacctcgcaggtagaaaccacaatagtaacatagtaatgtcactcttcatatatatacctcatgagtgcaaatgtctgcaaatgcaaggatgacttctgccttcatacctctaaggatatgaagccgcatcgtacccctcctcgggcaacgtacgatgctaaaaatgtaccggtacagtcggaccataagatcacgacataacttcagaatgcaagatggatgatgcaatgtgcatgacatgcctacaacacttcatataacgtgattcaaaaaaaatacttcaactccatccatgatgggaatcaaccacatatatcattaccaaatcatgatcatccacaatattagacaattgagaattaacactttcgaac

SEQ ID NO: 78193 - DNA, 3290 bp, Zea Mays
ggtctcatatcgctaattgtcgtccaaatattcaatccggaagtccagcaggccaatactcgaaaaatccagccccaccgcagccaactcagcgatccgcgctcgcaccacgtcagcgatccgcagcatataccaactctagttcctacccgtccgtctgatgcccatcgaacggcgcagactgcctccgcacaccaccgcacgctttctatataacccctcccccttcgtccaaactccaaaggtacacatcatctcttccaaatcccaccagcaaatccccaattcctccgagttcgagcgaccatgtcggggcgtggcaagggcgggaagggtctgggcaaaggcggcgccaagcgtcaccgcaaggttctccgcgacaacatccagggcatcacgaagccggcgatccggaggctggcgaggaggggcggcgtgaagcgcatctcggggctcatctacgaggagacccgcggcgtgctcaagatcttcctcgagaacgtcatccgcgacgccgtaacctacacggagcacgcccgccgcaagaccgtcaccgccatggacgtcgtctacgccctcaagcgccagggtcgcaccctctacggattcggcggctgagaggcgctaccgccgctggtggccgtggcaaaagtcttgggtcgcggtcaagaaatcgagagtattctggatgacgtgcttagtttcgtagtattattatcactagtgcttattgttagcggttgttgggttcgaccactctaagccactgtcaaacagtaatatatgagtaccgcatttccgtgtttcgaacttctaatatatcataatcttatggacatcgggttaattcgcttaattttgtgctggctatctgaatatttgttgctcccagtatttagcatttttttcttattagattgataaatttagaaacctaatttgtcgaggtctttgcaacagcttcttctgtccgtgacgcttcagccacgcttaggagtatttggcttcagcttgttgctagacagcaggagctaggagtaaaccattccatctctgtacctatctttacctcctagccatcatttgacttttctgactgtctacagtgctctacaacatcaaaaccattactataactatccacaagtggcaaatgattcttctgttcaatgaggagttgatcaaggtccagatgctgcttaccagcttcttacatcgtttctggattcaggatcttatgttggtccaacaagtaacacatattatactgttggtgctcatcagaccatgccaggatatgcaacaagcaattactattatcatcaaaacaatgcctggtaatggaagttctgtgaataatcatgaccagttgtatcagagtttcaccccaaatagtaatgtagctcagagttgtcgttcacatcctacaagctctgcccactaccagcagcagtacagccaatgagctaactattatgatcagtctgcacagagttcaggtggccttgcagttactagtagtggtaactggtagctctgctcctgatacaagaactattaccattggttccaattatgcacacaccagcaaccagccacctccaccaggcactacattatggaagagagatgctggtaacactgctgcaccttcgtcactggcctgtctgggacactctaaggggtcgtttggcagatctcccacagctccgctcatagcgagaattactcccgcagagccaaatggttgtattctcttggtgggtttctaagttatcaacggtttctaagttatctacaaccaccattttctccattgagtcaagatcctgaaccatcatcagaggatttctattttgttggtagcagtcagaactttggttctttctccccgacaccagcaccctttagtaaagggactccaccagcgatttcagcagcaggatctaagaaaaatgacattgatgacgacaatgacgtcgaggtcgacaggagtgccacccacgatgaagttagattggcaagtgcttggttgaatcattctaccgacccaattgatggctatgggctatggcaagaagaatgataaattctaggatcaagtttttttttgaaagggagggcaaaagatttgccgctccaatatattagaaaggagatacacttacaagacacgcactcgaagacaaagggaggagaaaagaaagaagaaggacaaaaacaaccgtctactgagcctaatcacaactccgaaactacctggcacaaactaactcaagaaagcacccactagctctttcactaaagaagcgatctgctttgcatttttctgctggttcctgaagatcctgttgtttctctctaaccataggctccaccaaaaatagatcagaagaccatcgaaatttcttctagattgcctattacagagacctcttatatttctccaccaaccatacaacgacacggaagcctggattcctctcaggaaggaacagttccccaatgtcaatattttatcccacacctctctactgaaaggataatctttgcataaataagataccgtctccaacgctgagttacaaagacagcaaactaggttgcactgtcaatgtttcttctgcaggttgttagcagtcagcaccactttattatgtaaaagagtccacgcaaaaaaaatgttaattctaggatcaagttacagatgacttcaacagcaccaggccagttgaccacaaaagaaatgttaatggactgaaaatgcattggcaagctcctcaaggcgacaataagccatttgaacaactgctggtcttgtgtccttcaaaagctggtatagtgttcttaaaaagcaaggaagttggatctcagatgaccaaatgatggatgaggcactaaagttaaatagagtagatgtgaatcaagtaaggtgggcaaaaaattagtccaaaattactagcaaaaataaaaaatatctagatttttttaaaaatagtaaaacaaatgtatagttaggttttgtcaaggattatgagaatgacataaatccatctctcaaatctaaactccttcaaaggttcaaaggacaattctctcttgctctctctctctctctctctctctctctcttttgcaatttcttacctccaaataagttcaataatgacatgaacagctatagtcatgcatgaacaactgcacgcaacgaagacgggtgtttgtagggaggttatttttggacccgttttgactacgagtactacatttgttaatgaatttcagccacg

SEQ ID NO: 78194 - DNA, 3727 bp, Zea Mays
cgaagtgaagaagttttgataaaaaagaactcaaagtttagtctttgtgacgcactagaccagtctaatgagacacctgacctattcgagcgaccatgtcggggcgtggcaagggcgggaagggtctgggcaaaggcggcgccaagcgtcaccgcaaggttctccgcgacaacatccagggcatcacgaagccggcgatccggaggctggcgaggaggggcggcgtgaagcgcatctcggggctcatctacgaggagacccgcggcgtgctcaagatcttcctcgagaacgtcatccgcgacgccgtaacctacacggagcacgcccgccgcaagaccgtcaccgccatggacgtcgtctacgccctcaagcgccagggtcgcaccctctacggattcggcggctgagaggcgctaccgccgctggtggccgtggcaaaagtcttgggtcgcggtcaagaaatcgagagtattctggatgacgtgcttagtttcgtagtattattatcactagtgcttattgttagcggttgttgggttcgaccactctaagccactgtcaaacagtaatatatgagtaccgcatttccgtgtttcgaacttctaatatatcataatcttatggacatcgggttaattcgcttaattttgtgctggctatctgaatatttgttgctcccagtatttagcatttttttcttattagattgataaatttagaaacctaatttgtcgaggtctttgcaacagcttcttctgtccgtgacgcttcagccacgcttaggagtatttggcttcagcttgttgctagacagcaggagctaggagtaaaccattccatctctgtacctatctttacctcctagccatcatttgacttttctgactgtctacagtgctctacaacatcaaaaccattactataactatccacaagtggcaaatgattcttctgttcaatgaggagttgatcaaggtccagatgctgcttaccagcttcttacatcgtttctggattcaggatcttatgttggtccaacaagtaacacatattatactgttggtgctcatcagaccatgccaggatatgcaacaagcaattactattatcatcaaaacaatgcctggtaatggaagttctgtgaataatcatgaccagttgtatcagagtttcaccccaaatagtaatgtagctcagagttgtcgttcacatcctacaagctctgcccactaccagcagcagtacagccaatgagctaactattatgatcagtctgcacagagttcaggtggccttgcagttactagtagtggtaactggtagctctgctcctgatacaagaactattaccattggttccaattatgcacacaccagcaaccagccacctccaccaggcactacattatggaagagagatgctggtaacactgctgcaccttcgtcactgacatccccttcgttttggctaataataagattccagaatgagattctacaaatgaggtatgaaccaaacagggccttagtgaggttgcagtatacgcagacaaacaaaacgaagcatacagaacaatcccccaaccctaaggacaagctgcgtggaggttcaggagcctttgcatgcaaaaggcgacaagtaaactattcttgactctataatggtttgacacatacgaatctaacacagaaggtgacagaacgaggccccacatgacaaatggcttctacattttgtattggattttgtgccataactcacaacctcaacagaaattgataacgtgatctatattggattttgtgcattatccaacttctcaaaaaccatagggaaccaaacatcacgtaacctggattttgccacaccaaggcaaacatctatggcattctatttgcagcatatatattgtggccatgggcacgcagccactgcttcaactccagtaccgccatctccatcgactggggcaactgcaaccgtccctggtttactattgtgtacctctgctgtggggaagaaggctcatagccatgggggcggacccactggcccaactctagtgctgttgtctccgtagattggggcaactacaggctacagccatccctagcagctagcttccagtcgggtactgctggcatgtccggttggcggccaggttcctccttctacagcctcggttgtattctcttggtgggtttctaagttatcaacggtttctaagttatctacaaccaccattttctccattgagtcaagatcctgaaccatcatcagaggatttctattttgttggtagcagtcagaactttggttctttctccccgacaccagcaccctttagtaaagggactccaccagcgatttcagcagcaggatctaagaaaaatgacattgatgacgacaatgacgtcgaggtcgacaggagtgccacccacgatgaagttagattggcaagtgcttggttgaatcattctaccgacccaattgatggctatgggctatggcaagaagaatgataaattctaggatcaagtttttttttgaaagggagggcaaaagatttgccgctccaatatattagaaaggagatacacttacaagacacgcactcgaagacaaagggaggagaaaagaaagaagaaggacaaaaacaaccgtctactgagcctaatcacaactccgaaactacctggcacaaactaactcaagaaagcacccactagctctttcactaaagaagcgatctgctttgcatttttctgctggttcctgaagatcctgttgtttctctctaaccataggctccaccaaaaatagatcagaagaccatcgaaatttcttctagattgcctattacagagacctcttatatttctccaccaaccatacaacgacacggaagcctggattcctctcaggaaggaacagttccccaatgtcaatattttatcccacacctctctactgaaaggataatctttgcataaataagataccgtctccaacgctgagttacaaagacagcaaactaggttgcactgtcaatgtttcttctgcaggttgttagcagtcagcaccactttattatgtaaaagagtccacgcaaaaaaaatgttaattctaggatcaagttacagatgacttcaacagcaccaggccagttgaccacaaaagaaatgttaatggactgaaaatgcattggcaagctcctcaaggcgacaataagccatttgaacaactgctggtcttgtgtccttcaaaagctggtatagtgttcttaaaaagcaaggaagttggatctcagatgaccaaatgatggatgaggcactaaagttaaatagagtagatgtgaatcaagtaaggtgggcaaaaaattagtccaaaattactagcaaaaataaaaaatatctagatttttttaaaaatagtaaaacaaatgtatagttaggttttgtcaaggattatgagaatgacataaatccatctctcaaatctaaactccttcaaaggttcaaaggacaattctctcttgctctctctctctctctctctctctctctcttttgcaatttcttacctccaaataagttcaataatgacatgaacagctatagtcatgcatgaacaactgcacgcaacgaagacgggtgtttgtagggaggttatttttggacccgttttgactacgagtactacatttgttaatgaatttcagccacg

SEQ ID NO: 78195 - DNA, 5504 bp, Zea Mays
cgaagtgaagaagttttgataaaaaagaactcaaagtttagtctttgtgacgcactagaccagtctaatgagacacctgacctattcgagcgaccatgtcggggcgtggcaagggcgggaagggtctgggcaaaggcggcgccaagcgtcaccgcaaggttctccgcgacaacatccagggcatcacgaagccggcgatccggaggctggcgaggaggggcggcgtgaagcgcatctcggggctcatctacgaggagacccgcggcgtgctcaagatcttcctcgagaacgtcatccgcgacgccgtaacctacacggagcacgcccgccgcaagaccgtcaccgccatggacgtcgtctacgccctcaagcgccagggtcgcaccctctacggattcggcggctgagaggcgctaccgccgctggtggccgtggcaaaagtcttgggtcgcggtcaagaaatcgagagtattctggatgacgtgcttagtttcgtagtattattatcactagtgcttattgttagcggttgttgggttcgaccactctaagccactgtcaaacagtaatatatgagtaccgcatttccgtgtttcgaacttctaatatatcataatcttatggacatcgggttaattcgcttaattttgtgctggctatctgaatatttgttgctcccagtatttagcatttttttcttattagattgataaatttagaaacctaatttgtcgaggtctttgcaacagcttcttctgtccgtgacgcttcagccacgcttaggagtatttggcttcagcttgttgctagacgtatgacatcttcagtcactgtttttacagcttgccaaaaatggttcactcttagataataaagaagcaaggttatagaatatatggctaaataaggggctgtagaattgatgcttgaacataactcaaatcttgcttaatgcagcatttatatatatggagtgatgctgctgttctttgaatatctcaattctactccattggttactaactgtcagttgctttagttgttaaatcaaacttgtaccaaatttatacaaaatgttaacatttacagtatcaaataaatgcactagtaaaatatatttatatggtgtatctattgaatctagtttaatgttgttgatatttatgtatttttctataaacttgtttcaagttattgatgtttaatttaggagaaaactaaaatgacttacaatttataatggagtatattagtagctatgtactccgactatagtatagtttaactgcaattattattctgttacctaacattaacaacgaggcatcacaaagaggggcggaccctaaaaaacgaaagagaaattatctttagtgtgcaataactattctgtcacctaattagtggtttaagtgttgtgttttgaagcagctagtcaccgtttgaaccctgatttttgtttcttttttatttttttcctggcacaccttaaacataagggctgggtttgccgctaatcgcaaatgagttgattctgccatggcttacatgatttacggttaaatagactatattgataatggaggaaggatttcactggctgcagtaccaaaaataatcatctattcttgttgcatatgaaatcattagtcagggtcagccaatatcatatcctgtcattagttagctctattacaatttctttagggctgatcacatgttataatagcaatgaaaaaattcttacgttgctgcattactgcatacaaatctttgttggcacttgcttcatagtctctgatgctgttcatattgattgattagtattacttatgatggccttatggtcaagtagtaagcaagcactatcagtgcctttgtggtgacttccatgctcaccatgaacctaggtttcacaatttctttccatagtcgttttgttctgccagtgccagatatgctgttctgtatggaatgctgatccgacaatggtttctctcgttgttttttctaattaccagagcaggagctaggagtaaaccattccatctctgtacctatctttacctcctagccatcatttgacttttctgactgtgagtttcttgtactatttaatggatattatgaatcaaaagtctgtttattatgatctccaaagggatgtatcagtttcaggagatattcaaagtgtgacaaagagtgaatctcatttgattcggtcagctaactcttatctgacatcggttcaacaggtctacagtgctctacaacatcaaaaccattactataactatccacaagtggcaaatgattcttctgttcaatgaggagttgatcaaggtccagatgctgcttaccagcttcttacatcgtttctggattcaggatcttatgttggtccaacaagtaacacatattatactgttggtgctcatcagaccatgccaggatatgcaacaagcaattactattatcatcaaaacaatgcctggtaatggaagttctgtgaataatcatgaccagttgtatcagagtttcaccccaaatagtaatgtagctcagagttgtcgttcacatcctacaagctctgcccactaccagcagcagtacagccaatgagctaactattatgatcagtctgcacagagttcaggtggccttgcagttactagtagtggtaactggtagctctgctcctgatacaagaactattaccattggttccaattatgcacacaccagcaaccagccacctccaccaggcactacattatggaagagagatgctggtaacactgctgcaccttcgtcactggcctgtctgggacactctaaggggtcgtttggcagatctcccacagctccgctcatagcgagaattactcccgcagagccaaatggtaaaaatctgaactgctccatggcgagaatttattttgtactataaagtgggagcaaaagaacatgcttcccaccgcttccaacctgctctctactctctaacctcttaggaatcacttcacagcctatttgccaaacagtttttgtcaaatagattcacttctgctagaaaatcaattagaatcactctattagagaatcggctctcggagctagagaatcatggagcggagctctgccaaacgagtcctaatactcttatgtaaccagattcatgctggaatttattatacttgactacttgtgaaactcttgtgttccagacatccccttcgttttggctaataataagattccagaatgagattctacaaatgaggtatgaaccaaacagggccttagtgaggttgcagtatacgcagacaaacaaaacgaagcatacagaacaatcccccaaccctaaggacaagctgcgtggaggttcaggagcctttgcatgcaaaaggcgacaagtaaactattcttgactctataatggtttgacacatacgaatctaacacagaaggtgacagaacgaggccccacatgacaaatggcttctacattttgtattggattttgtgccataactcacaacctcaacagaaattgataacgtgatctatattggattttgtgcattatccaacttctcaaaaaccatagggaaccaaacatcacgtaacctggattttgccacaccaaggcaaacatctatggcattctatttgcagcatatatattgtggccatgggcacgcagccactgcttcaactccagtaccgccatctccatcgactggggcaactgcaaccgtccctggtttactattgtgtacctctgctgtggggaagaaggctcatagccatgggggcggacccactggcccaactctagtgctgttgtctccgtagattggggcaactacaggctacagccatccctagcagctagcttccagtcgggtactgctggcatgtccggttggcggccaggttcctccttctacagcctcggttgtattctcttggtgggtttctaagttatcaacggtttctaagttatctacaaccaccattttctccattgagtcaagatcctgaaccatcatcagaggatttctattttgttggtagcagtcagaactttggttctttctccccgacaccagcaccctttagtaaagggactccaccagcgatttcagcagcaggatctaagaaaaatgacattgatgacgacaatgacgtcgaggtcgacaggagtgccacccacgatgaagttagattggcaagtgcttggttgaatcattctaccgacccaattgatggctatgggctatggcaagaagaatgataaattctaggatcaagtttttttttgaaagggagggcaaaagatttgccgctccaatatattagaaaggagatacacttacaagacacgcactcgaagacaaagggaggagaaaagaaagaagaaggacaaaaacaaccgtctactgagcctaatcacaactccgaaactacctggcacaaactaactcaagaaagcacccactagctctttcactaaagaagcgatctgctttgcatttttctgctggttcctgaagatcctgttgtttctctctaaccataggctccaccaaaaatagatcagaagaccatcgaaatttcttctagattgcctattacagagacctcttatatttctccaccaaccatacaacgacacggaagcctggattcctctcaggaaggaacagttccccaatgtcaatattttatcccacacctctctactgaaaggataatctttgcataaataagataccgtctccaacgctgagttacaaagacagcaaactaggttgcactgtcaatgtttcttctgcaggttgttagcagtcagcaccactttattatgtaaaagagtccacgcaaaaaaaatgttaattctaggatcaagttacagatgacttcaacagcaccaggccagttgaccacaaaagaaatgttaatggactgaaaatgcattggcaagctcctcaaggcgacaataagccatttgaacaactgctggtcttgtgtccttcaaaagctggtatagtgttcttaaaaagcaaggaagttggatctcagatgaccaaatgatggatgaggcactaaagttaaatagagtagatgtgaatcaagtaaggtgggcaaaaaattagtccaaaattactagcaaaaataaaaaatatctagatttttttaaaaatagtaaaacaaatgtatagttaggttttgtcaaggattatgagaatgacataaatccatctctcaaatctaaactccttcaaaggttcaaaggacaattctctcttgctctctctctctctctctctctctctctcttttgcaatttcttacctccaaataagttcaataatgacatgaacagctatagtcatgcatgaacaactgcacgcaacgaagacgggtgtttgtagggaggttatttttggacccgttttgactacgagtactacatttgttaatgaatttcagccacg

SEQ ID NO: 78196 - DNA, 4374 bp, Zea Mays
cgaagtgaagaagttttgataaaaaagaactcaaagtttagtctttgtgacgcactagaccagtctaatgagacacctgacctattcgagcgaccatgtcggggcgtggcaagggcgggaagggtctgggcaaaggcggcgccaagcgtcaccgcaaggttctccgcgacaacatccagggcatcacgaagccggcgatccggaggctggcgaggaggggcggcgtgaagcgcatctcggggctcatctacgaggagacccgcggcgtgctcaagatcttcctcgagaacgtcatccgcgacgccgtaacctacacggagcacgcccgccgcaagaccgtcaccgccatggacgtcgtctacgccctcaagcgccagggtcgcaccctctacggattcggcggctgagaggcgctaccgccgctggtggccgtggcaaaagtcttgggtcgcggtcaagaaatcgagagtattctggatgacgtgcttagtttcgtagtattattatcactagtgcttattgttagcggttgttgggttcgaccactctaagccactgtcaaacagtaatatatgagtaccgcatttccgtgtttcgaacttctaatatatcataatcttatggacatcgggttaattcgcttaattttgtgctggctatctgaatatttgttgctcccagtatttagcatttttttcttattagattgataaatttagaaacctaatttgtcgaggtctttgcaacagcttcttctgtccgtgacgcttcagccacgcttaggagtatttggcttcagcttgttgctagacagcaggagctaggagtaaaccattccatctctgtacctatctttacctcctagccatcatttgacttttctgactgtctacagtgctctacaacatcaaaaccattactataactatccacaagtggcaaatgattcttctgttcaatgaggagttgatcaaggtccagatgctgcttaccagcttcttacatcgtttctggattcaggatcttatgttggtccaacaagtaacacatattatactgttggtgctcatcagaccatgccaggatatgcaacaagcaattactattatcatcaaaacaatgcctggtaatggaagttctgtgaataatcatgaccagttgtatcagagtttcaccccaaatagtaatgtagctcagagttgtcgttcacatcctacaagctctgcccactaccagcagcagtacagccaatgagctaactattatgatcagtctgcacagagttcaggtggccttgcagttactagtagtggtaactggtagctctgctcctgatacaagaactattaccattggttccaattatgcacacaccagcaaccagccacctccaccaggcactacattatggaagagagatgctggtaacactgctgcaccttcgtcactggcctgtctgggacactctaaggggtcgtttggcagatctcccacagctccgctcatagcgagaattactcccgcagagccaaatggtaaaaatctgaactgctccatggcgagaatttattttgtactataaagtgggagcaaaagaacatgcttcccaccgcttccaacctgctctctactctctaacctcttaggaatcacttcacagcctatttgccaaacagtttttgtcaaatagattcacttctgctagaaaatcaattagaatcactctattagagaatcggctctcggagctagagaatcatggagcggagctctgccaaacgagtcctaatactcttatgtaaccagattcatgctggaatttattatacttgactacttgtgaaactcttgtgttccagacatccccttcgttttggctaataataagattccagaatgagattctacaaatgaggtatgaaccaaacagggccttagtgaggttgcagtatacgcagacaaacaaaacgaagcatacagaacaatcccccaaccctaaggacaagctgcgtggaggttcaggagcctttgcatgcaaaaggcgacaagtaaactattcttgactctataatggtttgacacatacgaatctaacacagaaggtgacagaacgaggccccacatgacaaatggcttctacattttgtattggattttgtgccataactcacaacctcaacagaaattgataacgtgatctatattggattttgtgcattatccaacttctcaaaaaccatagggaaccaaacatcacgtaacctggattttgccacaccaaggcaaacatctatggcattctatttgcagcatatatattgtggccatgggcacgcagccactgcttcaactccagtaccgccatctccatcgactggggcaactgcaaccgtccctggtttactattgtgtacctctgctgtggggaagaaggctcatagccatgggggcggacccactggcccaactctagtgctgttgtctccgtagattggggcaactacaggctacagccatccctagcagctagcttccagtcgggtactgctggcatgtccggttggcggccaggttcctccttctacagcctcggtgagattgattcttcagtccatgctaactttcccttaaccatatatctacatttatattttttcccttcagaatgattgtctgttttgtgccatgatagtgcaatggtacttgtagtcatgtacatgctatttttttgaggaataggtgatgtactgaagatttttgtgatttatctcagtatcaaatttctaaactttagcaaggtatgaaattaaccgagtcaatgatatttcaggttgtattctcttggtgggtttctaagttatcaacggtttctaagttatctacaaccaccattttctccattgagtcaagatcctgaaccatcatcagaggatttctattttgttggtagcagtcagaactttggttctttctccccgacaccagcaccctttagtaaagggactccaccagcgatttcagcagcaggatctaagaaaaatgacattgatgacgacaatgacgtcgaggtcgacaggagtgccacccacgatgaagttagattggcaagtgcttggttgaatcattctaccgacccaattgatggctatgggctatggcaagaagaatgataaattctaggatcaagtttttttttgaaagggagggcaaaagatttgccgctccaatatattagaaaggagatacacttacaagacacgcactcgaagacaaagggaggagaaaagaaagaagaaggacaaaaacaaccgtctactgagcctaatcacaactccgaaactacctggcacaaactaactcaagaaagcacccactagctctttcactaaagaagcgatctgctttgcatttttctgctggttcctgaagatcctgttgtttctctctaaccataggctccaccaaaaatagatcagaagaccatcgaaatttcttctagattgcctattacagagacctcttatatttctccaccaaccatacaacgacacggaagcctggattcctctcaggaaggaacagttccccaatgtcaatattttatcccacacctctctactgaaaggataatctttgcataaataagataccgtctccaacgctgagttacaaagacagcaaactaggttgcactgtcaatgtttcttctgcaggttgttagcagtcagcaccactttattatgtaaaagagtccacgcaaaaaaaatgttaattctaggatcaagttacagatgacttcaacagcaccaggccagttgaccacaaaagaaatgttaatggactgaaaatgcattggcaagctcctcaaggcgacaataagccatttgaacaactgctggtcttgtgtccttcaaaagctggtatagtgttcttaaaaagcaaggaagttggatctcagatgaccaaatgatggatgaggcactaaagttaaatagagtagatgtgaatcaagtaaggtgggcaaaaaattagtccaaaattactagcaaaaataaaaaatatctagatttttttaaaaatagtaaaacaaatgtatagttaggttttgtcaaggattatgagaatgacataaatccatctctcaaatctaaactccttcaaaggttcaaaggacaattctctcttgctctctctctctctctctctctctctctcttttgcaatttcttacctccaaataagttcaataatgacatgaacagctatagtcatgcatgaacaactgcacgcaacgaagacgggtgtttgtagggaggttatttttggacccgttttgactacgagtactacatttgttaatgaatttcagccacg

SEQ ID NO: 78197 - DNA, 3689 bp, Zea Mays
cgaagtgaagaagttttgataaaaaagaactcaaagtttagtctttgtgacgcactagaccagtctaatgagacacctgacctattcgagcgaccatgtcggggcgtggcaagggcgggaagggtctgggcaaaggcggcgccaagcgtcaccgcaaggttctccgcgacaacatccagggcatcacgaagccggcgatccggaggctggcgaggaggggcggcgtgaagcgcatctcggggctcatctacgaggagacccgcggcgtgctcaagatcttcctcgagaacgtcatccgcgacgccgtaacctacacggagcacgcccgccgcaagaccgtcaccgccatggacgtcgtctacgccctcaagcgccagggtcgcaccctctacggattcggcggctgagaggcgctaccgccgctggtggccgtggcaaaagtcttgggtcgcggtcaagaaatcgagagtattctggatgacgtgcttagtttcgtagtattattatcactagtgcttattgttagcggttgttgggttcgaccactctaagccactgtcaaacagtaatatatgagtaccgcatttccgtgtttcgaacttctaatatatcataatcttatggacatcgggttaattcgcttaattttgtgctggctatctgaatatttgttgctcccagtatttagcatttttttcttattagattgataaatttagaaacctaatttgtcgaggtctttgcaacagcttcttctgtccgtgacgcttcagccacgcttaggagtatttggcttcagcttgttgctagacagcaggagctaggagtaaaccattccatctctgtacctatctttacctcctagccatcatttgacttttctgactgtctacagtgctctacaacatcaaaaccattactataactatccacaagtggcaaatgattcttctgttcaatgaggagttgatcaaggtccagatgctgcttaccagcttcttacatcgtttctggattcaggatcttatgttggtccaacaagtaacacatattatactgttggtgctcatcagaccatgccaggatatgcaacaagcaattactattatcatcaaaacaatgcctggtaatggaagttctgtgaataatcatgaccagttgtatcagagtttcaccccaaatagtaatgtagctcagagttgtcgttcacatcctacaagctctgcccactaccagcagcagtacagccaatgagctaactattatgatcagtctgcacagagttcaggtggccttgcagttactagtagtggtaactggtagctctgctcctgatacaagaactattaccattggttccaattatgcacacaccagcaaccagccacctccaccaggcactacattatggaagagagatgctggtaacactgctgcaccttcgtcactggcctgtctgggacactctaaggggtcgtttggcagatctcccacagctccgctcatagcgagaattactcccgcagagccaaatgacatccccttcgttttggctaataataagattccagaatgagattctacaaatgaggtatgaaccaaacagggccttagtgaggttgcagtatacgcagacaaacaaaacgaagcatacagaacaatcccccaaccctaaggacaagctgcgtggaggttcaggagcctttgcatgcaaaaggcgacaagtaaactattcttgactctataatggtttgacacatacgaatctaacacagaaggtgacagaacgaggccccacatgacaaatggcttctacattttgtattggattttgtgccataactcacaacctcaacagaaattgataacgtgatctatattggattttgtgcattatccaacttctcaaaaaccatagggaaccaaacatcacgtaacctggattttgccacaccaaggcaaacatctatggcattctatttgcagcatatatattgtggccatgggcacgcagccactgcttcaactccagtaccgccatctccatcgactggggcaactgcaaccgtccctggtttactattgtgtacctctgctgtggggaagaaggctcatagccatgggggcggacccactggcccaactctagtgctgttgtctccgtagattggggcaactacaggctacagccatccctagcagctagcttccagtcgggtactgctggcatgtccggttggcggccaggttcctccttctacagcctcgtcagaactttggttctttctccccgacaccagcaccctttagtaaagggactccaccagcgatttcagcagcaggatctaagaaaaatgacattgatgacgacaatgacgtcgaggtcgacaggagtgccacccacgatgaagttagattggcaagtgcttggttgaatcattctaccgacccaattgatggctatgggctatggcaagaagaatgataaattctaggatcaagtttttttttgaaagggagggcaaaagatttgccgctccaatatattagaaaggagatacacttacaagacacgcactcgaagacaaagggaggagaaaagaaagaagaaggacaaaaacaaccgtctactgagcctaatcacaactccgaaactacctggcacaaactaactcaagaaagcacccactagctctttcactaaagaagcgatctgctttgcatttttctgctggttcctgaagatcctgttgtttctctctaaccataggctccaccaaaaatagatcagaagaccatcgaaatttcttctagattgcctattacagagacctcttatatttctccaccaaccatacaacgacacggaagcctggattcctctcaggaaggaacagttccccaatgtcaatattttatcccacacctctctactgaaaggataatctttgcataaataagataccgtctccaacgctgagttacaaagacagcaaactaggttgcactgtcaatgtttcttctgcaggttgttagcagtcagcaccactttattatgtaaaagagtccacgcaaaaaaaatgttaattctaggatcaagttacagatgacttcaacagcaccaggccagttgaccacaaaagaaatgttaatggactgaaaatgcattggcaagctcctcaaggcgacaataagccatttgaacaactgctggtcttgtgtccttcaaaagctggtatagtgttcttaaaaagcaaggaagttggatctcagatgaccaaatgatggatgaggcactaaagttaaatagagtagatgtgaatcaagtaaggtgggcaaaaaattagtccaaaattactagcaaaaataaaaaatatctagatttttttaaaaatagtaaaacaaatgtatagttaggttttgtcaaggattatgagaatgacataaatccatctctcaaatctaaactccttcaaaggttcaaaggacaattctctcttgctctctctctctctctctctctctctctcttttgcaatttcttacctccaaataagttcaataatgacatgaacagctatagtcatgcatgaacaactgcacgcaacgaagacgggtgtttgtagggaggttatttttggacccgttttgactacgagtactacatttgttaatgaatttcagccacg

SEQ ID NO: 78198 - DNA, 1090 bp, Zea Mays
caaaaggaacttcagagatattgttgttacttctggctttgatcgctgttccatggatgctcttcccaaaaccttttatcttgaagaaacttcataaggagagatttcaaggtcacacttatcgtttcctagggacatctgaaatggatccagattctgaacctgattccgcccgagcacgtcatgatgatttcaatttcagcgaagtttttgtgcatcaaatgatacattccattgagtttgtacttggtgcagtttcaaatactgcatcttatcttcgactttgggctctgagcttggcgcattcagagctgtcaacagttttctatgagaagttgctgttacttgcctgggggtatgacagtcttatcgtgaagtttgtggggcttatagttttttcttttgctactgccttcatattgctcatgatggaaacactgagtgccttcctgcatgcactgcgtctgcactgggttgagttcatgaacaagttctatcatggggatggttacaagttcaagccattttcatttgctctgctagcagatgacgaagattgatgcatgtgtagttcagcacgtaaacagattggttcatttcttacaaagttttggagcacaggtgtcaaatttcatgggcaagatgggcttttcctgatacacagcattttgtcagaccgctagactttttcctagcgcatgagtgcagttgtcgttgagattgccagccttgtggaaggagattttgtaagtttacagcaatattgtagagggcaagttcatcgtacagttcctccaacggagatgcagattatagttgctaacaaaaaaaaggatagaaatgtagacttgtccgcgtacttttgacttcaaatttatcagcatgactgccgcttaccacttatgaatgaaaaatatgtatttggccattcatacaaccgtcgctggaagaaagacatgcacgctattgtactgttttgttttacaaatcaaataaatagctctaatcgtgctaattctttttaaatgctgctctattgtctgatgagactaatattcttgttatcacagaccttttgtgcggtccgcgt

SEQ ID NO: 78199 - DNA, 3005 bp, Zea Mays
ccaaacccggggggccgagcgctcaactgaaacctcgaccggttcccctcgcccaccaggaatggtggcccacgggccagagactgcgcgcctccctttccgagccgcttcctccctccgtcactcctcatgggtcatggcattggcagttgcgcactaggcagaacagagtggaaaatagaattaggcctaccctccgagagtcagatctgaggcgcgccacccgcgaccaccgcaccgcgtcgtcctcctcctcgctctagcgacgccttctggaagctttgggaggccgcgctacgctacgcgacgctacgctccggcgggcggtcgggatggggctgttcgaccggctgcccccgatggaccacatgcggtccgagaagatgtgcttcgtgcagctcatcatgcccgccgagagctcgcgcctcgccgtcacctacctcggcgagctcggcctactccagttcaaggacttgaatgaggataagagtcctttccagcgtatatttgtcaaccaggtaaagcgatgtgcagaaatgtcacgcaaactaaaatttttcagtgatcagatcaacagggcaggtttaagatcttctgttcgacctgcacttgaaccggatattgatctggaggagctagaggcaagattgggtgaacatgagcatgaactgcttgagatgaatacaaatagtgacaagctaaaacagacatacaatgagcttcttgaattcaagctggtcttgtcaaaggcaggtcacatccttgcttcttctcacagccatgcagcttcagctgagcatgagctagatgaaaacatatatgacaatggaatacatgagggaaatgcctatctgctcgaacaggtagagaaagctgtttttgtagttttcttttctggggaacaagcaaaagcaaagatactaaagatttgtgattcatttggagcaagttgctaccctgttcctgaggagatggtcaagcagagacaaattttcaatgaggtatcggctcgtctctctgacctggaagttactttggatgctggaatccagcacagaaacaaagctcttgagtcaataggatcacaattgtggaggtggacaatcatggttaaaaaggagaaagctgtatatgacacgctcaacatgttgaactttgatgtgacaaagaagtgccttgttggagaaggatggtgtcctatatttgctaaatctcagatcaaggattgtttgcagcgttccacaattcacagcaattcacaagttggtacaatatttcatgagatggacactattgaatcaccacctacatatttccgaactgataagtttaccaatgctttccaggaaattgttgatgcatatggcgttgcccgatatcaagaagctaatccggctgtatattctgttgtgacgttcccatttctttttgctgttatgtttggagattggggtcatggaatatgtctattactaggagctttggttcttatacttcgcgagaagagattttcctctcagaagcttggtagctttatggagttggcattcggcggacgatatgttattcttctgatggcaatattctcaatatactgtggccttatatacaatgagttcttctcagttccattccatatatttggcaaatctgcatatgaatgccgggacaaaagctgcagcgatgcacatacttttggtctcatcaaagtccgtgaaccctatccttttggggtggacccaagctggcgtggaagtcggtctgagctaccctttctaaattcattaaagatgaagatgtctatactaatgggtgttgcccagatgaacctggggattgtattaagttattttgatgcacgatatcatggaaatgctcttgacataagatcttggagaaaatcaactgttctggggccaaaaggaacttcagatattgttgttacttctggctttgatcgctgttccatggatgctcttcccaaaaccttttatcttgaagaaacttcataaggagagatttcaaggtcacacttatcgtttcctagggacatctgaaatggatccagattctgaacctgattccgcccgagcacgtcatgatgatttcaatttcagcgaagtttttgtgcatcaaatgatacattccattgagtttgtacttggtgcagtttcaaatactgcatcttatcttcgactttgggctctgagcttggcgcattcagagctgtcaacagttttctatgagaagttgctgttacttgcctgggggtatgacagtcttatcgtgaagtttgtggggcttatagttttttcttttgctactgccttcatattgctcatgatggaaacactgagtgccttcctgcatgcactgcgtctgcactgggttgagttcatgaacaagttctatcatggggatggttacaagttcaagccattttcatttgctctgctagcagatgacgaagattgatgcatgtgtagttcagcacgtaaacagattggttcatttcttacaaagttttggagcacaggtgtcaaatttcatgggcaagatgggcttttcctgatacacagcattttgtcagaccgctagactttttcctagcgcatgagtgcagttgtcgttgagattgccagccttgtggaaggagattttgtaagtttacagcaatattgtagagggcaagttcatcgtacagttcctccaacggagatgcagattatagttgctaacaaaaaaaaggatagaaatgtagacttgtccgcgtacttttgacttcaaatttatcagcatgactgccgcttaccacttatgaatgaaaaatatgtatttggccattcatacaaccgtcgctggaagaaagacatgcacgctattgtactgttttgttttacaaatcaaataaatagctctaatcgtgctaattctttttaaatgctgctctattgtctgatgagactaatattcttgttatcacagaccttttgtgcggtccgcgt

SEQ ID NO: 78200 - DNA, 3349 bp, Zea Mays
aggcccagtccgagaaacgcgggaccgacaagttttttttttgttgttgattgcgggaccgacaaggttacttgcgtaaaacacaccaaacccggggggccgagcgctcaactgaaacctcgaccggttcccctcgcccaccaggaatggtggcccacgggccagagactgcgcgcctccctttccgagccgcttcctccctccgtcactcctcatgggtcatggcattggcagttgcgcactaggcagaacagagtggaaaatagaattaggcctaccctccgagagtcagatctgaggcgcgccacccgcgaccaccgcaccgcgtcgtcctcctcctcgctctagcgacgccttctggaagctttgggaggccgcgctacgctacgcgacgctacgctccggcgggcggtcgggatggggctgttcgaccggctgcccccgatggaccacatgcggtccgagaagatgtgcttcgtgcagctcatcatgcccgccgagagctcgcgcctcgccgtcacctacctcggcgagctcggcctactccagttcaaggacttgaatgaggataagagtcctttccagcgtatatttgtcaaccaggtaaagcgatgtgcagaaatgtcacgcaaactaaaatttttcagtgatcagatcaacagggcaggtttaagatcttctgttcgacctgcacttgaaccggatattgatctggaggagctagaggcaagattgggtgaacatgagcatgaactgcttgagatgaatacaaatagtgacaagctaaaacagacatacaatgagcttcttgaattcaagctggtcttgtcaaaggcaggtcacatccttgcttcttctcacagccatgcagcttcagctgagcatgagctagatgaaaacatatatgacaatggaatacatgagggaaatgcctatctgctcgaacagggagtgcatcaaggagcacatggacattctggagtgagatttgttagtggaataatattaaagtcgaaggcacttgcttttgagcggatgctttttcgagctacaagaggaaacatgttattcaatcaggcatctgcaggggaacctgtaactgatcccatatctggtgaagaggtagagaaagctgtttttgtagttttcttttctggggaacaagcaaaagcaaagatactaaagatttgtgattcatttggagcaagttgctaccctgttcctgaggagatggtcaagcagagacaaattttcaatgaggtatcggctcgtctctctgacctggaagttactttggatgctggaatccagcacagaaacaaagctcttgagtcaataggatcacaattgtggaggtggacaatcatggttaaaaaggagaaagctgtatatgacacgctcaacatgttgaactttgatgtgacaaagaagtgccttgttggagaaggatggtgtcctatatttgctaaatctcagatcaaggattgtttgcagcgttccacaattcacagcaattcacaagttggtacaatatttcatgagatggacactattgaatcaccacctacatatttccgaactgataagtttaccaatgctttccaggaaattgttgatgcatatggcgttgcccgatatcaagaagctaatccggctgtatattctgttgtgacgttcccatttctttttgctgttatgtttggagattggggtcatggaatatgtctattactaggagctttggttcttatacttcgcgagaagagattttcctctcagaagcttggtagctttatggagttggcattcggcggacgatatgttattcttctgatggcaatattctcaatatactgtggccttatatacaatgagttcttctcagttccattccatatatttggcaaatctgcatatgaatgccgggacaaaagctgcagcgatgcacatacttttggtctcatcaaagtccgtgaaccctatccttttggggtggacccaagctggcgtggaagtcggtctgagctaccctttctaaattcattaaagatgaagatgtctatactaatgggtgttgcccagatgaacctggggattgtattaagttattttgatgcacgatatcatggaaatgctcttgacataaggtgttgtatattcctttgtatcttctcttccgatacagccaaaatagagagaaattgcagtgctttaactgtgcacattcttcagatcttggagaaaatcaactgttctggggccaaaaggaacttcagatattgttgttacttctggctttgatcgctgttccatggatgctcttcccaaaaccttttatcttgaagaaacttcataaggagagatttcaaggtcacacttatcgtttcctagggacatctgaaatggatccagattctgaacctgattccgcccgagcacgtcatgatgatttcaatttcagcgaagtttttgtgcatcaaatgatacattccattgagtttgtacttggtgcagtttcaaatactgcatcttatcttcgactttgggctctgagcttggcgcattcagagctgtcaacagttttctatgagaagttgctgttacttgcctgggggtatgacagtcttatcgtgaagtttgtggggcttatagttttttcttttgctactgccttcatattgctcatgatggaaacactgagtgccttcctgcatgcactgcgtctgcactgggttgagttcatgaacaagttctatcatggggatggttacaagttcaagccattttcatttgctctgctagcagatgacgaagattgatgcatgtgtagttcagcacgtaaacagattggttcatttcttacaaagttttggagcacaggtgtcaaatttcatgggcaagatgggcttttcctgatacacagcattttgtcagaccgctagactttttcctagcgcatgagtgcagttgtcgttgagattgccagccttgtggaaggagattttgtaagtttacagcaatattgtagagggcaagttcatcgtacagttcctccaacggagatgcagattatagttgctaacaaaaaaaaggatagaaatgtagacttgtccgcgtacttttgacttcaaatttatcagcatgactgccgcttaccacttatgaatgaaaaatatgtatttggccattcatacaaccgtcgctggaagaaagacatgcacgctattgtactgttttgttttacaaatcaaataaatagctctaatcgtgctaattctttttaaatgctgctctattgtctgatgagactaatattcttgttatcacagaccttttgtgcggtccgcgt

SEQ ID NO: 78201 - DNA, 1577 bp, Zea Mays
atattcaccgtatccatctgtgttgaccttaagccagtgtaagcaaagaattcccactgtctacttttgacaagctgcgcggacaaattactatagggtgaagttgaatgaggataagagtcctttccagcgtatatttgtcaaccaggtaaagcgatgtgcagaaatgtcacgcaaactaaaatttttcagtgatcagatcaacagggcaggtttaagatcttctgttcgacctgcacttgaaccggatattgatctggaggagctagaggcaagattgggtgaacatgagcatgaactgcttgagatgaatacaaatagtgacaagctaaaacagacatacaatgagcttcttgaattcaagctggtcttgtcaaaggtcacatccttgcttcttctcacagccatgcagcttcagctgagcatgagctagatgaaaacatatatgacaatggaatacatgagggaaatgcctatctgctcgaacagggagtgcatcaaggagcacatggacattctggagtgagatttgttagtggaataatattaaagtcgaaggcacttgcttttgagcggatgctttttcgagctacaagaggaaacatgttattcaatcaggcatctgcaggggaacctgtaactgatcccatatctggtgaagaggtagagaaagctgtttttgtagttttcttttctggggaacaagcaaaagcaaagatactaaagatttgtgattcatttggagcaagttgctaccctgttcctgaggagatggtcaagcagagacaaattttcaatgaggtatcggctcgtctctctgacctggaagttactttggatgctggaatccagcacagaaacaaagctcttgagtcaataggatcacaattgtggaggtggacaatcatggttaaaaaggagaaagctgtatatgacacgctcaacatgttgaactttgatgtgacaaagaagtgccttgttggagaaggatggtgtcctatatttgctaaatctcagatcaaggattgtttgcagcgttccacaattcacagcaattcacaagttggtacaatatttcatgagatggacactattgaatcaccacctacatatttccgaactgataagtttaccaatgctttccaggaaattgttgatgcatatggcgttgcccgatatcaagaagctaatccggctgtatattctgttgtgacgttcccatttctttttgctgttatgtttggagattggggtcatggaatatgtctattactaggagctttggttcttatacttcgcgagaagagattttcctctcagaagcttggtagctttatggagttggcattcggcggacgatatgttattcttctgatggcaatattctcaatatactgtggccttatatacaatgagttcttctcagttccattccatatatttggcaaatctgcatatgaatgccgggacaaaagctgcagcgatgcacatacttttggtctcatcaaagtccgtgaaccctatccttttggggtggacccaagctggcgtggaagtcggtctgagctaccctttct

SEQ ID NO: 78202 - DNA, 1780 bp, Zea Mays
aaatagaattaggcctaccctccgagagtcagatctgaggcgcgccacccgcgaccaccgcaccgcgtcgtcctcctcctcgctctagcgacgccttctggaagctttgggaggccgcgctacgctacgcgacgctacgctccggcgggcggtcgggatggggctgttcgaccggctgcccccgatggaccacatgcggtccgagaagatgtgcttcgtgcagctcatcatgcccgccgagagctcgcgcctcgccgtcacctacctcggcgagctcggcctactccagttcaaggacttgaatgaggataagagtcctttccagcgtatatttgtcaaccaggtaaagcgatgtgcagaaatgtcacgcaaactaaaatttttcagtgatcagatcaacagggcaggtttaagatcttctgttcgacctgcacttgaaccggatattgatctggaggagctagaggcaagattgggtgaacatgagcatgaactgcttgagatgaatacaaatagtgacaagctaaaacagacatacaatgagcttcttgaattcaagctggtcttgtcaaaggtcacatccttgcttcttctcacagccatgcagcttcagctgagcatgagctagatgaaaacatatatgacaatggaatacatgagggaaatgcctatctgctcgaacagggagtgcatcaaggagcacatggacattctggagtgagatttgttagtggaataatattaaagtcgaaggcacttgcttttgagcggatgctttttcgagctacaagaggaaacatgttattcaatcaggcatctgcaggggaacctgtaactgatcccatatctggtgaagaggtagagaaagctgtttttgtagttttcttttctggggaacaagcaaaagcaaagatactaaagatttgtgattcatttggagcaagttgctaccctgttcctgaggagatggtcaagcagagacaaattttcaatgaggtatcggctcgtctctctgacctggaagttactttggatgctggaatccagcacagaaacaaagctcttgagtcaataggatcacaattgtggaggtggacaatcatggtaataaagttaaaaaggagaaagctgtatatgacacgctcaacatgttgaactttgatgtgacaaagaagtgccttgttggagaaggatggtgtcctatatttgctaaatctcagatcaaggattgtttgcagcgttccacaattcacagcaattcacaagttggtacaatatttcatgagatggacactattgaatcaccacctacatatttccgaactgataagtttaccaatgctttccaggaaattgttgatgcatatggcgttgcccgatatcaagaagctaatccggctgtatattctgttgtgacgttcccatttctttttgctgttatgtttggagattggggtcatggaatatgtctattactaggagctttggttcttatacttcgcgagaagagattttcctctcagaagcttggtagctttatggagttggcattcggcggacgatatgttattcttctgatggcaatattctcaatatactgtggccttatatacaatgagttcttctcagttccattccatatatttggcaaatctgcatatgaatgccgggacaaaagctgcagcgatgcacatacttttggtctcatcaaagtccgtgaaccctatccttttggggtggacccaagctggcgtggaagtcggtctgagctaccctttct

SEQ ID NO: 78203 - DNA, 1789 bp, Zea Mays
ggaaaatagaattaggcctaccctccgagagtcagatctgaggcgcgccacccgcgaccaccgcaccgcgtcgtcctcctcctcgctctagcgacgccttctggaagctttgggaggccgcgctacgctacgcgacgctacgctccggcgggcggtcgggatggggctgttcgaccggctgcccccgatggaccacatgcggtccgagaagatgtgcttcgtgcagctcatcatgcccgccgagagctcgcgcctcgccgtcacctacctcggcgagctcggcctactccagttcaaggacttgaatgaggataagagtcctttccagcgtatatttgtcaaccaggtaaagcgatgtgcagaaatgtcacgcaaactaaaatttttcagtgatcagatcaacagggcaggtttaagatcttctgttcgacctgcacttgaaccggatattgatctggaggagctagaggcaagattgggtgaacatgagcatgaactgcttgagatgaatacaaatagtgacaagctaaaacagacatacaatgagcttcttgaattcaagctggtcttgtcaaaggtcacatccttgcttcttctcacagccatgcagcttcagctgagcatgagctagatgaaaacatatatgacaatggaatacatgagggaaatgcctatctgctcgaacagggagtgcatcaaggagcacatggacattctggagtgagatttgttagtggaataatattaaagtcgaaggcacttgcttttgagcggatgctttttcgagctacaagaggaaacatgttattcaatcaggcatctgcaggggaacctgtaactgatcccatatctggtgaagaggtctgatcatcatggtagagaaagctgtttttgtagttttcttttctggggaacaagcaaaagcaaagatactaaagatttgtgattcatttggagcaagttgctaccctgttcctgaggagatggtcaagcagagacaaattttcaatgaggtatcggctcgtctctctgacctggaagttactttggatgctggaatccagcacagaaacaaagctcttgagtcaataggatcacaattgtggaggtggacaatcatggttaaaaaggagaaagctgtatatgacacgctcaacatgttgaactttgatgtgacaaagaagtgccttgttggagaaggatggtgtcctatatttgctaaatctcagatcaaggattgtttgcagcgttccacaattcacagcaattcacaagttggtacaatatttcatgagatggacactattgaatcaccacctacatatttccgaactgataagtttaccaatgctttccaggaaattgttgatgcatatggcgttgcccgatatcaagaagctaatccggctgtatattctgttgtgacgttcccatttctttttgctgttatgtttggagattggggtcatggaatatgtctattactaggagctttggttcttatacttcgcgagaagagattttcctctcagaagcttggtagctttatggagttggcattcggcggacgatatgttattcttctgatggcaatattctcaatatactgtggccttatatacaatgagttcttctcagttccattccatatatttggcaaatctgcatatgaatgccgggacaaaagctgcagcgatgcacatacttttggtctcatcaaagtccgtgaaccctatccttttggggtggacccaagctggcgtggaagtcggtctgagctaccctttct

SEQ ID NO: 78204 - DNA, 1750 bp, Zea Mays
ggaaaatagaattaggcctaccctccgagagtcagatctgaggcgcgccacccgcgaccaccgcaccgcgtcgtcctcctcctcgctctagcgacgccttctggaagctttgggaggccgcgctacgctacgcgacgctacgctccggcgggcggtcgggatggggctgttcgaccggctgcccccgatggaccacatgcggtccgagaagatgtgcttcgtgcagctcatcatgcccgccgagagctcgcgcctcgccgtcacctacctcggcgagctcggcctactccagttcaaggacttgaatgaggataagagtcctttccagcgtatatttgtcaaccaggtaaagcgatgtgcagaaatgtcacgcaaactaaaatttttcagtgatcagatcaacagggcaggtttaagatcttctgttcgacctgcacttgaaccggatattgatctggaggagctagaggcaagattgggtgaacatgagcatgaactgcttgagatgaatacaaatagtgacaagctaaaacagacatacaatgagcttcttgaattcaagctggtcttgtcaaagccatgcagcttcagctgagcatgagctagatgaaaacatatatgacaatggaatacatgagggaaatgcctatctgctcgaacagggagtgcatcaaggagcacatggacattctggagtgagatttgttagtggaataatattaaagtcgaaggcacttgcttttgagcggatgctttttcgagctacaagaggaaacatgttattcaatcaggcatctgcaggggaacctgtaactgatcccatatctggtgaagaggtagagaaagctgtttttgtagttttcttttctggggaacaagcaaaagcaaagatactaaagatttgtgattcatttggagcaagttgctaccctgttcctgaggagatggtcaagcagagacaaattttcaatgaggtatcggctcgtctctctgacctggaagttactttggatgctggaatccagcacagaaacaaagctcttgagtcaataggatcacaattgtggaggtggacaatcatggttaaaaaggagaaagctgtatatgacacgctcaacatgttgaactttgatgtgacaaagaagtgccttgttggagaaggatggtgtcctatatttgctaaatctcagatcaaggattgtttgcagcgttccacaattcacagcaattcacaagttggtacaatatttcatgagatggacactattgaatcaccacctacatatttccgaactgataagtttaccaatgctttccaggaaattgttgatgcatatggcgttgcccgatatcaagaagctaatccggctgtatattctgttgtgacgttcccatttctttttgctgttatgtttggagattggggtcatggaatatgtctattactaggagctttggttcttatacttcgcgagaagagattttcctctcagaagcttggtagctttatggagttggcattcggcggacgatatgttattcttctgatggcaatattctcaatatactgtggccttatatacaatgagttcttctcagttccattccatatatttggcaaatctgcatatgaatgccgggacaaaagctgcagcgatgcacatacttttggtctcatcaaagtccgtgaaccctatccttttggggtggacccaagctggcgtggaagtcggtctgagctaccctttct

SEQ ID NO: 78205 - DNA, 1772 bp, Zea Mays
gtggaaaatagaattaggcctaccctccgagagtcagatctgaggcgcgccacccgcgaccaccgcaccgcgtcgtcctcctcctcgctctagcgacgccttctggaagctttgggaggccgcgctacgctacgcgacgctacgctccggcgggcggtcgggatggggctgttcgaccggctgcccccgatggaccacatgcggtccgagaagatgtgcttcgtgcagctcatcatgcccgccgagagctcgcgcctcgccgtcacctacctcggcgagctcggcctactccagttcaaggacttgaatgaggataagagtcctttccagcgtatatttgtcaaccaggtaaagcgatgtgcagaaatgtcacgcaaactaaaatttttcagtgatcagatcaacagggcaggtttaagatcttctgttcgacctgcacttgaaccggatattgatctggaggagctagagattgggtgaacatgagcatgaactgcttgagatgaatacaaatagtgacaagctaaaacagacatacaatgagcttcttgaattcaagctggtcttgtcaaaggtcacatccttgcttcttctcacagccatgcagcttcagctgagcatgagctagatgaaaacatatatgacaatggaatacatgagggaaatgcctatctgctcgaacagggagtgcatcaaggagcacatggacattctggagtgagatttgttagtggaataatattaaagtcgaaggcacttgcttttgagcggatgctttttcgagctacaagaggaaacatgttattcaatcaggcatctgcaggggaacctgtaactgatcccatatctggtgaagaggtagagaaagctgtttttgtagttttcttttctggggaacaagcaaaagcaaagatactaaagatttgtgattcatttggagcaagttgctaccctgttcctgaggagatggtcaagcagagacaaattttcaatgaggtatcggctcgtctctctgacctggaagttactttggatgctggaatccagcacagaaacaaagctcttgagtcaataggatcacaattgtggaggtggacaatcatggttaaaaaggagaaagctgtatatgacacgctcaacatgttgaactttgatgtgacaaagaagtgccttgttggagaaggatggtgtcctatatttgctaaatctcagatcaaggattgtttgcagcgttccacaattcacagcaattcacaagttggtacaatatttcatgagatggacactattgaatcaccacctacatatttccgaactgataagtttaccaatgctttccaggaaattgttgatgcatatggcgttgcccgatatcaagaagctaatccggctgtatattctgttgtgacgttcccatttctttttgctgttatgtttggagattggggtcatggaatatgtctattactaggagctttggttcttatacttcgcgagaagagattttcctctcagaagcttggtagctttatggagttggcattcggcggacgatatgttattcttctgatggcaatattctcaatatactgtggccttatatacaatgagttcttctcagttccattccatatatttggcaaatctgcatatgaatgccgggacaaaagctgcagcgatgcacatacttttggtctcatcaaagtccgtgaaccctatccttttggggtggacccaagctggcgtggaagtcggtctgagctaccctttct

SEQ ID NO: 78206 - DNA, 1629 bp, Zea Mays
ggcagttgcgcactaggcagaacagagtggaaaatagaattaggcctaccctccgagagtcagatctgaggcgcgccacccgcgaccaccgcaccgcgtcgtcctcctcctcgctctagcgacgccttctggaagctttgggaggccgcgctacgctacgcgacgctacgctccggcgggcggtcgggatggggctgttcgaccggctgcccccgatggaccacatgcggtccgagaagatgtgcttcgtgcagctcatcatgcccgccgagagctcgcgcctcgccgtcacctacctcggcgagctcggcctactccagttcaaggacttgaatgaggataagagtcctttccagcgtatatttgtcaaccaggtaaagcgatgtgcagaaatgtcacgcaaactaaaatttttcagtgatcagatcaacagggcaggtttaagatcttctgttcgacctgcacttgaaccggatattgatctggaggagctagaggcaagattgggtgaacatgagcatgaactgcttgagatgaatacaaatagtgacaagctaaaacagacatacaatgagcttcttgaattcaagctggtcttgtcaaaggtcacatccttgcttcttctcacagccatgcagcttcagctgagcatgagctagatgaaaacatatatgacaatggaatacatgagggaaatgcctatctgctcgaacaggtagagaaagctgtttttgtagttttcttttctggggaacaagcaaaagcaaagatactaaagatttgtgattcatttggagcaagttgctaccctgttcctgaggagatggtcaagcagagacaaattttcaatgaggtatcggctcgtctctctgacctggaagttactttggatgctggaatccagcacagaaacaaagctcttgagtcaataggatcacaattgtggaggtggacaatcatggttaaaaaggagaaagctgtatatgacacgctcaacatgttgaactttgatgtgacaaagaagtgccttgttggagaaggatggtgtcctatatttgctaaatctcagatcaaggattgtttgcagcgttccacaattcacagcaattcacaagttggtacaatatttcatgagatggacactattgaatcaccacctacatatttccgaactgataagtttaccaatgctttccaggaaattgttgatgcatatggcgttgcccgatatcaagaagctaatccggctgtatattctgttgtgacgttcccatttctttttgctgttatgtttggagattggggtcatggaatatgtctattactaggagctttggttcttatacttcgcgagaagagattttcctctcagaagcttggtagctttatggagttggcattcggcggacgatatgttattcttctgatggcaatattctcaatatactgtggccttatatacaatgagttcttctcagttccattccatatatttggcaaatctgcatatgaatgccgggacaaaagctgcagcgatgcacatacttttggtctcatcaaagtccgtgaaccctatccttttggggtggacccaagctggcgtggaagtcggtctgagctaccctttct

SEQ ID NO: 78207 - DNA, 1834 bp, Zea Mays
ctttccgagccgcttcctccctccgtcactcctcatgggtcatggcattggcagttgcgcactaggcagaacagagtggaaaatagaattaggcctaccctccgagagtcagatctgaggcgcgccacccgcgaccaccgcaccgcgtcgtcctcctcctcgctctagcgacgccttctggaagctttgggaggccgcgctacgctacgcgacgctacgctccggcgggcggtcgggatggggctgttcgaccggctgcccccgatggaccacatgcggtccgagaagatgtgcttcgtgcagctcatcatgcccgccgagagctcgcgcctcgccgtcacctacctcggcgagctcggcctactccagttcaaggacttgaatgaggataagagtcctttccagcgtatatttgtcaaccaggtaaagcgatgtgcagaaatgtcacgcaaactaaaatttttcagtgatcagatcaacagggcaggtttaagatcttctgttcgacctgcacttgaaccggatattgatctggaggagctagaggcaagattgggtgaacatgagcatgaactgcttgagatgaatacaaatagtgacaagctaaaacagacatacaatgagcttcttgaattcaagctggtcttgtcaaaggcaggtcacatccttgcttcttctcacagccatgcagcttcagctgagcatgagctagatgaaaacatatatgacaatggaatacatgagggaaatgcctatctgctcgaacagggagtgcatcaaggagcacatggacattctggagtgagatttgttagtggaataatattaaagtcgaaggcacttgcttttgagcggatgctttttcgagctacaagaggaaacatgttattcaatcaggcatctgcaggggaacctgtaactgatcccatatctggtgaagagttttcttttctggggaacaagcaaaagcaaagatactaaagatttgtgattcatttggagcaagttgctaccctgttcctgaggagatggtcaagcagagacaaattttcaatgaggtatcggctcgtctctctgacctggaagttactttggatgctggaatccagcacagaaacaaagctcttgagtcaataggatcacaattgtggaggtggacaatcatggttaaaaaggagaaagctgtatatgacacgctcaacatgttgaactttgatgtgacaaagaagtgccttgttggagaaggatggtgtcctatatttgctaaatctcagatcaaggattgtttgcagcgttccacaattcacagcaattcacaagttggtacaatatttcatgagatggacactattgaatcaccacctacatatttccgaactgataagtttaccaatgctttccaggaaattgttgatgcatatggcgttgcccgatatcaagaagctaatccggctgtatattctgttgtgacgttcccatttctttttgctgttatgtttggagattggggtcatggaatatgtctattactaggagctttggttcttatacttcgcgagaagagattttcctctcagaagcttggtagctttatggagttggcattcggcggacgatatgttattcttctgatggcaatattctcaatatactgtggccttatatacaatgagttcttctcagttccattccatatatttggcaaatctgcatatgaatgccgggacaaaagctgcagcgatgcacatacttttggtctcatcaaagtccgtgaaccctatccttttggggtggacccaagctggcgtggaagtcggtctgagctaccctttct

SEQ ID NO: 78208 - DNA, 2289 bp, Zea Mays
attaggcctaccctccgagagtcagatctgaggcgcgccacccgcgaccaccgcaccgcgtcgtcctcctcctcgctctagcgacgccttctggaagctttgggaggccgcgctacgctacgcgacgctacgctccggcgggcggtcgggatggggctgttcgaccggctgcccccgatggaccacatgcggtccgagaagatgtgcttcgtgcagctcatcatgcccgccgagagctcgcgcctcgccgtcacctacctcggcgagctcggcctactccagttcaaggacttgaatgaggataagagtcctttccagcgtatatttgtcaaccaggtaaagcgatgtgcagaaatgtcacgcaaactaaaatttttcagtgatcagatcaacagggcaggtttaagatcttctgttcgacctgcacttgaaccggatattgatctggaggagctagaggcaagattgggtgaacatgagcatgaactgcttgagatgaatacaaatagtgacaagctaaaacagacatacaatgagcttcttgaattcaagctggtcttgtcaaaggtcacatccttgcttcttctcacagccatgcagcttcagctgagcatgagctagatgaaaacatatatgacaatggaatacatgagggaaatgcctatctgctcgaacaggtagagaaagctgtttttgtagttttcttttctggggaacaagcaaaagcaaagatactaaagatttgtgattcatttggagcaagttgctaccctgttcctgaggagatggtcaagcagagacaaattttcaatgaggtatcggctcgtctctctgacctggaagttactttggatgctggaatccagcacagaaacaaagctcttgagtcaataggatcacaattgtggaggtggacaatcatggttaaaaaggagaaagctgtatatgacacgctcaacatgttgaactttgatgtgacaaagaagtgccttgttggagaaggatggtgtcctatatttgctaaatctcagatcaaggattgtttgcagcgttccacaattcacagcaattcacaagttggtacaatatttcatgagatggacactattgaatcaccacctacatatttccgaactgataagtttaccaatgctttccaggaaattgttgatgcatatggcgttgcccgatatcaagaagctaatccggctgtatattctgttgtgacgttcccatttctttttgctgttatgtttggagattggggtcatggaatatgtctattactaggagctttggttcttatacttcgcgagaagagattttcctctcagaagcttggtagctttatggagttggcattcggcggacgatatgttattcttctgatggcaatattctcaatatactgtggccttatatacaatgagttcttctcagttccattccatatatttggcaaatctgcatatgaatgccgggacaaaagctgcagccttggagggagagaaagggtgaagaagggagttgggaagagagaagcgtcttttctgattttctcccagccgtcaaggaagatgaaaagacaggtagagatttgttgggggggggggtacctctattaatcatgggccagtccagtcaaacagactgttggaccacccgagcctaattaatcacgactaatcggctaccaggcgattaatcgttcggtcgttccatatcatcgcctaatcggacgatatggacgatcagttacactaatcgagtctaacaccctaatcgagcacagagaaacaatcagcccgactaatcgcgattagtcagccgatctgaaaacaatgagcccctgtatccaaacaagcccagtatacagtctatgtaataactttgtaaaattacagaaagcttatacctttatcttttgtactactatcaaagaaacatgccctgtcgttcattgatcatacaaaagtcttaagtatcgagtatcaacttaaaattatgtgcactcaccactactcaacttgacagtgaatttcttagtgcattgtctatagattatagtgaagtatgtggtctagtgagccatactttttgcttggttgtagccatttttgtttatggtctatagacctttatctttttgtttgttacttttctgaatggctggtagttaatgtaatttttgaccttctctattaacatatagcaagttagcagcagtacgtcaaggaaacactttttgcatgtaatcactttaatttcagatagccatgcatgtttctc

SEQ ID NO: 78209 - DNA, 2544 bp, Zea Mays
cgcttcctccctccgtcactcctcatgggtcatggcattggcagttgcgcactaggcagaacagagtggaaaatagaattaggcctaccctccgagagtcagatctgaggcgcgccacccgcgaccaccgcaccgcgtcgtcctcctcctcgctctagcgacgccttctggaagctttgggaggccgcgctacgctacgcgacgctacgctccggcgggcggtcgggatggggctgttcgaccggctgcccccgatggaccacatgcggtccgagaagatgtgcttcgtgcagctcatcatgcccgccgagagctcgcgcctcgccgtcacctacctcggcgagctcggcctactccagttcaaggacttgaatgaggataagagtcctttccagcgtatatttgtcaaccaggtaaagcgatgtgcagaaatgtcacgcaaactaaaatttttcagtgatcagatcaacagggcaggtttaagatcttctgttcgacctgcacttgaaccggatattgatctggaggagctagaggcaagattgggtgaacatgagcatgaactgcttgagatgaatacaaatagtgacaagctaaaacagacatacaatgagcttcttgaattcaagctggtcttgtcaaaggcaggtcacatccttgcttcttctcacagccatgcagcttcagctgagcatgagctagatgaaaacatatatgacaatggaatacatgagggaaatgcctatctgctcgaacagggagtgcatcaaggagcacatggacattctggagtgagatttgttagtggaataatattaaagtcgaaggcacttgcttttgagcggatgctttttcgagctacaagaggaaacatgttattcaatcaggcatctgcaggggaacctgtaactgatcccatatctggtgaagaggtagagaaagctgtttttgtagttttcttttctggggaacaagcaaaagcaaagatactaaagatttgtgattcatttggagcaagttgctaccctgttcctgaggagatggtcaagcagagacaaattttcaatgaggtatcggctcgtctctctgacctggaagttactttggatgctggaatccagcacagaaacaaagctcttgagtcaataggatcacaattgtggaggtggacaatcatggttaaaaaggagaaagctgtatatgacacgctcaacatgttgaactttgatgtgacaaagaagtgccttgttggagaaggatggtgtcctatatttgctaaatctcagatcaaggattgtttgcagcgttccacaattcacagcaattcacaagttggtacaatatttcatgagatggacactattgaatcaccacctacatatttccgaactgataagtttaccaatgctttccaggaaattgttgatgcatatggcgttgcccgatatcaagaagctaatccggctgtatattctgttgtgacgttcccatttctttttgctgttatgtttggagattggggtcatggaatatgtctattactaggagctttggttcttatacttcgcgagaagagattttcctctcagaagcttggtagctttatggagttggcattcggcggacgatatgttattcttctgatggcaatattctcaatatactgtggccttatatacaatgagttcttctcagttccattccatatatttggcaaatctgcatatgaatgccgggacaaaagctgcagccttggagggagagaaagggtgaagaagggagttgggaagagagaagcgtcttttctgattttctcccagccgtcaaggaagatgaaaagacaggtagagatttgttgggggggggggtacctctattaatcatgggccagtccagtcaaacagactgttggaccacccgagcctaattaatcacgactaatcggctaccaggcgattaatcgttcggtcgttccatatcatcgcctaatcggacgatatggacgatcagttacactaatcgagtctaacaccctaatcgagcacagagaaacaatcagcccgactaatcgcgattagtcagccgatctgaaaacaatgagcccctgtatccaaacaagcccagtatacagtctatgtaataactttgtaaaattacagaaagcttatacctttatcttttgtactactatcaaagaaacatgccctgtcgttcattgatcatacaaaagtcttaagtatcgagtatcaacttaaaattatgtgcactcaccactactcaacttgacagtgaatttcttagtgcattgtctatagattatagtgaagtatgtggtctagtgagccatactttttgcttggttgtagccatttttgtttatggtctatagacctttatctttttgtttgttacttttctgaatggctggtagttaatgtaatttttgaccttctctattaacatatagcaagttagcagcagtacgtcaaggaaacactttttgcatgtaatcactttaatttcagatagccatgcatgtttctc

SEQ ID NO: 78210 - DNA, 937 bp, Zea Mays
tttgacccggctgacgctgacttcaaatctgcgcggctaggcccaaacgacatggaataggtctagtaaaacaaggcagggagtaaacaaaggcagtcaggctttccgattctttgtacaatgttctgtataaataaacgacaacctctgtgtccccaacagcgcaccgttgattcagaattcagctacgttgaacctgcggaacacaggcgcccacggcccacgagatctccgtaagaaggcggaacctgtagaagacatggccggcgagatgagctgggtgggcaagaagatccacctctacaacgtcaccatgggcctctacatgctcgattgattccgaccttgcttttctcgacttcgtcatcaactaaggcttatgttagatccccgtctgattctggcggggtatctttgcctctgtcccggcagggcttaggtttggacatactggtgctgatcctgctctggttcatctgcttcaacggatcccgcttcgccactgatgtctacgaaagccacctgaaggcacggattttccaaggcgcaaattacggcatgggaattggcatgccctcctcctaagccttcaacgcaaaacacagaagcagcaaaatctgctagttctggaatctgaactgggttccaacaagctgtagtgatgtgtatgatgtagttccaatatgtaagattcttaacattattctttattttaatgtactttgtgtaagtgtgtaactaaggtttgagcgcacgatatcacatcctgagttctactgtaattatatccatttccttggtattatgttttgttactcatttactatatgtggccacagtttgactgcatgacatcacattcatagtattattagcttgtttcttcaaatttcacattataattttttgaggaaaatgaacatgagtccaacgtgac

SEQ ID NO: 78211 - DNA, 832 bp, Zea Mays
tttggtgcaccatgagacgcgtgcgtgcaaagcagttcgtgctgtactagttggaaaagaaaagccagctgcactcggcggccaaatttgacccggctgacgctgacttcaaatctgcgcggctaggcccaaacgacatggaatagcgcaccgttgattcagaattcagctacgttgaacctgcggaacacaggcgcccacggcccacgagatctccgtaagaaggcggaacctgtagaagacatggccggcgagatgagctgggtgggcaagaagatccacctctacaacgtcaccatgggcctctacatgctcgattggtgggagcgctgcctattcaacatactggtgctgatcctgctctggttcatctgcttcaacggatcccgcttcgccactgatgtctacgaaagccacctgaaggcacggattttccaaggcgcaaattacggcatgggaattggcatgccctcctcctaagccttcaacgcaaaacacagaagcagcaaaatctgctagttctggaatctgaactgggttccaacaagctgtagtgatgtgtatgatgtagttccaatatgtaagattcttaacattattctttattttaatgtactttgtgtaagtgtgtaactaaggtttgagcgcacgatatcacatcctgagttctactgtaattatatccatttccttggtattatgttttgttactcatttactatatgtggccacagtttgactgcatgacatcacattcatagtattattagcttgtttcttcaaatttcacattataattttttgaggaaaatgaacatgagtccaacgtgac

SEQ ID NO: 78212 - DNA, 1160 bp, Zea Mays
tcttgaggtgtaaactagacatccatggatcacgaactattcattagactatcttgtcaacaataaaattttacaacagaggctgatatacaacaattaattgatataaaatgctccactacacagatttaaatctgaggtcatgctagattacaatcttcttatcttcgggtgtgacaactccatatgaacagcgactcggttttatcaagaaccctaagtgaatattgataataatgtacaagtgctctcccttaagccctgttcgttttgtactaatccatagggactgagggggattaaatcccctataagtcaaaatcctctccaatcccttccaatccccctcaatccctatggttttgggatcaaacgaacatgaccttaaggggcttatagcatagtaggcactccagccttcatcaaaacaattccattgtgcggcagcaaaacttacacagcctgactaatttgggggatcccatggttttggaaccattctggcatatgaaatctttcacgcaatacgggtctgacgtctttctggagggaaagatgcttcaggagtggaaatataaccgtcatgagctggaatgtttagtcaagaaaaaaatcagcgcaatttgttaggctagaagttcaggcccacagaatgacttgtgccatagtcagttacctgatcatcagaatgttgtccagctgaaaatggaacacaaggtattccattcaaaggctgaagaatgaaactgaacggattgttgtcgacaatgacaatcctgccaaaatcttttgacacgcgagtaagatctttcacatgttctctatattccctgcaatcatgcaacccattgatgtcagaccattggcaaacaagtatggtgtaaaacatcaggcaggaagataaaaacatcaagaaacgagtgtattatgattgaataactcagtgaatcagcacaaacatgcatagtaaaggaagcatccatagttgtacagaggcaatgacgacagatcaagacacccaataaaaatgcacattgaatatattgtagaagttctggagtgcagatactcggagaacttggttaagataaaatgaatactaaaatttaaacactactagcattccatgtgtacaatgttaacatcattattggttgctg

SEQ ID NO: 78213 - DNA, 2387 bp, Zea Mays
agcataatgttcccctccccgactccgccttccccgcctcgtccttctcggaccgccggctccgcgtccccagttctacgtcgccagcacctcatccataccgttagcccgcacagcagtttttactgctctgtagtagtaggctgtagactctgtactctctagtctctactcccccctctccgccttctctctctccgcaggcggtatcctcccttcctcggttcctctcctctcccccaccaccccaccccagcgccccaaatgccgctccaaccctagcctcccgccacgcctttcgatctcggccggccatgggcaactgctgccgctcgccggccgccgtcgcgcgggaggacgtcagctcctcgcacttccccgcatccaacgcgaagaagaagccgcaccaagcgcgcaacggcggcggcgccgggcagaagcggctctcggttctgggcgacgaggggtgcgaggtcgtcgggatcgacgacaagtacgtcctggacagggagctcggccgcggggagttcggggtgacgtacctgtgtatggatcggggcaccaaggagctgctcgcctgcaagtccatctccaagcgcaagctgcggacggccgtcgacgtggaggacgtgcgccgggaggtggccatcatgcgccacctgcccaagagccccagcgtcgtgtccctgcgggaggcgtgcgaggacgacggcgccgtccacctcgtcatggagctctgcgagggcggcgagctcttcgaccgcatcgtcgcgcggggccactacaccgagcgcgccgccgccagtgtcacccgcaccatcctcgaggtcgtccagctctgccaccgccacggcgtcatccaccgcgacctcaagccggagaacttcctcttcgccaataagaaggagaactcgccgctcaaggccatcgacttcggtctctccatcttcttcaagcctgagactgaacaaggggtggcgcaggctattcttcgtggaaatatcgattttaagcgggaaccctggcctaatgtttcggaaaatgcaaaagatttagttcgacacatgttggagcctgatccaaagctcaggctaactgcaaagcaggttcttgaacatcattggcttcaaaatgcaaagaaggctcctaatgtccctcttggagatattgtaaagtcaaggctcaaacaattttctaggatgaatagattcaaaagaagggctctaagggtcattgctgatcatttgtctgctgaggaagttgaggatataaaggatatgttcaagactatggatactgacaatgatggaattgtatcttatgaagaactgaagactggaatagcaaaacttggttctcatcttgcggaatcagaagtacagatgctcattgaagcttcctcacagatccaggagtgcaggaggagctctagcgctctaccaaacaggcctaacaagagaacggaagttatgggagtagtgttgcctacttgtcttgctctctttatttaatttctccaacacttcttgatcactgtgtggcaggaggtagcaagagcaggctagattattgaactgcgactgatctggactgtaactcgctccacattttctaccgagctctgtgctctgcagctcgcacgcctttgatcagtgctgatcggcgtgcaggtggacacaaacgggaggggggcactagactacggggaatttctggccgtctcgctccacctgcagaggatggcgaacgacgagcatctccggcgggccttcctgttcttcgacaaggacggcaacggtttcatcgagcccgaggagcttcgagaggctctggtggacgacggggcggccgacagcatggaggaagtggtgaacgacatactgcaagaagtcgacaccgacaaggacggcaagatcagctacgaggagtttgtggcgatgatgaagaccggcacggactggagaaaggcgtcccggcactactcgagagggaggttcaacagcctcagcatgaagcttataaaggacgggtcggtaaagctgggtgtcgagtgaaaaccgcaccgacgctcgttgatgtgtgtgtgggtgtgtgcgcgcatgtagttttaggcccttgggccactaagcagaagaactctaggccttcttcttctttttttgtcccctcgtgactgtcttgcgtggaaattttagataggtggaagtggcggaaccctccgatttgtcttactacctgtgtaattagctatcccggtctcgctgacaggcactgggccaaacggtgtacctaatgctctcacccgttctcttgatggcagcccgagtgctgtacgatacagtgtgttttgcggtctggaaatgctcaacaatgtgttgggagacgcc

SEQ ID NO: 78214 - DNA, 3613 bp, Zea Mays
cggacgtataaaatactgttatgcattttagattacaatgttttaaaagtgaaatttaaaatagttagtgagatagaaattagagatagcataatgttcccctccccgactccgccttccccgcctcgtccttctcggaccgccggctccgcgtccccagttctacgtcgccagcacctcatccataccgttagcccgcacagcagtttttactgctctgtagtagtaggctgtagactctgtactctctagtctctactcccccctctccgccttctctctctccgcaggcggtatcctcccttcctcggttcctctcctctcccccaccaccccaccccagcgccccaaatgccgctccaaccctagcctcccgccacgcctttcgatctcggccggccatgggcaactgctgccgctcgccggccgccgtcgcgcgggaggacgtcagctcctcgcacttccccgcatccaacgcgaagaagaagccgcaccaagcgcgcaacggcggcggcgccgggcagaagcggctctcggttctgggcgacgaggggtgcgaggtcgtcgggatcgacgacaagtacgtcctggacagggagctcggccgcggggagttcggggtgacgtacctgtgtatggatcggggcaccaaggagctgctcgcctgcaagtccatctccaagcgcaagctgcggacggccgtcgacgtggaggacgtgcgccgggaggtggccatcatgcgccacctgcccaagagccccagcgtcgtgtccctgcgggaggcgtgcgaggacgacggcgccgtccacctcgtcatggagctctgcgagggcggcgagctcttcgaccgcatcgtcgcgcggggccactacaccgagcgcgccgccgccagtgtcacccgcaccatcctcgaggtcgtccagctctgccaccgccacggcgtcatccaccgcgacctcaagccggagaacttcctcttcgccaataagaaggagaactcgccgctcaaggccatcgacttcggtctctccatcttcttcaagcctgagactgaacaaggggtggcgcaggctattcttcgtggaaatatcgattttaagcgggaaccctggcctaatgtttcggaaaatgcaaaagatttagttcgacacatgttggagcctgatccaaagctcaggctaactgcaaagcaggttcttgaacatcattggcttcaaaatgcaaagaaggctcctaatgtccctcttggagatattgtaaagtcaaggctcaaacaattttctaggatgaatagattcaaaagaagggctctaagggtcattgctgatcatttgtctgctgaggaagttgaggatataaaggatatgttcaagactatggatactgacaatgatggaattgtatcttatgaagaactgaagactggaatagcaaaacttggttctcatcttgcggaatcagaagtacagatgctcattgaagctgtaagtattcacagaattatcctagaaacagataaagtagacttctgtatttactatttactttgaacttagaagtcttaggtggttaacaaataccatttaatagaaatggtacaaggaagatgtgatgcattgaaggacaaaatggtaattttcatgagaagatacattgaaccaacttcataatcttcacactgtgttcagtgcatccatttttatgcctcaatggtattttccactttatattcacatcaaccaaatgttccaatcacctggggcatttaatgtggcgtagattttttcaagatgactattgttcatctttgatatgtgccccagttttattccattagtgtcaaatagccatctgacctgaccataccctagtgaggtataaagctgtctccagcatcattacctatcacacatcttttttttctctcgaacgtgcaggagtactgcacatcattatattaagaagatgaaggtaatacagcaatacaaggcgagctcacggcagccagaaacgaaaatacacaaaagcatccattagggacacaaggacaaaaacaacccctcataggctgcctcggttgagaatttcacgttagaacccaatctaaaaatatgagaatcatccacatctggttgtagctccaccaaattgagaatatcccatagggtatgaaaatccatgaggacccgaacagtgatggcaccctgaatatccaatacctaggaagtattagtaagggtatcctccaccgtcctattagctctttgtataggagctgaacctcaactagctgactgcttactggcagatgtaaggcaagttggggtgatttcatcaatgaaatacatgcccttggtattatgtgtagtgtagcagcaatgtaagggcctgtttggcagacctccgagaacagcttctaggctgaatcaaggaggagttctgccaagcagggttttttttacagagacctgattcaatgctgattccatgaagtgatcatctgaaatgaactaggaggctgggagctgaaaattgtagcttctcttgattcgctccacaagcagaatccttttgcatagaatttcaccaacataatcgcttctcttagagaatcacttctcagtcctcacagatccaggagtgcaggaggagctctagcgctctaccaaacaggcctaacaagagaacggaagttatgggagtagtgttgcctacttgtcttgctctctttatttaatttctccaacacttcttgatcactgtgtggcaggaggtagcaagagcaggctagattattgaactgcgactgatctggactgtaactcgctccacattttctaccgagctctgtgctctgcagctcgcacgcctttgatcagtgctgatcggcgtgcaggtggacacaaacgggaggggggcactagactacggggaatttctggccgtctcgctccacctgcagaggatggcgaacgacgagcatctccggcgggccttcctgttcttcgacaaggacggcaacggtttcatcgagcccgaggagcttcgagaggctctggtggacgacggggcggccgacagcatggaggaagtggtgaacgacatactgcaagaagtcgacaccgacaaggacggcaagatcagctacgaggagtttgtggcgatgatgaagaccggcacggactggagaaaggcgtcccggcactactcgagagggaggttcaacagcctcagcatgaagcttataaaggacgggtcggtaaagctgggtgtcgagtgaaaaccgcaccgacgctcgttgatgtgtgtgtgggtgtgtgcgcgcatgtagttttaggcccttgggccactaagcagaagaactctaggccttcttcttctttttttgtcccctcgtgactgtcttgcgtggaaattttagataggtggaagtggcggaaccctccgatttgtcttactacctgtgtaattagctatcccggtctcgctgacaggcactgggccaaacggtgtacctaatgctctcacccgttctcttgatggcagcccgagtgctgtacgatacagtgtgttttgcggtctggaaatgctcaacaatgtgttgggagacgcc

SEQ ID NO: 78215 - DNA, 4031 bp, Zea Mays
aattgaataataccactaattagaaaggcaacaagtaaggtagcttctgcaatacaacatcgtcaataggatctttaagcaagcgccacgctttatttctttggattttaattaagagaacatggtgcatgagaggcgacgtgaggccaaacgatcgtataaagtagtgttctgcactttatattgcacaatttacaaggtacaatttaaaatgatcgtataaagtactgttgcataatttagattttatttaagaaaagatagtgcatatcaacggacgtataaaatactgttatgcattttagattacaatgttttaaaagtgaaatttaaaatagttagtgagatagaaattagagatagcataatgttcccctccccgactccgccttccccgcctcgtccttctcggaccgccggctccgcgtccccagttctacgtcgccagcacctcatccataccgttagcccgcacagcagtttttactgctctgtagtagtaggctgtagactctgtactctctagtctctactcccccctctccgccttctctctctccgcaggcggtatcctcccttcctcggttcctctcctctcccccaccaccccaccccagcgccccaaatgccgctccaaccctagcctcccgccacgcctttcgatctcggccggccatgggcaactgctgccgctcgccggccgccgtcgcgcgggaggacgtcagctcctcgcacttccccgcatccaacgcgaagaagaagccgcaccaagcgcgcaacggcggcggcgccgggcagaagcggctctcggttctgggcgacgaggggtgcgaggtcgtcgggatcgacgacaagtacgtcctggacagggagctcggccgcggggagttcggggtgacgtacctgtgtatggatcggggcaccaaggagctgctcgcctgcaagtccatctccaagcgcaagctgcggacggccgtcgacgtggaggacgtgcgccgggaggtggccatcatgcgccacctgcccaagagccccagcgtcgtgtccctgcgggaggcgtgcgaggacgacggcgccgtccacctcgtcatggagctctgcgagggcggcgagctcttcgaccgcatcgtcgcgcggggccactacaccgagcgcgccgccgccagtgtcacccgcaccatcctcgaggtcgtccagctctgccaccgccacggcgtcatccaccgcgacctcaagccggagaacttcctcttcgccaataagaaggagaactcgccgctcaaggccatcgacttcggtctctccatcttcttcaagcctggtgaaaagttttcagaaattgtgggaagcccctattacatggctcctgaagtattgaagagaaactatgggccagaaatagacatatggagtgcgggagttatcctgtatattttattatgtggagtccctccattttgggctgagactgaacaaggggtggcgcaggctattcttcgtggaaatatcgattttaagcgggaaccctggcctaatgtttcggaaaatgcaaaagatttagttcgacacatgttggagcctgatccaaagctcaggctaactgcaaagcaggttcttgaacatcattggcttcaaaatgcaaagaaggctcctaatgtccctcttggagatattgtaaagtcaaggctcaaacaattttctaggatgaatagattcaaaagaagggctctaagggtcattgctgatcatttgtctgctgaggaagttgaggatataaaggatatgttcaagactatggatactgacaatgatggaattgtatcttatgaagaactgaagactggaatagcaaaacttggttctcatcttgcggaatcagaagtacagatgctcattgaagctgtaagtattcacagaattatcctagaaacagataaagtagacttctgtatttactatttactttgaacttagaagtcttaggtggttaacaaataccatttaatagaaatggtacaaggaagatgtgatgcattgaaggacaaaatggtaattttcatgagaagatacattgaaccaacttcataatcttcacactgtgttcagtgcatccatttttatgcctcaatggtattttccactttatattcacatcaaccaaatgttccaatcacctggggcatttaatgtggcgtagattttttcaagatgactattgttcatctttgatatgtgccccagttttattccattagtgtcaaatagccatctgacctgaccataccctagtgaggtataaagctgtctccagcatcattacctatcacacatcttttttttctctcgaacgtgcaggagtactgcacatcattatattaagaagatgaaggtaatacagcaatacaaggcgagctcacggcagccagaaacgaaaatacacaaaagcatccattagggacacaaggacaaaaacaacccctcataggctgcctcggttgagaatttcacgttagaacccaatctaaaaatatgagaatcatccacatctggttgtagctccaccaaattgagaatatcccatagggtatgaaaatccatgaggacccgaacagtgatggcaccctgaatatccaatacctaggaagtattagtaagggtatcctccaccgtcctattagctctttgtataggagctgaacctcaactagctgactgcttactggcagatgtaaggcaagttggggtgatttcatcaatgaaatacatgcccttggtattatgtgtagtgtagcagcaatgtaagggcctgtttggcagacctccgagaacagcttctaggctgaatcaaggaggagttctgccaagcagggttttttttacagagacctgattcaatgctgattccatgaagtgatcatctgaaatgaactaggaggctgggagctgaaaattgtagcttctcttgattcgctccacaagcagaatccttttgcatagaatttcaccaacataatcgcttctcttagagaatcacttctcagtcctcacagatccaggagtgcaggaggagctctagcgctctaccaaacaggcctaacaagagaacggaagttatgggagtagtgttgcctacttgtcttgctctctttatttaatttctccaacacttcttgatcactgtgtggcaggaggtagcaagagcaggctagattattgaactgcgactgatctggactgtaactcgctccacattttctaccgagctctgtgctctgcagctcgcacgcctttgatcagtgctgatcggcgtgcaggtggacacaaacgggaggggggcactagactacggggaatttctggccgtctcgctccacctgcagaggatggcgaacgacgagcatctccggcgggccttcctgttcttcgacaaggacggcaacggtttcatcgagcccgaggagcttcgagaggctctggtggacgacggggcggccgacagcatggaggaagtggtgaacgacatactgcaagaagtcgacaccgacaaggacggcaagatcagctacgaggagtttgtggcgatgatgaagaccggcacggactggagaaaggcgtcccggcactactcgagagggaggttcaacagcctcagcatgaagcttataaaggacgggtcggtaaagctgggtgtcgagtgaaaaccgcaccgacgctcgttgatgtgtgtgtgggtgtgtgcgcgcatgtagttttaggcccttgggccactaagcagaagaactctaggccttcttcttctttttttgtcccctcgtgactgtcttgcgtggaaattttagataggtggaagtggcggaaccctccgatttgtcttactacctgtgtaattagctatcccggtctcgctgacaggcactgggccaaacggtgtacctaatgctctcacccgttctcttgatggcagcccgagtgctgtacgatacagtgtgttttgcggtctggaaatgctcaacaatgtgttgggagacgcc

SEQ ID NO: 78216 - DNA, 2998 bp, Zea Mays
cttctctctagtttctctttctcccggcgggttgttgatatcgaagcgtggtgtgctttcatcgagcactcgctgtcgcctcgtagcgtcgggagcatggcactggcaaattcggcacggccactttctctgcttgcaggcttgcagctgtgctttgcctggatggctggatcccaggtacacctacctctcatctgattgtcgtgcggggtgcgtattgaatgaaattcggcgtactataatttatccgggggtggttggagaaagtccgtggatttgttaggattctgccatttcaacatttctagcatagcacaaaaaaataatattcctctctaccgatttcagtcaagcggtagataaactagcagaggacgccaaagttgaggcggtgtgcaactcgcacacagcattgcggcaatggatttattattattatttttgcaccgtgtctgaaaacatggggagtgaaattctacccctatggaattgaataataccactaattagaaaggcaacaagtaaggtagcttctgcaatacaacatcgtcaataggatctttaagcaagcgccacgctttatttctttggattttaattaagagaacatggtgcatgagaggcgacgtgaggccaaacgatcgtataaagtagtgttctgcactttatattgcacaatttacaaggtacaatttaaaatgatcgtataaagtactgttgcataatttagattttatttaagaaaagatagtgcatatcaacggacgtataaaatactgttatgcattttagattacaatgttttaaaagtgaaatttaaaatagttagtgagatagaaattagagatagcataatgttcccctccccgactccgccttccccgcctcgtccttctcggaccgccggctccgcgtccccagttctacgtcgccagcacctcatccataccgttagcccgcacagcagtttttactgctctgtagtagtaggctgtagactctgtactctctagtctctactcccccctctccgccttctctctctccgcaggcggtatcctcccttcctcggttcctctcctctcccccaccaccccaccccagcgccccaaatgccgctccaaccctagcctcccgccacgcctttcgatctcggccggccatgggcaactgctgccgctcgccggccgccgtcgcgcgggaggacgtcagctcctcgcacttccccgcatccaacgcgaagaagaagccgcaccaagcgcgcaacggcggcggcgccgggcagaagcggctctcggttctgggcgacgaggggtgcgaggtcgtcgggatcgacgacaagtacgtcctggacagggagctcggccgcggggagttcggggtgacgtacctgtgtatggatcggggcaccaaggagctgctcgcctgcaagtccatctccaagcgcaagctgcggacggccgtcgacgtggaggacgtgcgccgggaggtggccatcatgcgccacctgcccaagagccccagcgtcgtgtccctgcgggaggcgtgcgaggacgacggcgccgtccacctcgtcatggagctctgcgagggcggcgagctcttcgaccgcatcgtcgcgcggggccactacaccgagcgcgccgccgccagtgtcacccgcaccatcctcgaggtcgtccagctctgccaccgccacggcgtcatccaccgcgacctcaagccggagaacttcctcttcgccaataagaaggagaactcgccgctcaaggccatcgacttcggtctctccatcttcttcaagcctgagactgaacaaggggtggcgcaggctattcttcgtggaaatatcgattttaagcgggaaccctggcctaatgtttcggaaaatgcaaaagatttagttcgacacatgttggagcctgatccaaagctcaggctaactgcaaagcaggttcttgaacatcattggcttcaaaatgcaaagaaggctcctaatgtccctcttggagatattgtaaagtcaaggctcaaacaattttctaggatgaatagattcaaaagaagggctctaagggtcattgctgatcatttgtctgctgaggaagttgaggatataaaggatatgttcaagactatggatactgacaatgatggaattgtatcttatgaagaactgaagactggaatagcaaaacttggttctcatcttgcggaatcagaagtacagatgctcattgaagctctcgcacgcctttgatcagtgctgatcggcgtgcaggtggacacaaacgggaggggggcactagactacggggaatttctggccgtctcgctccacctgcagaggatggcgaacgacgagcatctccggcgggccttcctgttcttcgacaaggacggcaacggtttcatcgagcccgaggagcttcgagaggctctggtggacgacggggcggccgacagcatggaggaagtggtgaacgacatactgcaagaagtcgacaccgacaaggacggcaagatcagctacgaggagtttgtggcgatgatgaagaccggcacggactggagaaaggcgtcccggcactactcgagagggaggttcaacagcctcagcatgaagcttataaaggacgggtcggtaaagctgggtgtcgagtgaaaaccgcaccgacgctcgttgatgtgtgtgtgggtgtgtgcgcgcatgtagttttaggcccttgggccactaagcagaagaactctaggccttcttcttctttttttgtcccctcgtgactgtcttgcgtggaaattttagataggtggaagtggcggaaccctccgatttgtcttactacctgtgtaattagctatcccggtctcgctgacaggcactgggccaaacggtgtacctaatgctctcacccgttctcttgatggcagcccgagtgctgtacgatacagtgtgttttgcggtctggaaatgctcaacaatgtgttgggagacgcc

SEQ ID NO: 78217 - DNA, 2962 bp, Zea Mays
cttctctctagtttctctttctcccggcgggttgttgatatcgaagcgtggtgtgctttcatcgagcactcgctgtcgcctcgtagcgtcgggagcatggcactggcaaattcggcacggccactttctctgcttgcaggcttgcagctgtgctttgcctggatggctggatcccaggtacacctacctctcatctgattgtcgtgcggggtgcgtattgaatgaaattcggcgtactataatttatccgggggtggttggagaaagtccgtggatttgttaggattctgccatttcaacatttctagcatagcacaaaaaaataatattcctctctaccgatttcagtcaagcggtagataaactagcagaggacgccaaagttgaggcggtgtgcaactcgcacacagcattgcggcaatggatttattattattatttttgcaccgtgtctgaaaacatggggagtgaaattctacccctatggaattgaataataccactaattagaaaggcaacaagtaaggtagcttctgcaatacaacatcgtcaataggatctttaagcaagcgccacgctttatttctttggattttaattaagagaacatggtgcatgagaggcgacgtgaggccaaacgatcgtataaagtagtgttctgcactttatattgcacaatttacaaggtacaatttaaaatgatcgtataaagtactgttgcataatttagattttatttaagaaaagatagtgcatatcaacggacgtataaaatactgttatgcattttagattacaatgttttaaaagtgaaatttaaaatagttagtgagatagaaattagagatagcataatgttcccctccccgactccgccttccccgcctcgtccttctcggaccgccggctccgcgtccccagttctacgtcgccagcacctcatccataccgttagcccgcacagcagtttttactgctctgtagtagtaggctgtagactctgtactctctagtctctactcccccctctccgccttctctctctccgcaggcggtatcctcccttcctcggttcctctcctctcccccaccaccccaccccagcgccccaaatgccgctccaaccctagcctcccgccacgcctttcgatctcggccggccatgggcaactgctgccgctcgccggccgccgtcgcgcgggaggacgtcagctcctcgcacttccccgcatccaacgcgaagaagaagccgcaccaagcgcgcaacggcggcggcgccgggcagaagcggctctcggttctgggcgacgaggggtgcgaggtcgtcgggatcgacgacaagtacgtcctggacagggagctcggccgcggggagttcggggtgacgtacctgtgtatggatcggggcaccaaggagctgctcgcctgcaagtccatctccaagcgcaagctgcggacggccgtcgacgtggaggacgtgcgccgggaggtggccatcatgcgccacctgcccaagagccccagcgtcgtgtccctgcgggaggcgtgcgaggacgacggcgccgtccacctcgtcatggagctctgcgagggcggcgagctcttcgaccgcatcgtcgcgcggggccactacaccgagcgcgccgccgccagtgtcacccgcaccatcctcgaggtcgtccagctctgccaccgccacggcgtcatccaccgcgacctcaagccggagaacttcctcttcgccaataagaaggagaactcgccgctcaaggccatcgacttcggtctctccatcttcttcaagcctgagactgaacaaggggtggcgcaggctattcttcgtggaaatatcgattttaagcgggaaccctggcctaatgtttcggaaaatgcaaaagatttagttcgacacatgttggagcctgatccaaagctcaggctaactgcaaagcaggttcttgaacatcattggcttcaaaatgcaaagaaggctcctaatgtccctcttggagatattgtaaagtcaaggctcaaacaattttctaggatgaatagattcaaaagaagggctctaagggtcattgctgatcatttgtctgctgaggaagttgaggatataaaggatatgttcaagactatggatactgacaatgatggaattgtatcttatgaagaactgaagactggaatagcaaaacttggttctcatcttgcggaatcagaagtacagatgctcattgaagctgtggacacaaacgggaggggggcactagactacggggaatttctggccgtctcgctccacctgcagaggatggcgaacgacgagcatctccggcgggccttcctgttcttcgacaaggacggcaacggtttcatcgagcccgaggagcttcgagaggctctggtggacgacggggcggccgacagcatggaggaagtggtgaacgacatactgcaagaagtcgacaccgacaaggacggcaagatcagctacgaggagtttgtggcgatgatgaagaccggcacggactggagaaaggcgtcccggcactactcgagagggaggttcaacagcctcagcatgaagcttataaaggacgggtcggtaaagctgggtgtcgagtgaaaaccgcaccgacgctcgttgatgtgtgtgtgggtgtgtgcgcgcatgtagttttaggcccttgggccactaagcagaagaactctaggccttcttcttctttttttgtcccctcgtgactgtcttgcgtggaaattttagataggtggaagtggcggaaccctccgatttgtcttactacctgtgtaattagctatcccggtctcgctgacaggcactgggccaaacggtgtacctaatgctctcacccgttctcttgatggcagcccgagtgctgtacgatacagtgtgttttgcggtctggaaatgctcaacaatgtgttgggagacgcc

SEQ ID NO: 78218 - DNA, 3149 bp, Zea Mays
gtagtttcttctctctagtttctctttctcccggcgggttgttgatatcgaagcgtggtgtgctttcatcgagcactcgctgtcgcctcgtagcgtcgggagcatggcactggcaaattcggcacggccactttctctgcttgcaggcttgcagctgtgctttgcctggatggctggatcccaggtacacctacctctcatctgattgtcgtgcggggtgcgtattgaatgaaattcggcgtactataatttatccgggggtggttggagaaagtccgtggatttgttaggattctgccatttcaacatttctagcatagcacaaaaaaataatattcctctctaccgatttcagtcaagcggtagataaactagcagaggacgccaaagttgaggcggtgtgcaactcgcacacagcattgcggcaatggatttattattattatttttgcaccgtgtctgaaaacatggggagtgaaattctacccctatggaattgaataataccactaattagaaaggcaacaagtaaggtagcttctgcaatacaacatcgtcaataggatctttaagcaagcgccacgctttatttctttggattttaattaagagaacatggtgcatgagaggcgacgtgaggccaaacgatcgtataaagtagtgttctgcactttatattgcacaatttacaaggtacaatttaaaatgatcgtataaagtactgttgcataatttagattttatttaagaaaagatagtgcatatcaacggacgtataaaatactgttatgcattttagattacaatgttttaaaagtgaaatttaaaatagttagtgagatagaaattagagatagcataatgttcccctccccgactccgccttccccgcctcgtccttctcggaccgccggctccgcgtccccagttctacgtcgccagcacctcatccataccgttagcccgcacagcagtttttactgctctgtagtagtaggctgtagactctgtactctctagtctctactcccccctctccgccttctctctctccgcaggcggtatcctcccttcctcggttcctctcctctcccccaccaccccaccccagcgccccaaatgccgctccaaccctagcctcccgccacgcctttcgatctcggccggccatgggcaactgctgccgctcgccggccgccgtcgcgcgggaggacgtcagctcctcgcacttccccgcatccaacgcgaagaagaagccgcaccaagcgcgcaacggcggcggcgccgggcagaagcggctctcggttctgggcgacgaggggtgcgaggtcgtcgggatcgacgacaagtacgtcctggacagggagctcggccgcggggagttcggggtgacgtacctgtgtatggatcggggcaccaaggagctgctcgcctgcaagtccatctccaagcgcaagctgcggacggccgtcgacgtggaggacgtgcgccgggaggtggccatcatgcgccacctgcccaagagccccagcgtcgtgtccctgcgggaggcgtgcgaggacgacggcgccgtccacctcgtcatggagctctgcgagggcggcgagctcttcgaccgcatcgtcgcgcggggccactacaccgagcgcgccgccgccagtgtcacccgcaccatcctcgaggtcgtccagctctgccaccgccacggcgtcatccaccgcgacctcaagccggagaacttcctcttcgccaataagaaggagaactcgccgctcaaggccatcgacttcggtctctccatcttcttcaagcctggtgaaaagttttcagaaattgtgggaagcccctattacatggctcctgaagtattgaagagaaactatgggccagaaatagacatatggagtgcgggagttatcctgtatattttattatgtggagtccctccattttgggctgagactgaacaaggggtggcgcaggctattcttcgtggaaatatcgattttaagcgggaaccctggcctaatgtttcggaaaatgcaaaagatttagttcgacacatgttggagcctgatccaaagctcaggctaactgcaaagcaggttcttgaacatcattggcttcaaaatgcaaagaaggctcctaatgtccctcttggagatattgtaaagtcaaggctcaaacaattttctaggatgaatagattcaaaagaagggctctaagggtcattgctgatcatttgtctgctgaggaagttgaggatataaaggatatgttcaagactatggatactgacaatgatggaattgtatcttatgaagaactgaagactggaatagcaaaacttggttctcatcttgcggaatcagaagtacagatgctcattgaagctctcgcacgcctttgatcagtgctgatcggcgtgcaggtggacacaaacgggaggggggcactagactacggggaatttctggccgtctcgctccacctgcagaggatggcgaacgacgagcatctccggcgggccttcctgttcttcgacaaggacggcaacggtttcatcgagcccgaggagcttcgagaggctctggtggacgacggggcggccgacagcatggaggaagtggtgaacgacatactgcaagaagtcgacaccgacaaggacggcaagatcagctacgaggagtttgtggcgatgatgaagaccggcacggactggagaaaggcgtcccggcactactcgagagggaggttcaacagcctcagcatgaagcttataaaggacgggtcggtaaagctgggtgtcgagtgaaaaccgcaccgacgctcgttgatgtgtgtgtgggtgtgtgcgcgcatgtagttttaggcccttgggccactaagcagaagaactctaggccttcttcttctttttttgtcccctcgtgactgtcttgcgtggaaattttagataggtggaagtggcggaaccctccgatttgtcttactacctgtgtaattagctatcccggtctcgctgacaggcactgggccaaacggtgtacctaatgctctcacccgttctcttgatggcagcccgagtgctgtacgatacagtgtgttttgcggtctggaaatgctcaacaatgtgttgggagacgcc

SEQ ID NO: 78219 - DNA, 1435 bp, Zea Mays
gagaaagttctgccgtccatccatcgtctcgtccccgcctgccattcgcgagcatccaaagctgtagttgctgcaaagctctcgcaaaatcctactcccaccgccgactcgaacagtcgaacctcggctcccctcctccccaatccgtcatcttccttctacacttgtttctgcgggagcgggagagaaggcaccagggaggccgcccccgtcacccatagccaaagtcacgcgccaccaaactttgttctctcacccagtcgctttcgcgttcagcgcgagccgagcccagccggtgggtcggtcgctgaaggcggagccataaaggcgtcggcgacggcaggatgatgagcggcagatcgggcggcagggacggcgaggcggccggccccgtcatcaggatcagggtttcccacggagccaccttccgcgaggtcgtcgtgccggcgcaggctaccttcggtgttaaggatggcgcgaagttgcttctgcttgagaagccttcccctgccaacatagagcagaaggttgagcctgtgattatggatgagagcgtgatgaaggcatgtgaggctgttgctcgtgttagagctgaagttgataggctgtctgctaaggtgtgtgacttggagaagaatgtgcttgcagggagaaaagttgatgataaagaatttgtcgtcttgacggaactgcttatgatacagctgctgaaactcgatggcatcgaagctgaaggagaagcaagggcacagaggaaggctgaggtccgccgagtccagtcccttgtggagaccttggataagctgaaggcaagaaatgcgaaccctttcagcgatcataacaacgctgtttcagtgacgacgcagtgggagacgtttgagaacggtatgggcagcttcagcgctcccccgccccacgttccttcagagcaagttaacactgactgggagcagttcgactaggctcagctgaagctgttgatgtatcgtgagatcggtatgggcattccttttcccaggcagcgaggtgttttgtgtatatgcaccgcgtttggtgcctttggtgtcctaactgcctgtgaatgttaccagatcataccatactaccatgtgaattgcattgcaccgctcaacgctcattgagggccatgtttcgatatgctcctgccaatgccattcgcatgatatttattggctaggttcagcaaggttggtggtaacggccctggccagatccctttacagcagtagctcatccgtgaatgcaattgaatcagtcatgtacacgttgacgctgtagctgttccgaaagtcctgtacagcactagctcatcggcgaatgcatctgtaccatgtacacgctgacgctgtagctgcatttgtagtgcccctttgtaatgcaggaatttaagagaaattatacaggaatttcacag

SEQ ID NO: 78220 - DNA, 1762 bp, Zea Mays
aaatgcgcttgttaattcgcctcacttctcgctgtggtcaccacgcttcacatctcgcgcggtagcgtccgacaggcatggccgcctcctccctgctccggtcgttcacccgccgcagctgcgcgggcccgagcgctttcgcttaccgccaccaccaacgacagcaaccttggtctcccttctccaccagcgccgctgcggtcacgcaggacgaagcggcgaagaggttccctggactagggccgacggcgaagggggagaaggccagggtggtggtgttggggacagggtgggcggggtctcggctaatgaaggacctcgatacacaaggctacgacgtggtctgcgtcgccccgcgcaaccacatggtgttcacgccgctgctcgcctccacctgcgtcggcacgctcgagttccgatccgtcgctgagccggtcgcgcgcatccagcccgccgtgtccaagtcgccgggctcctacttcctcctcgcccgttgcaccggcgtcgaccccgacggccacacgatggtgagaaagattccttggagccatggaaattcaaggttgcttatgacaagttggtttttgcctgtggagctgaggcatcaacttttgggatacatggtgttaccgaccatgcaatctttcttcgcgaagttcatcatgctcaagagattcggagacggctcctccttaatctgatgttgtctgatctccctggaatttcagaagaagaaaagtgcagattattgcactgtgttgttgttggaggtggtccaacaggggtggaatttagtggtgaacttagtgattttattatacgagatgtcaaacaacgttattcacatgtgaaggattatattcatgtgaccctgattgaggcaaatgagatattgtcatcattcgatgttcggctcaggcaatatgctacaaagcaactaattaagtcaggtgttaggcttgtgcaaggaattgttaaggatgtgcagcccaacaaaataattcttgacaatggagaggaagttccttatggtttactggtatggtccaccggagttggtgcttcaccattcgttaagtcattgccatttcctaagtcacctggtggaaggatcggtgtcaatgagtggttacgtgtcccttctgttcatgatgtttatgccattggtgactgcagtggatttctcgagagcaccggcaaggaagttctccctgctttagctcaggttgctgaacgacaaggcaagtacctggcaagcctgctcaaccatgtcatgaaagctggaggagggcatgcaaactctgagactgaagcagatctgggtcgtccaccctttgtgtacaagcatctaggcagcatggcaactgttggaagatacaaagctctagtcgatctgaggcaaagcaaggagtcaagagggatatctcttgcaggatttgtgagctggttcatctggcgctcggcatatttaactcgtgttgttagctggaggaataggttctatgtggctatcaattggctgaccactctcttatttggccgggacataagcagaatctagagtgtctttgtatacgtacgaacaagcatataagtcgatgtagagttacacgccacggtcacttgcttgccacacacccctccgggggtccactcctaccactgtccctattagctgtgaatgtaattcacaggtgaattatgaataaatctgaggatactgcagttacttacatgtggtgtgaatgtataatactctgtc

SEQ ID NO: 78221 - DNA, 1788 bp, Zea Mays
cccgggccggccgccgacccacaccccacccgccatgggcggcgtccaacgaaatgcgcttgttaattcgcctcacttctcgctgtggtcaccacgcttcacatctcgcgcggtagcgtccgacaggcatggccgcctcctccctgctccggtcgttcacccgccgcagctgcgcgggcccgagcgctttcgcttaccgccaccaccaacgacagcaaccttggtctcccttctccaccagcgccgctgcggtcacgcaggacgaagcggcgaagaggttccctggactagggccgacggcgaagggggagaaggccagggtggtggtgttggggacagggtgggcggggtctcggctaatgaaggacctcgatacacaaggctacgacgtggtctgcgtcgccccgcgcaaccacatggtgttcacgccgctgctcgcctccacctgcgtcggcacgctcgagttccgatccgtcgctgagccggtcgcgcgcatccagcccgccgtgtccaagtcgccgggctcctacttcctcctcgcccgttgcaccggcgtcgaccccgacggccacacgatggtgagaaagattccttggagccatggaaattcaaggttgcttatgacaagttggtttttgcctgtggagctgaggcatcaacttttgggatacatggtgttaccgaccatgcaatctttcttcgcgaagttcatcatgctcaagagattcggagacggctcctccttaatctgatgttgtctgatctccctggaatttcagaagaagaaaagtgcagattattgcactgtgttgttgttggaggtggtccaacaggggtggaatttagtggtgaacttagtgattttattatacgagatgtcaaacaacgttattcacatgtgaaggattatattcatgtgaccctgattgaggcaaatgagatattgtcatcattcgatgttcggctcaggcaatatgctacaaagcaactaattaagtcaggtgttaggcttgtgcaaggaattgttaaggatgtgcagcccaacaaaataattcttgacaatggagaggaagttccttatggtttactggtatggtccaccggagttggtgcttcaccattcgttaagtcattgccatttcctaagtcacctggtggaaggatcggtgtcaatgagtggttacgtgtcccttctgttcatgatgtttatgccattggtgactgcagtggatttctcgagagcaccggcaaggaagttctccctgctttagctcaggttgctgaacgacaaggcaagtacctggcaagcctgctcaaccatgtcatgaaagctggaggagggcatgcaaactctgagactgaagcagatctgggtcgtccaccctttgtgtacaagcatctaggcagcatggcaactgttggaagatacaaagctctagtcgatctgaggcaaagcaaggatttgtgagctggttcatctggcgctcggcatatttaactcgtgttgttagctggaggaataggttctatgtggctatcaattggctgaccactctcttatttggccgggacataagcagaatctagagtgtctttgtatacgtacgaacaagcatataagtcgatgtagagttacacgccacggtcacttgcttgccacacacccctccgggggtccactcctaccactgtccctattagctgtgaatgtaattcacaggtgaattatgaataaatctgaggatactgcagttacttacatgtggtgtgaatgtataatactctgtc

SEQ ID NO: 78222 - DNA, 1120 bp, Zea Mays
ccgccgaggaacgattcccttcgcacaatcgtactgttcccctcaaaccccagccagccatggcgatcgcggcggattctgccgccgatcaagacccaaaccctatacccaacgaggccgcgggcgaatccgtcgagctacccgcgtacactgaccacggggaacccaatgcggatcttgctgacgtggactacgaggatgaagaggagctggacggggtgacggcggaagcggcggcgagagacaaggtggaggcagtgttccagcggctgtcggaagcccccgttggcatccgcgtccacgacattatcatcaaaggcaacaccaagacccgcgacgcgctcatcgaggcggaggtcgtggggctcatccgctccgccgtcaccgtgcaggacctggtgcgcaccgccaacatcgccgccgtgcggctcaggctcctcgacgtgtttgactccgtccacgtcctcctggatgctggccctcccgagctgcctggcaccactaacgttataatccaagtcgtcgaggctgctaaccccatcgatggaagcgtcggctgcttctccaagccggaggcaaggtcatggacagttgaaggatcagtcagatggaggaacatatttggttatggtgacatctgggatgcttcgggagcatatgggtgggaccagtcatcagagataagcattggagtatccttaccaagatttagatcgataccaaccccctcgactgctcgggcatcactcttgtctcatgactggctgaaattttcatcatacaaggaacgtctgcttggcctatcctttggtttgctttcggacatgcaccatgatttatcttacaatctgacttggcgtaccttgactgatccttcacaagcggcatcaaaatccataacaagacagttaggacataaccttctttctgcattaagatatacatatacaatagatcaaagggattcccatctcaggccaaccaaaggatatgcatttgtctcaacttcccaagttagtggtctatggggcagcaaaggattgagattcttccgccagatttctatggacctacacttcttcattttccataattgttgagtacaattcttctgctcacc

SEQ ID NO: 78223 - DNA, 1122 bp, Zea Mays
ccgccgaggaacgattcccttcgcacaatcgtactgttcccctcaaaccccagccagccatggcgatcgcggcggattctgccgccgatcaagacccaaaccctatacccaacgaggccgcgggcgaatccgtcgagctacccgcgtacactgaccacggggaacccaatgcggatcttgctgacgtggactacgaggatgaagaggagctggacggggtgacggcggaagcggcggcgagagacaaggtggaggcagtgttccagcggctgtcggaagcccccgttggcatccgcgtccacgacattatcatcaaaggcaacaccaagacccgcgacgcgctcatcgaggcggaggtcgtggggctcatccgctccgccgtcaccgtgcaggacctggtgcgcaccgccaacatcgccgccgtgcggctcaggctcctcgacgtgtttgactccgtccacgtcctcctggatgctggccctcccgagctgcctggcaccactaacgttataatccaagtcgtcgaggctgctaaccccatcgatggaagcgtcggctgcttctccaagccggaggcaaggtcatggacagttgaaggatcagtcagatggaggaacatatttggttatggtgacatctgggatgcttcgggagcatatgggtgggaccagtcatcagagataagcattggagtatccttaccaagatttagatcgataccaaccccctcgactgctcgggcatcactcttgtctcatgactggctgaaattttcatcatacaaggaacgtctgcttggcctatcctttggtttgctttcggacatgcaccatgatttatcttacaatctgacttggcgtaccttgactgatccttcacaagcggcatcaaaatccataacaagacagttaggacataaccttctttctgcattaagatatacatatacaatagatcaaagggattcccatctcaggccaaccaaaggatatgcatttgtctcaacttcccaagttagtggtctatggggcagcaaaggattgagattcttccgccagtctgcagttgtagagctcggcgaacagtttttgggttcggcgccaaaatccggttagagttctc

SEQ ID NO: 78224 - DNA, 2309 bp, Zea Mays
ccgccgaggaacgattcccttcgcacaatcgtactgttcccctcaaaccccagccagccatggcgatcgcggcggattctgccgccgatcaagacccaaaccctatacccaacgaggccgcgggcgaatccgtcgagctacccgcgtacactgaccacggggaacccaatgcggatcttgctgacgtggactacgaggatgaagaggagctggacggggtgacggcggaagcggcggcgagagacaaggtggaggcagtgttccagcggctgtcggaagcccccgttggcatccgcgtccacgacattatcatcaaaggcaacaccaagacccgcgacgcgctcatcgaggcggaggtcgtggggctcatccgctccgccgtcaccgtgcaggacctggtgcgcaccgccaacatcgccgccgtgcggctcaggctcctcgacgtgtttgactccgtccacgtcctcctggatgctggccctcccgagctgcctggcaccactaacgttataatccaagtcgtcgaggctgctaaccccatcgatggaagcgtcggctgcttctccaagccggaggcaaggtcatggacagttgaaggatcagtcagatggaggaacatatttggttatggtgacatctgggatgcttcgggagcatatgggtgggaccagtcatcagagataagcattggagtatccttaccaagatttagatcgataccaaccccctcgactgctcgggcatcactcttgtctcatgactggctgaaattttcatcatacaaggaacgtctgcttggcctatcctttggtttgctttcggacatgcaccatgatttatcttacaatctgacttggcgtaccttgactgatccttcacaagcggcatcaaaatccataacaagacagttaggacataaccttctttctgcattaagatatacatatacaatagatcaaagggattcccatctcaggccaaccaaaggatatgcatttgtctcaacttcccaagttagtggtctatggggcagcaaaggattgagattcttccgccaggagtttgatattcgcggggctgttccattgggcttttacaatgctgccctaaatgctggcatctcagcaggggtgattttaccgttggggagggggtttatggaatcaccttcatctgtacctgatagatttttcctgggagggcattcttctccagtaatcagtctttgtagtttaacttccctactgggtttcaaaacaagaggagttgggccaacagaactacggagaattgtcccaagtgaatctgtgacaaatgaatccacagcctctccaggatgggactatttgggaggtgatttcgcagtttctgcatttgctgatctatcctttgatttgcccttaaagttattccaggatgctggcatacatggccatgcattcctatctgctggaaatctcgccaagttgtccgagggtgagttcagaaatttctcgttttccaagttcgggcgcacatttaggagctcagctggtgttggcattatcttacccactaagcttcttcgtgcggagataaactactgttatatactgaagcagtttgagcatgatcgtggaaagactgggattcagttcagtttttcgtctccaatgtagatgtcatgtttgtggttctccctgactatgaacaatgcaatgcttaatcgtgctgagcatttccgctcgttctattttggttctggctgaatcatctttttaactaactaggagtccagcaaatccatatccagatgattgatcttttgtatcatgctcgttgttgaccattagaactggaagagttgccttgctgacggttattgtgaactgtgatggtttcatggtcggcaaaaaaatgcgtatatgttggtggcaatgatgtttgctctatgggaagtttgcatatatattatacatgaccatgtttatcaaggtggtaaagcgaaagcgtggtggcgatctatatcgccttatattcgacgtcatacaaaggtaatgaaatgcaagagatcagcatgaagggggaggaatatttttatatgaaaaaaggagaaaagaaggaagcacggggtaagaagtggtgtcgcctattggatagataataaaagttgaagtggaagagatttgcaaagagtgttcattgaatgtctcctctttggaattgctctgcaagaaaactgtcgtgggtgtccttttcagtgcagtatattactgggctgtgactaaaacctgacagcaggaaagaatgtacagaccaagcatgttgag

SEQ ID NO: 78225 - DNA, 1206 bp, Zea Mays
ccgccgaggaacgattcccttcgcacaatcgtactgttcccctcaaaccccagccagccatggcgatcgcggcggattctgccgccgatcaagacccaaaccctatacccaacgaggccgcgggcgaatccgtcgagctacccgcgtacactgaccacggggaacccaatgcggatcttgctgacgtggactacgaggatgaagaggagctggacggggtgacggcggaagcggcggcgagagacaaggtggaggcagtgttccagcggctgtcggaagcccccgttggcatccgcgtccacgacattatcatcaaaggcaacaccaagacccgcgacgcgctcatcgaggcggaggtcgtggggctcatccgctccgccgtcaccgtgcaggacctggtgcgcaccgccaacatcgccgccgtgcggctcaggctcctcgacgtgtttgactccgtccacgtcctcctggatgctggccctcccgagctgcctggcaccactaacgttataatccaagtcgtcgaggctgctaaccccatcgatggaagcgtcggctgcttctccaagccggaggcaaggtcatggacagttgaaggatcagtcagatggaggaacatatttggttatggtgacatctgggatgcttcgggagcatatgggtgggaccagtcatcagagataagcattggagtatccttaccaagatttagatcgataccaaccccctcgactgctcgggcatcactcttgtctcatgactggctgaaattttcatcatacaaggaacgtctgcttggcctatcctttggtttgctttcggacatgcaccatgatttatcttacaatctgacttggcgtaccttgactgatccttcacaagcggcatcaaaatccataacaagacagttaggacataaccttctttctgcattaagatatacatatacaatagatcaaagggattcccatctcaggccaaccaaaggatatgcatttgtctcaacttcccaagttagtggtctatggggcagcaaaggattgagattcttccgccagcatgggtacggactggaaccaagttatggcacaatatggcactttcctatccaaggatgatggcactcagtttcagaacactgcatttgctcctctgcctgatataccagcccagggctcaccagcagcacctctagtgaagaaggct

SEQ ID NO: 78226 - DNA, 811 bp, Zea Mays
gatgattgaggaacatgtaaagcactgcaattgcatagcgaatgttttttttccaccagcacgccgcgtatagcaatcgaccgtctcaacaatgagctactctcccaacaaagcagaacaaaccactatacagtacagtacaatttcggacgggttcgcttcttcttactttaaagccagccacggcggctgtaggcatctctcggctcacgcacagcaggagcagcagcggaaacaaacaagccttcgtgtccgtccaacagtctctcccaaccgataaccggcagcaaatcaggcgcacgatatggacgatgaagacgacgacgcggcgcacaacgccgacgcggcggccacctccgcacctctcgcgcacaggagctgagcgatggcctcgtaccccatggcctccgccatctggagcggcgtggcgccgcgcctggtccgggcgttggcgtcggcgcccatgtcgagcagcagctccacggcctccgcgtggcctccctcgacggcgaggtggagcggcctgtgcccttccacgtcctcgcactcgacgtccatgcatcccggcccggcgagcagcgcgatcgcgtcgccgtgtcccttgatcgcggccaggtgcagcgccgtgaggccgtactggtcgcgcccgcggacgccggcgcgcttgctgagcagggactcgaggctcccgaggtcgcctcgcctcgccgccgtcatcaccagctcccaccgttccaggacgtccaccacttcttggtatcccttgtcgcgcgcgacgtccagcggagtcctcccgcgcgcgtcgaccgcc

SEQ ID NO: 78227 - DNA, 1192 bp, Zea Mays
caaaactcaaaagaactcctgtgtcccgcgccaccgaacaaaatcttccttgttgcagcagatcaagcgcatcggcatctgctcagacctcatccatctccctccttaactttccctccaaaggaaaagcatctctcgcgcctaggccatcatcgtagccctcgactaaactaaactaaactaaaagcaagacagtgagcgccctttttcttccgttgctccatggccatggcttcccgaccgcctcttcatcgtcgacgtcgtcttcccctcgtcccactcctcgttctgctctgcctctctccgggatgcgctgccgggagagtcccggtttcggtctactacgaaacgctgtgcccgttctgctccgcgtttgtcgtgaacgacctctccaggatcttccgcgacgggatcttctccatcgctgacctgcggctcgtccctttcggcaatgggcgtgtctcggccgacggaaccgtcacttgccagcatggagaggacgagtgccaactcaacgctatagaagcttgcgtgatcagaatatggcctgacgcggagcagcattttcctttcattcaatgcgttgagcatttagcactgactcggaaatgggacgcctggcagtcttgctttcatgaaactggtctcgcttatcaacctgctattgactgctacaactcagggtatggaaggcagctcgtactccagtatgctgctgagacaaatgctctgcagcctcctcatcggtttgtaccttgggtggtcgtcaacggcaaaccgctcggtgatgattacatgaactttgaggcatacatctgcagcgcttatgacggcaagcttccaaaggcatgcaaggggaagcacctagcaattgctcaggagacgaaagccagccgaggagacaagaggaatgcacacgaggtggtcatcgcgcttgccatttgtatcgctgtatggctatgaagcaccttcccgtcaagatcaaatccagattttggaaagcagacagatcctggtgctagcccagtaaactcataacagatagtaaaacataggagtactaacacagaaacctgtaaatttcttcggcagcagagtggaggcaggcaagcatattgcttcggtctttatttcttcagctgtaaaagatcagtgactcattgaatcagataagcgttaagttcagtgcaga

SEQ ID NO: 78228 - DNA, 1271 bp, Zea Mays
ctttccacacataatgagcatacctacaagccatattcccatccacattcatcccccaacacccactcgtccacccaccgttttccttgtcttcactttcctcacgcaattcacccaccccctcaccatttcccccatcgaccattgctgccacataccaaacccacttcctgtggtcttcggtgtcttccccgccgccgccgctgccgtcgccgtcgtgcatcacactgtccctcttgctgtgatatctatgagagctcgatcgatcaagaacaccaacgaggctctagctccagatcgacaatgccgttcgcagcctcaaggacgtcacagcagcagcacagccgtgtggccaccaacgggagggccgtggcggtgtgcgcgggtcacgcgggcgtgcccgacgaggtggcgcggcaccacgagcacgctgtggcagcggggcaatgctgcgccgccatggtgcagtccatcgcagcgccggtggacgcggtgtggtcgctggtgcgtcgcttcgaccagccgcagcggtacaagcgcttcatcaggagctgccacctcgtggacggcgacggcgccgaggtggggtccgtgcgggagctcctgctcgtgtccgggctgcccgccgagagcagccgcgagcggcttgagatccgggacgacgagcggcgggtgatcagcttccgggtcctgggcggcgaccaccgcctggccaactaccgctccgtgaccaccgtgcacgaggcggcgccgtcgcaggacgggcgcccgctcaccatggtcgtcgagtcctacgtggtggacgtgccgccggggaacaccgtcgaggagacgcgcatcttcgtggacaccatcgttcggtgcaacctccagtccctcgagggcacggtcatcaggcagctggagatcgcggcaatgccgcacgacgacaaccagaactgattgccgtcgggccggccggctgcacaccgtcatcgcagttgggctgccggtttatttggacgaggcttcatcgaccatttatgatatattttctttcgtcgttggtactgtatactctcgcgaaaataagaagttggtactgtgaactgcttaaagtttgaggttgtttgtcttccctttcttaaactctgccaataatgaagtattgtaagttacagcatcaataatattaagaccagtaaagtagtatagttaatatatatatatatatgaatgtctgtgtctatcttttcatttatacttatatggaagggtaggacttgctgatt

SEQ ID NO: 78229 - DNA, 8552 bp, Zea Mays
tgtagctcgtgcaagattcgatccattgctgcaagaaacatggtgtcagtacagcaagatgtagtgcaaatactaccatgagtaaatcgtggaatttcatcaaatactaccatggtgtcatccatttgtcactagacaacaagagtagtgtgcgccacagtttcggttggattttcaccggcaacaaaactctttgacctgttcggcggcagccggcagccggcaccagcacaggcagcaccgcagcatagcctcacagtgctagatttttgggtgaatttcttgtggccaaatcgtggcgactcttttcagctcgagcggcaatcaggtactcagtaggcggtagctgttgttatttccatctgcggcgggatctggagcccatgtgcccggaaagcacggaagcgagaaagaaatcttcggacgaacgatcagaagcgaaacggaaggaaaccgatggccccaaaaggggcaccaaggtgccacagcaaccactagctcacgttcatgtaccgtaagcattttgcaagacgaatggtcacctttcttggatagacatggccctcggctggtgtactgcaattcggatttcggagacccacaaccgggccaccatagcattgactcgtgtgacgattctcctgctgatctgaaaaccttaggcgaggtggaattcaccggactggtgtactgcaattctgatctgaaagctggacacgtctacacacttcgcaatcacattgaggtggtggaggacctcggctggacatggccctcgtgggaggggtgccaggggggaaccgcctaaccgtaaacagcgtagggagtttgtgtggagttacggcgctccggacacagtgggcgaaaaaagagaacgtgctgaagcttgcagaggaagagagatggtgcgccgtgattggggtcatgatgatgataatgaggatttccaccgtgacagacgcagcggcaatcgtcgccatcgcagcctctctggttgggcgcgttcgtcgcgatgcagggggggattggatgactgctacagctccaatgacaggaacaggcactcaacaccctttcgccgccgtggtcttggtttgataccggcagcgcgctgggtgcccaaggggaaggtcagctcggtttcttttgcagaccccgttgttaccgctgtttggccgcaggaggagtgccatgggccacctgaagatgttggagacagtccggcttcgatggccactgacgttcaggttgcgctgcacggctctgctgcctccacacacaaggtaaacaatacggttgatcttgctaatgttttcactacaatccaaaaaagtttagacactgtgcctgtttgctccctcggcgttggcatgatcaatatgagttccactttactgaactctgccccagctgcccatccgattgagtgcccacataccaattgcttagacagtgtcctggagagtggcccctgcgctgttccggtccctgcttggccgggcaattgtttatctggccaacagactttgctttcagagttacatcttgtgaacgataatcgcgctattgacctcatcatgcctgctcccgatctgggtgggctgttaggtggctcagtcgcccacgatccagttgtcactgacaatcaggaagctgtgagaattctaccttccctcggatcagagaacctaccgacagacaacaccaaattgatagacttcatagccacaataaccaagacaccagagccacctttgatctcatccccgccgcaaccacacccgttaaaatctcagaagcaacccaccactagaagatcaagtgttaggttggctgctaagaaatgcattaggcctgggcgtaaccgggatgcaatatccaaggcccaggaaatcttacttgccaagcttaacaattcggctgttaaaaatgttgactgctctagttcttccaattgttctaactttgatgagtcttttgagcagatgacaagccttctcacaaagcctctctccaagaagcaaatggatgcaatcatggagctcttaaaccaagacaaggtgaagacagcgaagagtaaaaaaaaagggagaaaggtgatgccggccatcgaagatgtcgaggcgggggtcaactgagctgctttgtctgggccggttggtggtgcttttggtgaccaatgtgttctcagatggtcaggctctttcggagcggttgtatctccgctggcgttattacttctgggcgctggtcaaggtcccccagcttgcctgtgtacctctgttgttctttctggttgtcggttgtggccaggctgtgtttttgctcggcgagtccttgtttggaggtttcccctcctgttaggatttttcagcaggctctcctgctgatccatgtatggtggcagcatgctgtgttaagtggagtggcagtcttttccttatgaatcaaaattgtgctattttttcttggaatgttcgggggctaaacgaccatgcgaagagagcaagtgttagacatacaattatgtcctatggtgcttccatcgtttgcctacaagaaacaaagatctcgaattggtccaatgttttattaaaggaaaccgtaggcaacaagcttgctaatcaagtttttcacttgccttctctgggcacctcgggcggcatccttattgctgcggattcggatttctttgacatggctctcttgccatgttcagcagcatattctctatcagtcaggatcagctctagatcacaggaggaggtttgggacctcacgggggtttatgggcctcagctggacaatgaaaaaatgattttcctttctgaactccgtaacatccaagccatggtcagaccagaatgggtattactaggtgacttcaacatgatcaggagagcaagggagaaaaacaaaggatcaatcaacagaagagtcatgagacaatttaataacacgattgattacctacacctccttgagctagagctcaccgatagagcattcacctggtcaaatgaacaaattaacccaaccatgactaagattgacagattcttagcgacaacagagtggcacgatctattcccctcggctgatcttcgctccatgtgcaccatgacgtcggaccactgccctcttataatgcaaagccactctttgggttccccataccatgggttcagattcgaatctttttggcctcagattgaggggttcaaagaggttgtcaatcaagcttggaactctgctgtgaactctgatgatgccatccttcgacttcatgtaaagatgtctcgcacagccaaggctcttttggcctggaggcgcaacactgttggcaacttcaaagtgcagatggccatcattcagatcatcctcactctcctggaaaaagcgcaagagattagacagctatcctttgaagaaatggacttcaggaggtctcttaaaaccaagattcttgatatggcctccgcagagagggcacgagcaagacaacactccaggctcacttggatgcggttgggcgatgctaacactaagttctttcacatgacagccaataatagaagacggaaaaatttaatcagatcattaatgagtgatggcaatctgctaacgagtcaggaagacaaaatgaacgaggtccaacatcactttacccaggtgctaggcacgacaggtaggaggtgcagggctgtccgttgggaccatctggggtacacccctttcgagctatctgagttggacaacttgattgatgacagtgaaatcaagaatgttgtaatggggcttcaatcggaaaaggcccccgggccggacgggttcattgggctgttctacaaaagttgtttcgagttgatcaaaaatgacctctccatggcaataaatgattttttccatcacagatccaaaagcctgcttcgggtcaatgaagcaaacatcatcctcatacctaagggggaaaacgcggacagaattgatagatttaggccgatcagcctgatcaatagcttcatgaaaattataacaaaaatcatggcaaataggctagctccaagaatgaacgaaattatctccagtgctcagaacgctttcatccagaaccgttcaatccatgacaattttctatacgtgcaaagggtgattatgaatttgcataagaaaggtaaaccagctctcttcgtcaagctagacatctctaaagccttcgacaccctaaattgggcatatctcctggatgtgttaagagcctgtgggttctccctgaaatggcgcaattgggtagcagatattctgagatcttcatcctcaagaataattatcaacggacagcggtcgaacgctatcatacataggcgtggggtgagacaaggagacccgctttccccctttcttttcattttagcaatggacccgctacatcggatgattgagaaagctgctgatgtgggactgctgggacaggtgctgcctagaggggctaagcttcgctgctccctctacgcggatgatgcgggagtattcattaaagctgacaaatcagacttggaggtgctgaaagagatcctcaatgcattcgagggatgttcaggactaaagatcaactatgacaaaacagaaatttacccaattcggcacccggaatcatcatggccggtacttaaggaggtgtttccgggcaaatactctagccttcccgggaagtaccttgggcttccccttcattacaagaatgtgaagaggatcgatctacaaccccttattgaaaaaattaataacaggttagctggctggaaagggaagctgttgtccaaagctggaagagaaacacttgtaaaagcggtgctatccgcacagccaatctaccatctaacggtctttcgtcccaaaaaatggctgctgcaagcaattgacaaaatacgaagaaacttcctttggagaggtagcaatccactagcttgcagcgggggccactgcctcatcaattggtccactacatgtcttccaaagaacaaggggggtcttggaattcttgatcttgatcgttttgcgagggggctaagactaagatggttgtggctacgatggaagagcaaagacaggccgtggaccgccatgagactaccatgtgacaaaattgatgaagacctcttcaatgcctccacaactgttacggtaggcaatggaaagatagcgggattctggaattctagttggatccaaggccaagcccctagaaatattgcgccctcactgttcaagaaggcaaaaaggaagaacatcacggtcgccaaagcgctcactaacaacacttggattcgactgtgctacccattctcgggtgagggggagtttagagagttcttctccctttggcaggccattggtagcatgccagagctcaacgggtcagaggacaacatttcttggagatggacggcagatggtcagtacagtgctagcagtgcgtacaaaatacaattcgcttccaatttcagcagaatgaatctctgccacatttggaaggctaaagtggaaccgaagtgccgtttttttgcttggacgttactgcataagagaattctgactgctgataaccttcaaaaaagaggctggccttgtaacccaatctgctgtctttgcaactcagccccggaaacaattctgcacttatgcaaggattgcccctttagtagagaggtatggaccaaagttttgtctcgggccaatcttcatttcctgactgggttccctagtggctcttccttgtacgattggtggacagatctgcgtagtctttgcagcagtcagataaggagggacttcgacggcctgctaattcaattctggtggaatctatggctagaaagaaatttcagaatctttcaaggacagcataggggtgttgaccaagttgctatggctactttgggcattgctagtagctgaggtcttgttaggagtcttcctagtggcttttttttgtttttgtttttttccttgttccttttttcttcttctcgttggttcttcgagtcgagtctgttgttcctctttgtttttcttcctcatataatataaaacggagcggcaagccttttgccccttcctttcaaaaaaaaagatcaggctgagaaaaataaaccgcagaattttcaggtacttacctggagataccaattcccagaaaagtccatagaaatgtgtcccttcggtaatggagagtgtggtcctgtcagtctatacgccggtcgcatgattctcaatggtgtagctattttcacgctgcacaataacagctcaaattcacctgtatatgaacatcgtacttcaactgctgctttttgcatatccttttgtttcttctgctacctttgtccatatgctagcaaaatggtccgagtatgtggcctgaacacagcaacaggaaaaattatccaaattagtagcttccatcattccatggttagatttgactaatttagcatgcatcgttgatgccatttgtttaggtgggcgttttgcacccaaaaatgagatacaagatagcaaaggtactgtctctgaacagtacactgtgcactcctatattactgaactttttcataaattgcaactaagctgtctgatgtccactttcagaaattttgtttgttctcaatcaaaagggtttgcaaaactgaaatggtcataatgcacaacgtttgacgtaaaaataacggcaactcatttgattggtaatgattgtgttcaggagttcgattagaaccaagatgttgtttaccatgtgcagatgaacactagatccaagcaattcaaatggtccgacaagtcttaactccgctgcttttccagcatatcagccaagcagagactgcattggaaggtttcaagttctgctgcctggctgttcccctcaacacacatggacacacacaagcatgcaatacatgcaataacacaaaatctgcatatcttatctttttcaggaacaatggaaggttgctatgccttttataaagagctaaagatgcatgacagacctagcatttagcactcatgttattccttttgttcaaaaagcaggcaaatactactgttaaaagacacggaatttcaaagatagatctaaagtaatcgataaagtagattggtcattgaaccggttacctttttttaagaattataaatttactgcaaactgaaaaaacaacccaaaacataaaccatgtaagttgagagcttctacctgatcggatacaaagcctttcagcatctccaacaaatcctggcgtctttccttgttaaatcttttaatttcattcatgttgttttcctgcattagtcgtgttttttaagatggtgccctcggttttgctggtgtccttatttttatccttagtcgtgttttttctcagttttgtccttccagtgctatagaacagaaagacaaaaccgagcaaaaaacacgactaagggtaaaaatgaggacaccagcaaaaccgagggcacagcttaaatcttgtcaacaggatagcataacctagcatttgagttgcagcaggttgtgtttgaaaatgttaaggtcaatacataaacagaaaattcattgacaatgcatctattataaaattcttgatactttcaccacagctcaaacatcacaatagtcagaaacagacaatctggactcttggttgcttagcaacatgtcagctgctatcctgctcatccagcttctgcgagcttaacttggaataatgttaactggacatggtcaaaagaagtgttggctgatgagaattctgtagcacaaacaactataacaaatagctttaacctgactgcttcagcggattatccaaatatataatactccctccgtctcaaaatatagttctttttagtcctcttttttctcatccatattcgaataaatgataatgaatataaacatacaaacaaactatattcataggttattgcattaatgtatgtttagtctaaaacgaattctattttgggacagatggactattagctagtgttaggcgtcatgttacaaaatctaaacattatatcccgaacgtactgcaaactgaataatctagacatgttttttgtatccatattattggtccttccaaatagagaattatgcttgtgggtctgttttgagtaataacaatattgcagtttttaattgtaacacatgatgtacactttctttgtttcataagtttgaatgaactaccgtgattagtcccaattcttcaagtacatgtgtttttgcatcttccatggctctcactgtttctttcaattcttctatttttgataccttgatctctcctgatccattcctctcgatgatacagattcaagttttcctgcccgagtatgcaagaaatatagatctgctgacaaattttgcacatgcagcaaagcattggaacgatcagtaaaagcattatgaacagaagccattgtctccatgagtccatgtactcatggataatgccttgcaaaagcacagaacatat

SEQ ID NO: 78230 - DNA, 2935 bp, Zea Mays
ggacgacagagatacaaaatcatgttgatcaatgtatcaaaaagcgcgttcgatctataatcatatatgtaccgttctataatttttttttgaggagtgctcacaatccagatcgatggatcgtcttgactataaatcctaggtttcgatagaggctgctgatctgctatcaacgtgcagcgcagttggcggccggggaatccagataagcaatcgccgcgtgcaaaccttaaacgcggcgcgaggccatgactgggtcggtcgtcacttgcctgccatgctacatgcctgcctactacatatcataaatagtatagtacacgcgacgtcgggcaggcgatgcgcgtgagcaacactgacagatcgacccaccgcgagcggtgcgccgtctccacgtgcacgcggcagctccaaatagctgtactggacaaatggagagggtgctgccatgcgcccatcccatgacagtgaggaggaactggaagctgccacgaagcttcgtgcgggctcggactcggaggcgcatccaaccgccaccgtacggccaccgaccgccccgccgtcttcgtcagaatatcagataggagtacctgctacagtatacagatcaaatccatctctgcaacaatcaaatatcaaatcggaggcgtccgtgtgttggctggactcctgtacagtacactacgcagtacggtgctatagcctatactacttgtgctcacagtggagttttgacccgtctctgcccctcgagggctaatttggaagaaagaggaggcacatacggagaggtatttctggaggtatttctcacactgaaaaagaagaagggatctcaaaaggatttaagtttctaaactagcaactagctagtggcctttggcctatggtcaaaaatggtgtgatagattcggagtgtatatctctactgtatttagaccttatttgaatactctcgtattcaccttcaattcatatacattgaaatagtttcaggtataaattagtttaagttttactctaatctatctcaatacatgtggattgaggtgaatactcgtgtctaaacaagagcttaagtaagagtttctcccttcgtgcgtcatctccggtgctggtgttcgaaccgtcccgcccctcccacgcctagattgtaatcatttgggctcacaaccatttgtgtgcaacaaagaataaatattataaatattctgaatatagaaatcgtagtaacatatgggcaactgactaataaaaattatggtatattatctatttgctccatacaaataaagacagaattcttaacttgtcattttttgttaaagtagatttaatatgttaaatatataaatatatatcataatcagtctaataatatctatttatattgtgtgttgaaatatttattaaacttgagatacttgtaagggcctgtttgggaggggtttgggagggcttcacttcatgaatttactacttgtagcttttaaaaaaatgaaactagagggtagtttcaagatttttttgcagcttctcaaatggtgcattaaaaacattgttttcatacatcctcatgaagctacacaaaattacccaccaccccattggttacacgatctacttatccatgtctctctccccaactcatcatagtccactaatcatcaaaggtaattattgaaactcacacaaattaattatattatagaagctggagtccatgtgcaagctaaaaactcttgaaatccaccttaacaatatattgaagctgttttatggtgaagttgaaaaacagaagttgcaatttttgaagtgaagtcgtcccaaacaaggcatacagaaagcaatattttcattactttgggtagcaaaaaaaataagatacaataggccattctcagcgatagtttggtttcaccatttctaatgttaccatatcaacaagagtaagatgaaatgaagaatgaaatatgttctttcaatgaagagttttatgacaattttataggctaacacgtgacataaatgttgcatctaaataatcaatagaaatagataaaataaatcactcttagtagtggtttcgtacgctttccaatgtcttggaaacatgttggcatagtttcatagtgatgaaactaatttcacctattttatattaaatgtagtcccatgccataaaaatcctacgcatgcgacatattaattaatgccataaaaattttaagggctggtttgataaaaggggattgagaggattaagggacaaatcaattcatccctctccccccacaattctctacaattctcctcgattactttgtcaccaaactagccctaataaaacttctactgagaatggccttatgcatagttgttcccattttccgctggagcgataaagttgtttccagcagctatcttatcacgttcactatctcatcctctatttcaaattttattatatagataatgtaatatatagttatagacatctgctgcggatagcctccatttgatcatttgatacgtctggcacttcggtagcgcacggtgcccggatctctggttctgtcacatcacatctgtttttactgttgggcttttggatgtctttttcagtggtccaaagtgtgaggtagcatctttaggttcatgtgggatggttgatgagagtcgggaactggattcgtgaggcagcggcacagggccacagaagcccgtatggcggtgccttggttgcacgagcgtgacagcctgatggatccctgcgctgtatttgaaggaacaggtagaacctgtgcacgaggtgatagatgcccgttcgttaggagcttgtccttcttgttttcaggcttttgagcatagatatagcgacctgatgattctaacacaaaacaaatatctctgcgatggattcttcccacattcc

SEQ ID NO: 78231 - DNA, 2247 bp, Zea Mays
cagctccggttccctcctccccctcctctcccacctcatcgtcttcctccaccgtgccggccagcccagacgtacacgacggatacgacgtaacagccttctccccactcccccgaccggtctcgtcgcagcggagcaccgcggggttgattccgtacgctcgccgatgaccacctcgtcctccgggagcatcgaagcaccggcgaactcgaggcccggctcgttcgcgttcgcgagcacgagcacgagcacgagcacgagcttcacggacatgctgggaggatccacggacgcggccggtggggcgtcgaggtacaaggccatgaccccgccgtccctgcccctgtcgccgtcgtccttcttcagtaacaaccccggcggcctcaaccccgccgacttcctcgactcgccggccctcttcagctccagtatcttcacctcgccgacgacgaacgcattcgcctcgcagcagttcagctggttggcgacgtcgggcgcggagcaaagcggcaaggacgagaggaggccgtcgtcgtacccggacttctcgttccagacagcgccgacgaccgaagaggccgtgcggacgacgacaaccttccagccaccgattccagcggcctcactgggtgaagaggcgtatagaagtcagcagcagcagccatgggcctaccagcagcagcaacctggcatggacgccggatccagtcagcaggctgctccctacggcgagccgttccaggctgcctcgtcggacgccgccacgatggcgccgcacgtgccggcgagcggcgggtacagccaccaagcgcagcagtcgcaaaggcagtcgtcggacgacgggtacaactggcgcaagtacgggcagaagcagatgaaggggagcgagaacccgcgcagctactacaagtgcacattcccgggctgccccaccaagaagaaggtggagcggtctctggacggccagatcaccgagatcgtgtacaggggcacgcacaaccacgccaagccgcagaacacgcgcaggaactcgagcgcggccgcgcagctgctgcaaagcggcggcggcgacgcgtccgagcactcgttcggcgggatgctgggcacgcccgtcgcgacgcccgagaactcctccgcgtcgttcggggacgaggaggccggcgtgggctcgccgcgggcaggcgggaacgccggtggcgacgaggacgagccggattccaagagatggaggaaagacggtgacggcgtcggcgagggtatctccatggccgccaaccggacggtgcgtgagccgagggtcgtggtccaaaccatgagcgacatcgacatcctcgatgacggctaccggtggaggaagtacgggcagaaggtggtgaagggaaatccaaacccaaggagctactacaagtgcacgacgcccgggtgcccggtgcgcaagcacgtggagcgcgcgtgccacgacctgcgcgccgtgatcaccacgtacgagggcaagcacaaccacgacgtgcccgccgcgcggggcagcgccgcgctctaccggcccgcgccgccgccgggggacaacgccggccactacctcggcggcgcggctggcgcggcgcagacgggcatggcctaccagctggcggggcagcagtacgggttcggcgggcagttgggctcgttcggcctcagcggcggcgcgccggctcagagcagcggccccagcgggagcctcgcgttatcctccggcttcgacaacccgatgccgatgggttctttgtacatgagccagagccagcagcaggggcagcacgacgccatgcacgcgccgagagccaaggaggagccccgagaggaggacatgtttttccagcagtccatggtgtacactgactgaggactgaggacattgcagaacatggcaaggcatatgacgtgatgtccatagactgtttcttttacttttgcataggagggtggttgttgtaccgtatctgggcagggttggacagatttatttatttgtttggaggcctccatgttggcagcgatgcctgccgcaagggtgtctcccttgatacgtggacgagaaagcatggatataggacactagagtctaggacacatagcaatacatattggacaaaaagggtaagaagttttgttcctcgatttatccatctctggtacatatgcttgtctgtaactaaccataaattaatgtgacctcacggttctcattttcttgtgagaagacatgat

SEQ ID NO: 78232 - DNA, 1709 bp, Zea Mays
aagaatggtatgtgccgtccaaacgagcgagcacacatatcctttgtggtcgccgtcgctctcctccacatgacttgcttatgccagtatgctgactgtagcctgtaccggagctaccccagcataccacgctgtgattttgctgacaacttcttcttcatcccaggcatcgctgcaccagtctttgctggagtttacacagcgcacagtcttctcagcagaggcaacgaggctccgtctgatgaaggaaccaatgaatcagatacggttcaagaagagacaaagccacctgaaacagggaactgtgaaaagaggaaggtacgggtgcagctatataagctccaggaagcagagagccaggcatctctacttgaaagctgcttgaagagtttgtgcacagtgggtctcctactcggctattcagttctcctgctctactctccggaaaccatggctgttgtggagctgaaggttggaatgcactgtgagaggtgcatcaaggccatcaagaaggcaatcaaaactattgacgacatggagagctatcgccttgagacggagataaacaaggtcacggtgacggggagcgttaccccagaggaagtcgtcaaggctctccacaagatcgggaagacggcgacatgctggacccaagactgaggagggcctggttgattcggacgtccctgagaatgagattttgttggctgtgggttggattggatggagctggagcctgcctgggcaggcaactttttcagaccatcagatgtataggaataaccacggacagatgctgtgacttgtactatatgtgaggtaaccactgctgttattcactgtcgcccggccgatgccactcgcgatcatatacacagagacagagtctttattttcatgcagatcctacctaccactaccagcttgttcaatcatgctccacgcacgcgcgatgttcgagaccgtgtctaccaggttgcctgatagcctttccttgaccatttcttctctgaaggcgttgattcagctgtgcgataaatctcggctgacctgcctccattggcccgacatctgctacagctacagtacgtgagaccagacgcgtcagctcaagtacgtgccgcgtgatgaacgaacagctccgaagctccggtctccggactcttccacccgtctcgtatttcgtctagctagcagcactagcaggctagcagccattaataaggagttggagtttcgtgtcgcggtgttttatctgaggagctgtgggataagcacgtgtggcacgggcagagcggtgcaagtgcaatcgggatcaggagcagaggtcggcaggtcgctccgcttgcgcgaaaagaagcatggcggtgtgcgcatgggcaaaaggcagaatggctggagataggtgtcgatccgtcatcgtccatgatgaggactgcttctcgcttgcgagtttcgttgcgtgcggacgaattgaccagacgccgttcgtcctctccagtcgagtctgtgtttgtcctgtccgcgggttggaagagtgtcaacaactctacaccacgcgaggatggcgccagcccgactacagaaaacctgatgggaggaaagccgacgttggaagcggaagctgatggagctgtgaagcggagaaggagcaacagagttaagaagccgaactccaaatatattggtgccaactggctgtaacacag

SEQ ID NO: 78233 - DNA, 1713 bp, Zea Mays
aagaatggtatgtgccgtccaaacgagcgagcacacatatcctttgtggtcgccgtcgctctcctccacatgacttgcttatgccagtatgctgactgtagcctgtaccggagctaccccagcataccacgctgtgattttgctgacaacttcttcttcatcccaggcatcgctgcaccagtctttgctggagtttacacagcgcacagtcttctcagcagaggcaacgaggctccgtctgatgaaggaaccaatgaatcagatacggttcaagaagagacaaagccacctgaaacagggaactgtgaaaagaggaaggtacgggtgcagctatataagctccaggaagcagagagccaggcatctctacttgaaagctgcttgaagagtttgtgcacagtgggtctcctactcggctattcagttctcctgctctactctccggaaaccatggctctaggttgtggagctgaaggttggaatgcactgtgagaggtgcatcaaggccatcaagaaggcaatcaaaactattgacgacatggagagctatcgccttgagacggagataaacaaggtcacggtgacggggagcgttaccccagaggaagtcgtcaaggctctccacaagatcgggaagacggcgacatgctggacccaagactgaggagggcctggttgattcggacgtccctgagaatgagattttgttggctgtgggttggattggatggagctggagcctgcctgggcaggcaactttttcagaccatcagatgtataggaataaccacggacagatgctgtgacttgtactatatgtgaggtaaccactgctgttattcactgtcgcccggccgatgccactcgcgatcatatacacagagacagagtctttattttcatgcagatcctacctaccactaccagcttgttcaatcatgctccacgcacgcgcgatgttcgagaccgtgtctaccaggttgcctgatagcctttccttgaccatttcttctctgaaggcgttgattcagctgtgcgataaatctcggctgacctgcctccattggcccgacatctgctacagctacagtacgtgagaccagacgcgtcagctcaagtacgtgccgcgtgatgaacgaacagctccgaagctccggtctccggactcttccacccgtctcgtatttcgtctagctagcagcactagcaggctagcagccattaataaggagttggagtttcgtgtcgcggtgttttatctgaggagctgtgggataagcacgtgtggcacgggcagagcggtgcaagtgcaatcgggatcaggagcagaggtcggcaggtcgctccgcttgcgcgaaaagaagcatggcggtgtgcgcatgggcaaaaggcagaatggctggagataggtgtcgatccgtcatcgtccatgatgaggactgcttctcgcttgcgagtttcgttgcgtgcggacgaattgaccagacgccgttcgtcctctccagtcgagtctgtgtttgtcctgtccgcgggttggaagagtgtcaacaactctacaccacgcgaggatggcgccagcccgactacagaaaacctgatgggaggaaagccgacgttggaagcggaagctgatggagctgtgaagcggagaaggagcaacagagttaagaagccgaactccaaatatattggtgccaactggctgtaacacag

SEQ ID NO: 78234 - DNA, 2486 bp, Zea Mays
ggcgactagccgattgacatccatccatctctagccgggcggtcactcagagtctcagacacgcacaaccagtacaagtctacctgaagtgaccccgtcgacctgaagtccactactagactcagtgtacgcagcaggcagcagcagctagtgccaccgcttgcctagttgcctgcctaccctgcatgcatgcacgctcttctctttctgtagcctgtatgtatgcactgtatgtatggtcgcagtctcgccgatctatcaaacttggccagcgatcaggtgtagtccggtctgtctgcgggagccgcgctgagatctgacgtggctacagtggcgtcccagcctgagaatagaggggcctttaacaagacaccgagggcgcgcagccagcgggagggtgctgctcaggcccatcccatggagtggtccatgtccagggggaggcggagatggaggcggtgtggcagatccatgctaaagctggcggggctgtgcctcgccgtcgccgtctgcctctgcctctgcctctacctctgcggcgttcggccttgggcctgcagtggctgtactgtgctgctccgttcaggtaaacgaacgaaagatgtcctcactactatgcagatgcttgcttgccgcgtttcggcaactctttcgtgtgcttctctctctggtgacctgctctgcatagtcattggtgtgagtgacgcctttctcgtccacggttcatgtttgccaaggttcattcacgtactagttgcttcgtcatgctgtgttctttgttctttatacatgcgcgcagctgcctgcactcgtcttcgtctagcaccggattggtcttcgcttcactgcatttactagttgtaacttcattgtcctctttttttttctttcttgcttgatttgctcttcagagtcctggagacgaggacgggcggcagcaccttgcggcaatcaggtgcgaatccatctccccgatctcagctactactacctatattctccactgcgcgacgatggcgatgggacagcgcagagatcaaaccgacttgtgattagctggttgtcctgttcataatactaatcttctgctccgggatccaccgcattcatgacgatgcgccatcaaatctaattaaacccacgtaacagagagcgacagaggaaacgccaaacgcacccggctccgccatggctgctgctgcacgcacgcacgcactgcagccagctcccggccagtagcgctcgatcatgcattcacaggcacaggcacggccatgccagctgctcgcagccccgtccgtccgacagcccttcgccgccgggtcccatggccttttgaccatacgtcactgctgtgtccatcggtcgatgcattggcaatgcaacaccaccgtacgtacccacgatagcgaccttaccgccggccgaatggtacgtacgttccacgagtgcgcgacgcgacgcgacgtaccctcagcccccagcattcagaactcatgatatggttcgttattcttcttgctactcgcgctgcaggggtgctacacgggtgggcaatggcggcggctgctggcggatggtccggggtcatacccgccacggtgcacgtccaagtgcggcgactgcagcccctgctacccggtgcacgtggccgtgccgccgggcgtgcccgtcactaccgagtactacccggaggcgtggaggtgcaagtgcggcaaccgcctctacatgccatgagcgcagtccgagcaagcaggcaggcagccagccagccagccagcgaaggatcgagagcgccggccgaggcgcgctgggcctacgctccattattgcaccgggcggggtggctctcgcggtctcgcctgcgctgcgctgcgcgcgcgcgcgcggtgtcgtggtcctctcgccgcgcgcatgggcgggatctgcgctctgcagcggcgcgtgctggccgtggccagtggcggcctaccactctgaccggctgccggctgggtccgctgcctggggatgctgagactgtgcatggctttttccgtgccgcgcgctggaattcgcacggccctaccacgagcgcgtggaggcttggagcggagcggaggcatggcgggcgtacggcgcgtcagcgcgtgctggatcgatgaaggatgagagctgagaggagctgtcgcggcccactcctacacgtgtccgtataatctgttcaatcttccaagtgttgatactcgatcttttcgcatctgagaatcttgttacacaattttctggtaaccaaatatactgttggatactagtactatatttcgtgatagtacggaacacttcaaatcctattgccctaccgtgttagaattgatctccaccggttagcccaatgacaaactaggtctttgacctcacggcttgatcgatagagtccagcacaaggtgaggttggtgggccttgttgcgaagcttataaataaagaggtgggagttgacggctc

SEQ ID NO: 78235 - DNA, 2265 bp, Zea Mays
cacaattggcgactagccgattgacatccatccatctctagccgggcggtcactcagagtctcagacacgcacaaccagtacaagtctacctgaagtgaccccgtcgacctgaagtccactactagactcagtgtacgcagcaggcagcagcagctagtgccaccgcttgcctagttgcctgcctaccctgcatgcatgcacgctcttctctttctgtagcctgtatgtatgcactgtatgtatggtcgcagtctcgccgatctatcaaacttggccagcgatcaggtgtagtccggtctgtctgcgggagccgcgctgagatctgacgtggctacagtggcgtcccagcctgagaatagaggggcctttaacaagacaccgagggcgcgcagccagcgggagtacacgcccctccccttcctcgtgcttcctaaacttgttggctgcctgcagcttgcttgcttgcttgctgcggcttcaatcagggtcttgaaataggggtgctgctcaggcccatcccatggagtggtccatgtccagggggaggcggagatggaggcggtgtggcagatccatgctaaagctggcggggctgtgcctcgccgtcgccgtctgcctctgcctctgcctctacctctgcggcgttcggccttgggcctgcagtggctgtactgtgctgctccgttcagagtcctggagacgaggacgggcggcagcaccttgcggcaatcaggtgcgaatccatctccccgatctcagctactactacctatattctccactgcgcgacgatggcgatgggacagcgcagagatcaaaccgacttgtgattagctggttgtcctgttcataatactaatcttctgctccgggatccaccgcattcatgacgatgcgccatcaaatctaattaaacccacgtaacagagagcgacagaggaaacgccaaacgcacccggctccgccatggctgctgctgcacgcacgcacgcactgcagccagctcccggccagtagcgctcgatcatgcattcacaggcacaggcacggccatgccagctgctcgcagccccgtccgtccgacagcccttcgccgccgggtcccatggccttttgaccatacgtcactgctgtgtccatcggtcgatgcattggcaatgcaacaccaccgtacgtacccacgatagcgaccttaccgccggccgaatggtacgtacgttccacgagtgcgcgacgcgacgcgacgtaccctcagcccccagcattcagaactcatgatatggttcgttattcttcttgctactcgcgctgcaggggtgctacacgggtgggcaatggcggcggctgctggcggatggtccggggtcatacccgccacggtgcacgtccaagtgcggcgactgcagcccctgctacccggtgcacgtggccgtgccgccgggcgtgcccgtcactaccgagtactacccggaggcgtggaggtgcaagtgcggcaaccgcctctacatgccatgagcgcagtccgagcaagcaggcaggcagccagccagccagccagcgaaggatcgagagcgccggccgaggcgcgctgggcctacgctccattattgcaccgggcggggtggctctcgcggtctcgcctgcgctgcgctgcgcgcgcgcgcgcggtgtcgtggtcctctcgccgcgcgcatgggcgggatctgcgctctgcagcggcgcgtgctggccgtggccagtggcggcctaccactctgaccggctgccggctgggtccgctgcctggggatgctgagactgtgcatggctttttccgtgccgcgcgctggaattcgcacggccctaccacgagcgcgtggaggcttggagcggagcggaggcatggcgggcgtacggcgcgtcagcgcgtgctggatcgatgaaggatgagagctgagaggagctgtcgcggcccactcctacacgtgtccgtataatctgttcaatcttccaagtgttgatactcgatcttttcgcatctgagaatcttgttacacaattttctggtaaccaaatatactgttggatactagtactatatttcgtgatagtacggaacacttcaaatcctattgccctaccgtgttagaattgatctccaccggttagcccaatgacaaactaggtctttgacctcacggcttgatcgatagagtccagcacaaggtgaggttggtgggccttgttgcgaagcttataaataaagaggtgggagttgacggctc

SEQ ID NO: 78236 - DNA, 1577 bp, Zea Mays
atgacggcgacgtccaaggctccgcggcggccccgcatccgcccccgcggcccgccgccggcgccgacgccgatccgcacggcgcgcggcgcgcgcaccgcggccgccgacgagcgcgtcctcgccgagttcctcgaggcctccctccgcgtgccggacctctccctgcccccacggaagcgcttcagcttcccaccgccgccggcgccggaaccggacgggatcccttctcacgccctcgtttcgggcgacgcggacgcggagcagcgggcgattgccgcggcagcggagaccggcgcgttccgcgtgaccagcgcggtcgacgctcgcgaggcgcgcgacgccgtggaggcggcgtcggagctcgtgttcgcggcgccggaggaggtgaagcgcggcctggagagatggtaccgaaggagagatcgggagccccgggaggagttcgtctggttccggccgatgagcgccgacgaggacagagcgatggccgcggccttcccaggctccacgtaccgtgcgttcagggagaaggtggacaccttggcgtccaaaatggaggatatagcaaaagctgtcatcagggttctacacgataacgtcaaaaaccctaaagcctctgccgagcccagagaagccgccccgtcaatcctgcgcctggcactgtacagcagtgacacgtcgagtacgtgctggaacgagcttgacagcaccactgctcctaactcgcacgctttgagcgtccacctctgcggacaagaccggcggatctgtctgcggcggagtctggggggctcgaccgtctccactctacctgcgggctgcatgcttgtcacagtcggcaagcagattcaggaatggtccaacgggcagttcaaggccgctgttggaggagaggtagtactgttcgagacgaccgacgaaccaggccccttcgtctccgcggaactcatcgtgtactgttactgtccacacgacctgcgtctctctgaggctggccggtacgccagccgccgcgttgaccgtgccacgatcgtttcctttagggaccagatactggtcgctctggttttgctgtctttgttctacctcttccggggctgatccgggtggatcgatccgtttggactggattgtcgattccttttgcgacgtccgagatggctagattttacagccttgtcggacctgtgacgactgcctgcccttctctgttggctggctacggagatgatgggggaaaacaccgcgtggattgcggtggcatgcaacaggtggttcgagtgtttgtggtgatttgcatggcttttcttttcttggagggataggtcataggtccggtacatactgctgttagtttgtgatagttgaggggaaatgggacatgctatgtggggttggttgattttttttttcccgattgagagagttgacgacgctgcgattgaagtgtttactgtgatagtggtttctcttctcttttttttgtaagtacattgctgaatcatgtatgtaataattgtatgtgtgttggtctttgttggctgtgtggcaaggatatactagggaaattgctt

SEQ ID NO: 78237 - DNA, 1333 bp, Zea Mays
cttactcccgtctcgtcgtcactcggcggttcagcccgcaggccacagaggcggacctgacctggccctggccaccaccgaacgagcgactcttcgagcagacgcatcggcagacgagcagacgcatcgccgcagcaagcttcgagcgccaggcatgacgctggacaccccggccgccgtggtcctggagctgatgaccatggggcagcagtccgcggcgcacctcggggacctgctccgggccgcgtcccctgctgcagcgtctccgcaccaggagctcgcggccgagatcctccgctgctgcggccgcgtcatcgacgcgctcagggccgccgccgccgccagcgggcacaagaggaaggcggcggcggagtaccaggacgcagcagcagggggaggcgcctcgcctcctcctcctcctcctcctccggggccgccactaaagagaagggcgcgcggcggagaggcgaccagggaagtgaccagcggcacgacggtggacggcttcatctggaggaagtacgggcagaaggacatcaacggccacaagcacccgaggctctactaccgctgcgcgcacaaggaccaggggtgcgacgcgacccggcgggtgcagcggacgcgggagcagcccgcggcgtacgagatcgcctactacggggaccacacgtgcaggggcgcggccaccgcctggcagcagggagcgccggcgcccgccgtcgtcgacttcggctccaactcctggggatccgcggacaccaccagcggaggctcgccggcctcggtgccgctgggagggtggtggtccccgtcggcgtcgtccgaggtcgggttcgaggcgcatgcggccgcgcacgagtggcgcgacacggctgcggctgctcctgatccggtaatggagttcctggacggcgccttcggctgggaatccgtcctcgaggaccgctttgacttgggcggtctacatggcatcgctacgtttcagtagattgttagcagagcagcagtagatctggacatgtgttgtcgccatcgctgtagtacgtgagaacagttaggccgaccgtgcagttaatgagtgacaacccccgaccccgacctaggagggtctcaacaagatgccgtagatcacactagtaatagtattactatcatgtttcaggcagatgccagagggatcagaacaaaacaaaggtatcgcgttctaaaaatgaggaatgtgttttttattttttggaagaaaaaaaaaacttcagtactttcttccccattagaaaatggagcggagcaaaggaacaaggtgacgtactttcttccctattatgtactttag

SEQ ID NO: 78238 - DNA, 1792 bp, Zea Mays
gtcatgtgcgggcgcacatataggcgccgccgtgacgcacgccgcgctgcagagcgcgctgaacgcgcacaggaggaggccacaaccagtggatagatttagaaataaagataaggctagagaataagattgagatgagagaattgtggagagttagttggcagcagataagtccaagaaaataggagttagttgagagtttataggagaagttggttagccatagggctatttataagccacatggcagcagggaataaagcaaggaagattattatttcctaatctctctctctaaaacaagccgacggttgaggggaaaaacctcaccggcgacgacggaccgtggctacgaactccgtagtcaggggccagctaccctaggtcgggaggtccttgacatggactctctccacctccttcagtctttcagtcacaaactccatagactcaaacatacagtcccaattcccttgcactgctcgatctctcatccctggcttccagtagaaaccgggtctgcacggatggttttgcagagggagccgttgcgtcttctcttcaacgatcgccggctccgatggctttgataccagatgtgatgaccccctggccgtgggaaggggatttccactacagcgtgagatttccagcgacggtgaggtcactgcagcgatgagccgagacgtcaccaggggacgaagccaggcgatggtgtggaacaagaagcccagggacgcaagcgaggcagcgaaggagatttcccggcgaggaagaagacggctccttgccagcaagcaaacgtcaaaacagtcaggcgcgcgtcggtgtccgcgaggaggatgataagggagctaggcgggtgggcgctggggcatgcgagtcgtatgtgttgtgcttaccagtagacaaagccggcaaggcgatgaacccgtgactggatcggcaggatctggacgggcggcggactcgccggggcctctctctcctctgggatctggaagggcacctgattttgacagccccaacctcggtggaatgtgccccctccgcctgcacgtcgacggggaaagagatcagttggtgtggcttggtgctgcgcaaatcgagaacgtttcgtgtggcaaagttccagttatttcgtctgtggtggttacatctgatcacgggctcagagcatctccagaagaacccttaaaccaacctgaaaatcgatattaggaaaaaatcctttttttctgatccaacagacgcctcttcttcaccccaaaatattggcgacccgcatcgagctcctcccttgccttatattttcgcgtgcacctttcttccccaatctgggcacccgcgcgcgttttttcctgctgcgtacgttgttttggtggcggaggtaggaagcggtggtggcagagggagagattcggctacgttggagcctggaggtggagggcatgtcggtggctgagatgtattcctgccgctacaaatctgtcagcctaatcacgctgtcactgccaggccttgcgggaggtggtctgcatcggcgacagccttccgcagtggcgcagcagtggaggcccttgcgacatactatccaagttgccagatttgagtctgatccagttgcatcctcctatggaggcagtgatggtcgtcatgttttgttcgatcttccagcaaacagtatgctagttgaaccgtactttcaagaaatgtacttgcagttcatgtaatctgacattctttgatttttttcctttttatcctgtcgacattctgtcatttgagtttg

SEQ ID NO: 78239 - DNA, 3108 bp, Zea Mays
atcaaactaaggatgataagctgtggtaagagctaatttggtgttgagtgaggaaaagagagccttccaaaaattgctagtgaacatcttatctaccagagacctgggtgtaccatgcaacttcacaatattgtccaaaaacacttgagccactttggttgcagtaaagggatgtttgagtggaaaaaatgtgcatacttagaaattctgtccaccacaactagaatagagttatacccttcttatttgggtaatccttcaataaaatccattgttagatcttgacatgcaccttgagggattggcaagggatgaagaagagctggggtgtgaatcctctctaccttagcctgctgacacactgcacattgcttaataaagcacactacatcagccttcatgcctttccaccgaaacaaccttctcactctgtgataggtggcatgtcccccagaatgccccccccccacaatactattatgtaaggcatcaatgattttagtcctcaaggtagaattgttaggcacccatatcttgtggcccagtcacattgcattggactaaactgcctaagccactcatagcccaaaatgacatcaaatgcactcaagggtaggactctcacatcagtacaaaatgaaaaaccctgagagcaccattccactcctcttaccattctatcacacaccatagtttcaccattagccaccttcaccttaactggagaacagaccacctctactaaccccaactgatgcaccatgtgagcactgatgaaatttgatgaacttcctgagtcaatcaacatcactaaagtctgtttgctcacagttgcatttaacaccatgttgttctcattatccttaccaaccatagcttgcaaggacactttgcaacatatctcttccttctcatcctcctgctccaattgtcgtagaacttcatcagttaacactgtggaatcttcttcagtaactaccacatttagttgcgttgtcccctcttggtacatttagcaagatgaccaggtttgaacttatctccacaagcatagcacaacccatttagttttctaaactccctcatttgtctttctttggataaatcagcacctcctgtttgagcccttccttcacctctaactccagtattcaacattctgcctcccacatatggccttgttaccttcatcttacccctctctagcacctcttgttgggtttgggccaatagaatggctctatccactgttgaaggcagttgtacctctaccacactttatatttcaaatttgaggcccctaacaaattgggtcacaaaatatgtttcatcaaactgtgggttgtaaactgtgacaccatatctggcttgctcaaactctaaaatataggcagcaagactttcagtttgtttgagcgacatcaatctccttaatcctttggatatgcggtagccccaaacttagctgttactgccccctcaaactcctcaaactcctgccaacctccaattccgtttctcaatttgtaactctttcaccactgaggtgttatgccttccaaattcagaggccacagaaacccagatagactcaggcacacggtagattgtgaaatactctctgcactagtccaaccatacaacaggatcgccctccaagaattttggaaagggtagtttgggtattgcttgattacctgaatcagcagactgacgaggatcacctctcatgcctcgttgttggttcccacgaccacgatcctgatcaccacgagactgttgttgattccttcgaacatctccaccatgttcttgagtagaggtcgatgtttcgcccaactctcttcccatctgctccaacctcaactgagacacttctcgtcctgtttcctccaatttccagtacagatcattcctctcaacagtggcttgttccgctaccattgccgctagctctgactgcatcaataactgctactggactgtcatgtgcgggcgcacatataggcgccgtcgtgacgcacgccgcgctgcagagtgcgctgaacgcgcacaggaggaggccacaaccagtggatagatttagaaataaagataaggctagagaataagattgagatgagagaatcgtggagagttagttggcagcagataagtccaagaaaataggagttagttgagagtttataggagaagttggttagccatagggctatttataagccacatggcagcagggaataaagcaagcaagattattatttcctaatctctctctctaaaacaagccgacggttgaggggaaaaacctcaccggcgacgacagaccgtggctacgaactccgtagtcaggggccagctaccctaggtcgggaggtccttgacaacctggtatcgcgatccagtcgttcctcgacttcttccacccagccgcaatcccagccaagcccaccaaccttgccgccttacgccgacaccacctctaccatggccgagccaaccacctctgatttggccaagataatcgagaccctgacatcaacggtcgccgccctccaatcctctgtcgccgagctccagaggggaaagacctcgtcgggcggccatgggaccaatgatgggcagcaccacaatgatcgaccgccgcgctttcaaaagatggatttcccccgctacgatgggaaatctgatccactgattttcaccagtctgtgcgaatcgtatttccatcagcagcgcatcatggaggaggagaaggtatggatggcctcctacaaccttgaggagggcgcacagatgtggtaccttatggtccaggaggacgagggcacaccttcctggcgccgcttcacggagctgctgcaccttcggtacgggccgcccctgcgttccgcgccgttggccgaactagcggagtgtaggcgcaccggtacggttgccgagtaccaggaccggttctaggccctgcttcctcgcgcgggaccactccaggaggcgcagcgggtacagctctccgtcggcggactccagccgccactcagcatcgacgtcaggatccagaatcctcagacgttggttgtcgccatgagtctggcgcgccaattcgag

SEQ ID NO: 78240 - DNA, 364 bp, Zea Mays
cttaagatgattgcagctgtgatgtgcaaaaatcttctggatctattttaatacacaatggtaaaataatactaatacattggtcaaaactgtgctcatatacataaatctttttactagtttacaaagaatgtcatcctggacagactcaacgcaaggcaggggaaaaaaaaaggaaaactttgcattcttgtacaacacttgatatcataagacgtcacattccagttgaagatgttcttcctattctttgagcaccaagttttggttgcgctggctttgttcctcggcccctacctgacgaggctaagggtctggctttggttgctggtggaggtgctgctattgaaccccagaggtcatc

SEQ ID NO: 78241 - DNA, 938 bp, Zea Mays
aaccgaggccacaggccaccaccattccttccttgttccttccccagctccgcaggctgctcatcgccctccctccgcgcccccgatccagatccagatccaggggcttgtcatggcatccaaacgtatcctcaaggaattaaaggacttgcaaaaggaccctccaacatcatgcagtgcaggtcctgctggtgaggatatgttccactggcaggcaaccatcatgggtcctcctgatagtccatatgctggaggtgttttcttggtgaacattcatttcccgccagactaccccttcaagcctccaaaggtatcttttaagacgaaggtcttccatccaaacatcaatagtaatggaagcatatgtcttgacattcttaaggagcagtggagccctgctttgacaatctctaaggttttgctttctatctgctccctgcttactgatcccaacccagacgaccctcttgtccctgagattgctcacatgtacaagacggatcggcctaagtacgaggcgacagcccgcagctggacccagaagtacgccatgggatgaaatgttcggcgttactggctaaatgcagacgattgtggtgttgcccatgaaactgttatcggggacgcgctaccgaccgatcagatggtcggtgcggcgaaccgatacgcgctcggaccgtggaaccgatatcgcctcgcgttgtactcggtctaaaaagaggaggtttttgttcctgaatttacaagtgtcgacatcatcaaagcgaggctgctgccttcccttcccggtaccaatggcctttcactctcatcgcacctcctctggtatctcactgcacctcgtcaactgcatcggctgtcggctggaggctggaaggtgtttcgtaaagcaagggatacttggattttgtctttcttcaagtcttcaatagcaagct

SEQ ID NO: 78242 - DNA, 835 bp, Zea Mays
acccccgggctaccttgcatattcagttatcggttcacgacgcaccaaccgaggccacaggccaccaccattccttccttgttccttccccagctccgcaggctgctcatggcatccaaacgtatcctcaaggaattaaaggacttgcaaaaggaccctccaacatcatgcagtgcaggcaaccatcatgggtcctcctgatagtccatatgctggaggtgttttcttggtgaacattcatttcccgccagactaccccttcaagcctccaaaggtatcttttaagacgaaggtcttccatccaaacatcaatagtaatggaagcatatgtcttgacattcttaaggagcagtggagccctgctttgacaatctctaaggttttgctttctatctgctccctgcttactgatcccaacccagacgaccctcttgtccctgagattgctcacatgtacaagacggatcggcctaagtacgaggcgacagcccgcagctggacccagaagtacgccatgggatgaaatgttcggcgttactggctaaatgcagacgattgtggtgttgcccatgaaactgttatcggggacgtatgttcttctgttccttgtgcattctccgatccatctctaggatccgagttctagtccaacattaacctaccattgccttgggtaatgagatgacttgtgcttgctgtggtaactatgctagtgttgatgttaatgattctcattgagggcttgttcagggattggagggtttaggggattttgacttattggcgagctctgctgccagtctatatctactattattacgctcgactgtataga

SEQ ID NO: 78243 - DNA, 2409 bp, Zea Mays
atggtttgctgcgctcgatttttctccagaggaggacaaagcgacctttttctaattcctgaggaggcaacgaattagaggattgaagttatgatggaaaagcttgtatagtagcgctaaatctaattctcttgaagcaagtctcaaccatgcagcgtcttacagcgatagtcttcgtggctacttctttccttattgcaagtgttccacatgccaaaagtgctgatctgaactctgataagcaggctcttctcgcatttgctgcatcactgcctcatggcaggaagctcaactggagctccaccacacctgtctgcacttcttgggtgggggtgacatgcacaccagataagagtcgtgtacatacactgcgcctacctgctgtaggacttttcggtccaataccatcagacactcttgggaagcttgatgcactggaggtattgagccttaggtcaaatcgccttactgttgacctcccacctgatgtaggatctattcctgccctccattccctctaccttcagcataataacctgtctggaatcataccaacttccctctcttccagtttaacattcttagacctgtcatacaacactttcgatggagaaatcccattgaaagtgcaaaatcttactcaacttactgcattgcttctccagaataactcactttctggacccattcctgacctccaacttcccaaattgagacacttgaatttgagcaacaataacctcagtgggccaataccaccttccttgcagaggtttccatcgagttccttcttagggaattcttttttgtgtgggtttcctttggaaccatgttttggaactgcaccttctccttctccagtatcaccaccatcccccagtaagaccaagaagagcttatggaaaaagatcagaactggtgtgataattggaattgctgttgttggaggggtattgttgcttattttgattctcgtgctcttgatatgtattttcaagagaaagggacacactgaacctaccacagcttcgtccaaaggaaaggctattgcaggtggcagggcagaaaaccctaaggaagactacagcagtggtgttcaggaagcagagaggaataaattggttttcttcgagggcagttcatttaattttgacttggaggatttgttgagagcttctgctgaagtccttggcaaaggaagttatggaactacctacaaagctgttcttgaggatgcaaccatagttgttgtcaagagattgaaggaagtggtggttagcaagaaggattttgaacagcagatggagataattggtagggttggccagcatcaaaatgtaattccattgcgggcttactattactccaaggatgagaagttgttggtgtttgattatgtcccatctggtagccttgctgctgttttgcatgggaataaagctgctggaagagctccattgaactgggagacaagagtcaagatatctctggacgtggcccatggaatcgcccaccttcataccgagggaggagggaagttcatccacggcaacatcaaagcatcgaacgtcctcctatcgcagaacctcgacggctgcgtctccgagttcggcctggcacagatcatgaccaccccacagaccccgccgcggcccgtcgggtaccgggcgcccgaagtcctcgagaacaagaaatcgacccagcagtccgacgtctacagcttcggcgtcctgctcctcgaaatgctcacgggaaaagcccccctcaggtctcccgggcgcgaggacccctccgtcgagcaccttccgaggtgggtgcagtccgtggtccgtgaggagtggaccgccgaggtcttcgacgtggacttgctacggcaccccaacgtcgaggacgagatggtccagatgctccaggtcgcgatggcgtgcgtggccgctcaccccgaggagcggcccaagatggaggaagtgatcaggagggtcacggaggtccggaattcttactcttctgggacgaggacgcccctggaggacaagccatcggagactgcacgagcgccatgagggggtacagcgtagtttagcaggagacggtagctaggttgcatagtggattccttatagagcttcagcaaagttgatagccacctgcatagcgcagtttccctcgcgattcccgatcgtttccagtaaatctgttgtgttgtttcctctctttttttccccctgattctagcggtctggttgtcgatccatgccattgtattgttgttcagttaaatcagcagctcttctggttagtgttgcactgtaatttgacataatctttgcagcgtgattaatgaatttcatttgccttctgtttctgccagatgccagtcagatttcgtggtgcttgatttggtctcct

SEQ ID NO: 78244 - DNA, 2638 bp, Zea Mays
acacacacacaccccgacaccccggacagagggggcgcaggcacgagaacagctcagtcgcggcgagctcccgggtctccagcgaaagtgccggaggagagagtggtggcggctggcgcgggctccctccgaggctctacgcggcgcctcagcgtaatgctggccttccccggggacagatcggcctgagtcgccgttgccgctctcgaatcggcgtcttcctcgcatggttccggccagagcttggatctcgcggcggaagacgcgaggcggaaaagtggggagggtgtcgttccttggttttcttctcgccaaagttatgatggaaaagcttgtatagtagcgctaaatctaattctcttgaagcaagtctcaaccatgcagcgtcttacagcgatagtcttcgtggctacttctttccttattgcaagtgttccacatgccaaaagtgctgatctgaactctgataagcaggctcttctcgcatttgctgcatcactgcctcatggcaggaagctcaactggagctccaccacacctgtctgcacttcttgggtgggggtgacatgcacaccagataagagtcgtgtacatacactgcgcctacctgctgtaggacttttcggtccaataccatcagacactcttgggaagcttgatgcactggaggtattgagccttaggtcaaatcgccttactgttgacctcccacctgatgtaggatctattcctgccctccattccctctaccttcagcataataacctgtctggaatcataccaacttccctctcttccagtttaacattcttagacctgtcatacaacactttcgatggagaaatcccattgaaagtgcaaaatcttactcaacttactgcattgcttctccagaataactcactttctggacccattcctgacctccaacttcccaaattgagacacttgaatttgagcaacaataacctcagtgggccaataccaccttccttgcagaggtttccatcgagttccttcttagggaattcttttttgtgtgggtttcctttggaaccatgttttggaactgcaccttctccttctccagtatcaccaccatcccccagtaagaccaagaagagcttatggaaaaagatcagaactggtgtgataattggaattgctgttgttggaggggtattgttgcttattttgattctcgtgctcttgatatgtattttcaagagaaagggacacactgaacctaccacagcttcgtccaaaggaaaggctattgcaggtggcagggcagaaaaccctaaggaagactacagcagtggtgttcaggaagcagagaggaataaattggttttcttcgagggcagttcatttaattttgacttggaggatttgttgagagcttctgctgaagtccttggcaaaggaagttatggaactacctacaaagctgttcttgaggatgcaaccatagttgttgtcaagagattgaaggaagtggtggttagcaagaaggattttgaacagcagatggagataattggtagggttggccagcatcaaaatgtaattccattgcgggcttactattactccaaggatgagaagttgttggtgtttgattatgtcccatctggtagccttgctgctgttttgcatgggaataaagctgctggaagagctccattgaactgggagacaagagtcaagatatctctggacgtggcccatggaatcgcccaccttcataccgagggaggagggaagttcatccacggcaacatcaaagcatcgaacgtcctcctatcgcagaacctcgacggctgcgtctccgagttcggcctggcacagatcatgaccaccccacagaccccgccgcggcccgtcgggtaccgggcgcccgaagtcctcgagaacaagaaatcgacccagcagtccgacgtctacagcttcggcgtcctgctcctcgaaatgctcacgggaaaagcccccctcaggtctcccgggcgcgaggacccctccgtcgagcaccttccgaggtgggtgcagtccgtggtccgtgaggagtggaccgccgaggtcttcgacgtggacttgctacggcaccccaacgtcgaggacgagatggtccagatgctccaggtcgcgatggcgtgcgtggccgctcaccccgaggagcggcccaagatggaggaagtgatcaggagggtcacggaggtccggaattcttactcttctgggacgaggacgcccctggaggacaagccatcggagactgcacgagcgccatgagggggtacagcgtagtttagcaggagacggtagctaggttgcatagtggattccttatagagcttcagcaaagttgatagccacctgcatagcgcagtttccctcgcgattcccgatcgtttccagtaaatctgttgtgttgtttcctctctttttttccccctgattctagcggtctggttgtcgatccatgccattgtattgttgttcagttaaatcagcagctcttctggttagtgttgcactgtaatttgacataatctttgcagcgtgattaatgaatttcatttgccttctgtttctgccagatgccagtcagatttcgtggtgcttgatttggtctcct

SEQ ID NO: 78245 - DNA, 2646 bp, Zea Mays
acacacacacaccccgacaccccggacagagggggcgcaggcacgagaacagctcagtcgcggcgagctcccgggtctccagcgaaagtgccggaggagagagtggtggcggctggcgcgggctccctccgaggctctacgcggcgcctcagcgtaatgctggccttccccggggacagatcggcctgagtcgccgttgccgctctcgaatcggcgtcttcctcgcatggttccggccagagcttggatctcgcggcggaagacgcgaggcggaaaagtggggagggtgtcgttccttggttttcttctcgccaaaggattgaagttatgatggaaaagcttgtatagtagcgctaaatctaattctcttgaagcaagtctcaaccatgcagcgtcttacagcgatagtcttcgtggctacttctttccttattgcaagtgttccacatgccaaaagtgctgatctgaactctgataagcaggctcttctcgcatttgctgcatcactgcctcatggcaggaagctcaactggagctccaccacacctgtctgcacttcttgggtgggggtgacatgcacaccagataagagtcgtgtacatacactgcgcctacctgctgtaggacttttcggtccaataccatcagacactcttgggaagcttgatgcactggaggtattgagccttaggtcaaatcgccttactgttgacctcccacctgatgtaggatctattcctgccctccattccctctaccttcagcataataacctgtctggaatcataccaacttccctctcttccagtttaacattcttagacctgtcatacaacactttcgatggagaaatcccattgaaagtgcaaaatcttactcaacttactgcattgcttctccagaataactcactttctggacccattcctgacctccaacttcccaaattgagacacttgaatttgagcaacaataacctcagtgggccaataccaccttccttgcagaggtttccatcgagttccttcttagggaattcttttttgtgtgggtttcctttggaaccatgttttggaactgcaccttctccttctccagtatcaccaccatcccccagtaagaccaagaagagcttatggaaaaagatcagaactggtgtgataattggaattgctgttgttggaggggtattgttgcttattttgattctcgtgctcttgatatgtattttcaagagaaagggacacactgaacctaccacagcttcgtccaaaggaaaggctattgcaggtggcagggcagaaaaccctaaggaagactacagcagtggtgttcaggaagcagagaggaataaattggttttcttcgagggcagttcatttaattttgacttggaggatttgttgagagcttctgctgaagtccttggcaaaggaagttatggaactacctacaaagctgttcttgaggatgcaaccatagttgttgtcaagagattgaaggaagtggtggttagcaagaaggattttgaacagcagatggagataattggtagggttggccagcatcaaaatgtaattccattgcgggcttactattactccaaggatgagaagttgttggtgtttgattatgtcccatctggtagccttgctgctgttttgcatgggaataaagctgctggaagagctccattgaactgggagacaagagtcaagatatctctggacgtggcccatggaatcgcccaccttcataccgagggaggagggaagttcatccacggcaacatcaaagcatcgaacgtcctcctatcgcagaacctcgacggctgcgtctccgagttcggcctggcacagatcatgaccaccccacagaccccgccgcggcccgtcgggtaccgggcgcccgaagtcctcgagaacaagaaatcgacccagcagtccgacgtctacagcttcggcgtcctgctcctcgaaatgctcacgggaaaagcccccctcaggtctcccgggcgcgaggacccctccgtcgagcaccttccgaggtgggtgcagtccgtggtccgtgaggagtggaccgccgaggtcttcgacgtggacttgctacggcaccccaacgtcgaggacgagatggtccagatgctccaggtcgcgatggcgtgcgtggccgctcaccccgaggagcggcccaagatggaggaagtgatcaggagggtcacggaggtccggaattcttactcttctgggacgaggacgcccctggaggacaagccatcggagactgcacgagcgccatgagggggtacagcgtagtttagcaggagacggtagctaggttgcatagtggattccttatagagcttcagcaaagttgatagccacctgcatagcgcagtttccctcgcgattcccgatcgtttccagtaaatctgttgtgttgtttcctctctttttttccccctgattctagcggtctggttgtcgatccatgccattgtattgttgttcagttaaatcagcagctcttctggttagtgttgcactgtaatttgacataatctttgcagcgtgattaatgaatttcatttgccttctgtttctgccagatgccagtcagatttcgtggtgcttgatttggtctcct

SEQ ID NO: 78246 - DNA, 2831 bp, Zea Mays
tcacactctaggggcaaatccgtcactcgctaaccaaacaccatacacgcttctcttaaatgcacaccaaatgtgtacacacagcataatcgcgccgcgcaggcggcatcacactccagtacagctctcactgcgccctgcccgcatcggctccaccacgctccacgccccacgcccccctacacacacacacaccccgacaccccggacagagggggcgcaggcacgagaacagctcagtcgcggcgagctcccgggtctccagcgaaagtgccggaggagagagtggtggcggctggcgcgggctccctccgaggctctacgcggcgcctcagcgtaatgctggccttccccggggacagatcggcctgagtcgccgttgccgctctcgaatcggcgtcttcctcgcatggttccggccagagcttggatctcgcggcggaagacgcgaggcggaaaagtggggagggtgtcgttccttggttttcttctcgccaaagaggattgaagttatgatggaaaagcttgtatagtagcgctaaatctaattctcttgaagcaagtctcaaccatgcagcgtcttacagcgatagtcttcgtggctacttctttccttattgcaagtgttccacatgccaaaagtgctgatctgaactctgataagcaggctcttctcgcatttgctgcatcactgcctcatggcaggaagctcaactggagctccaccacacctgtctgcacttcttgggtgggggtgacatgcacaccagataagagtcgtgtacatacactgcgcctacctgctgtaggacttttcggtccaataccatcagacactcttgggaagcttgatgcactggaggtattgagccttaggtcaaatcgccttactgttgacctcccacctgatgtaggatctattcctgccctccattccctctaccttcagcataataacctgtctggaatcataccaacttccctctcttccagtttaacattcttagacctgtcatacaacactttcgatggagaaatcccattgaaagtgcaaaatcttactcaacttactgcattgcttctccagaataactcactttctggacccattcctgacctccaacttcccaaattgagacacttgaatttgagcaacaataacctcagtgggccaataccaccttccttgcagaggtttccatcgagttccttcttagggaattcttttttgtgtgggtttcctttggaaccatgttttggaactgcaccttctccttctccagtatcaccaccatcccccagtaagaccaagaagagcttatggaaaaagatcagaactggtgtgataattggaattgctgttgttggaggggtattgttgcttattttgattctcgtgctcttgatatgtattttcaagagaaagggacacactgaacctaccacagcttcgtccaaaggaaaggctattgcaggtggcagggcagaaaaccctaaggaagactacagcagtggtgttcaggaagcagagaggaataaattggttttcttcgagggcagttcatttaattttgacttggaggatttgttgagagcttctgctgaagtccttggcaaaggaagttatggaactacctacaaagctgttcttgaggatgcaaccatagttgttgtcaagagattgaaggaagtggtggttagcaagaaggattttgaacagcagatggagataattggtagggttggccagcatcaaaatgtaattccattgcgggcttactattactccaaggatgagaagttgttggtgtttgattatgtcccatctggtagccttgctgctgttttgcatgggaataaagctgctggaagagctccattgaactgggagacaagagtcaagatatctctggacgtggcccatggaatcgcccaccttcataccgagggaggagggaagttcatccacggcaacatcaaagcatcgaacgtcctcctatcgcagaacctcgacggctgcgtctccgagttcggcctggcacagatcatgaccaccccacagaccccgccgcggcccgtcgggtaccgggcgcccgaagtcctcgagaacaagaaatcgacccagcagtccgacgtctacagcttcggcgtcctgctcctcgaaatgctcacgggaaaagcccccctcaggtctcccgggcgcgaggacccctccgtcgagcaccttccgaggtgggtgcagtccgtggtccgtgaggagtggaccgccgaggtcttcgacgtggacttgctacggcaccccaacgtcgaggacgagatggtccagatgctccaggtcgcgatggcgtgcgtggccgctcaccccgaggagcggcccaagatggaggaagtgatcaggagggtcacggaggtccggaattcttactcttctgggacgaggacgcccctggaggacaagccatcggagactgcacgagcgccatgagggggtacagcgtagtttagcaggagacggtagctaggttgcatagtggattccttatagagcttcagcaaagttgatagccacctgcatagcgcagtttccctcgcgattcccgatcgtttccagtaaatctgttgtgttgtttcctctctttttttccccctgattctagcggtctggttgtcgatccatgccattgtattgttgttcagttaaatcagcagctcttctggttagtgttgcactgtaatttgacataatctttgcagcgtgattaatgaatttcatttgccttctgtttctgccagatgccagtcagatttcgtggtgcttgatttggtctcct

SEQ ID NO: 78247 - DNA, 1297 bp, Zea Mays
gagaagtctgcagaggaagaaaagagagcgaagggggttaaaccgcggaccgcggaggcggagcaaagcacacgccatccatccctggcccgtctgccgtcgcagtcccagtcgccctcctcttcgtctgtggtctccaccccgcgcacacgcacagttcgtcgacgcgagcgagggccagccgtccagggcacggaagtgggagcccgcagcttctcgtcggcggggggtgggggctgagtcgcgggagtgatctagtggtttcgtggtctgcggcgcggcggggcggggttcgagatggaggacttgctgaacacggagatcgggaagaacgactatgactggcttctgacaccccctggaacacctcgtgatcctacattagatgctgctgagaaagctccatcatcaattgtgactaaacatactgttaccagatcatcctcgacaactagagcatctagggccagcacggagtatatctgtctcttgccgggcagttcaatctacaccaaacaacatcaggtcatcaatcgtcaatgcaaacatttcctctgttaattcaagatctacaacccaaagcaagcggacagccactcttactgcatcaaagccatctgttgcatcgtcacgtccagtgccaacacggtcctctacacctgtcgaagcccgtctgtctacaccaacccatactcatccatctactccagtgaaaaagcgtccttctgtgtccaactctatggccaactccgctgttcccaagaacacgtcagcaccatgctcaagatcatcaactccaacctctcggtctcgaaccttgtccagttcatcttcaagcagtacaagtgcagtgagccgtcccagctcatcctctggtaaagttcctgcaataacttatagcagttcttcatcaagtacagtttcttcagtgagccgttctagctctcggtcatccacacccactcgtcagcctgccatgcgttcatcaacaccatctgctaggcggatttctggcagcaataacatgacatctaatggcagacccttagccagcagtggtcggagttcagcaccttcctcagcgccatcatctcgtccaagttccccaaatatacggacgcaagctccagttcacccactaggtattccagattttccaaatgaaactccaccaaacttaagggctaaactgccagaacgaccactctctgctggtagagtacggccaggtattacttctggtgtcaggtcaaccccaaatcctgaaccggtcctctcagtcactgtaaaaaagaga

SEQ ID NO: 78248 - DNA, 2040 bp, Zea Mays
cgattttgggcggtcgtccagtctcaatcgaccatgcgaattaaccgattagggtcttgttgccgatggggagctcagggttctcgtggacgcttccggaccaccccaagctccccaaggggaaaccggtggctgtcgtcgtgctggacggatggggcgaggccaaccccgaccagtacaactgcatccatgtcgctcagactcctgtcatggactcgctaaagaatggcgctcctgagaaatggagactagtgaaggctcatggaacagctgtgggcctcccatctgatgatgacatgggcaacagtgaagttggtcacaatgcacttggtgctggtcgaattttcgcccaaggtgctaagcttgtcgatcaagctcttgcctccggaaagatttatgatggagatgggttcaactacatcaaagaatcttttgaaagtggtactcttcaccttattgggttgttgagtgatggtggtgtccactcccgtcttgatcaactgcagttacttctgaaaggtgtcagtgagagaggggcgaaaaaaatccgtgtgcacatccttactgatggacgtgatgttttggatggaagcagtattggtttcgtggagaccctagagaatgatcttttggagcttagagcgaagggtgttgatgcacaaattgcatctggtggtggaaggatgtatgttacgatggaccgttatgagaatgactgggatgtggttaaacgtggttgggatgcccaagtgcttggagaagcaccctacaaattcaaaagtgcacttgaggctgtgaaaacactgagagcacagcccaaagccaatgatcagtacttgcccccatttgtgatagttgatgacagtggcaatgctgttgggcctgtattagatggtgatgcagttgtcactatcaacttccgagctgatcgcatggttatgcttgcgaaagcactagagtatgcagattttgacaactttgaccgtgttcgtgtccccaaaatccgatatgctgggatgcttcagtatgatggtgagttgaagcttccaagccgttaccttgtttccccaccagagatagatagaacatctggggagtacttggtgaagaatggcatccgcacctttgcttgcagtgagacagttaaatttggccatgtcacatttttctggaacggtaaccgttcgggatactttgatgcaactaaggaggagtatgtagaagtacctagtgacagtggtattacattcaatgttgcacccaatatgaaggcgcttgaaattgctgagaaagccagggatgctctcctaagtggaaagtttgaccaggtacgtgtcaacctgccaaatggtgacatggttggtcacactggtgatattgaggccaccgtagttgcttgcaaggcagctgatgaagctgttaagattattttggatgctgtcgagcaagttggtggtatttaccttgttaccgccgatcatggcaatgctgaggatatggtgaaaaggaacaagtctggcaagccgttgctcgacaagaatgaccgtatccagattcttacctcgcatacccttcagccggtcccggttgccattggaggccctggccttcaccctggagtgaaattccggaacgacatccaaacccctgggctcgccaacgtagccgcaaccgtgatgaacctccacggatttgaggctcctgctgactacgagcaaaccctcattgaagtggctgacaactaaacactggccacctgtgtccaattttggttatatgtagttctgagaatggacattcaataatttatgtttgcaagcacgttgctcaaactcaccaaaacatcgagggatgccttttgactttggcatttacagcattttcgtttggctttaatccttatcggtttctattgcttctgtttcatttctatgtatcatagctgcagtagttcgaacaactgtctttgcacaactcattagatgctctatttatataccgttgacgattgcctcctgtgctgtcttttagtctgaggcc

SEQ ID NO: 78249 - DNA, 2083 bp, Zea Mays
aaaacatctcatcttttgtgcgatgcgacctttcccgtccctcgcagcaccgatcctgccgtccacctgttaataaatcgcctgagtttagtcgaaacacaatcgttaaaatgcagtaaagtaattcacgacccccgggcgcccccgtctccgctcctttattaatatcgccgcggcctcgcacctccatctgttctatatcgccccattgctcgctcgccaagagttcttcttgttaggcaaggcaaaagcagaagcaaaaagagaaagggcgctcctgagaaatggagactagtgaaggctcatggaacagctgtgggcctcccatctgatgatgacatgggcaacagtgaagttggtcacaatgcacttggtgctggtcgaattttcgcccaaggtgctaagcttgtcgatcaagctcttgcctccggaaagatttatgatggagatgggttcaactacatcaaagaatcttttgaaagtggtactcttcaccttattgggttgttgagtgatggtggtgtccactcccgtcttgatcaactgcagttacttctgaaaggtgtcagtgagagaggggcgaaaaaaatccgtgtgcacatccttactgatggacgtgatgttttggatggaagcagtattggtttcgtggagaccctagagaatgatcttttggagcttagagcgaagggtgttgatgcacaaattgcatctggtggtggaaggatgtatgttacgatggaccgttatgagaatgactgggatgtggttaaacgtggttgggatgcccaagtgcttggagaagcaccctacaaattcaaaagtgcacttgaggctgtgaaaacactgagagcacagcccaaagccaatgatcagtacttgcccccatttgtgatagttgatgacagtggcaatgctgttgggcctgtattagatggtgatgcagttgtcactatcaacttccgagctgatcgcatggttatgcttgcgaaagcactagagtatgcagattttgacaactttgaccgtgttcgtgtccccaaaatccgatatgctgggatgcttcagtatgatggtgagttgaagcttccaagccgttaccttgtttccccaccagagatagatagaacatctggggagtacttggtgaagaatggcatccgcacctttgcttgcagtgagacagttaaatttggccatgtcacatttttctggaacggtaaccgttcgggatactttgatgcaactaaggaggagtatgtagaagtacctagtgacagtggtattacattcaatgttgcacccaatatgaaggcgcttgaaattgctgagaaagccagggatgctctcctaagtggaaagtttgaccaggtacgtgtcaacctgccaaatggtgacatggttggtcacactggtgatattgaggccaccgtagttgcttgcaaggcagctgatgaagctgttaagattattttggatgctgtcgagcaagttggtggtatttaccttgttaccgccgatcatggcaatgctgaggatatggtgaaaaggaacaagtctggcaagccgttgctcgacaagaatgaccgtatccagattcttacctcgcatacccttcagccggtcccggttgccattggaggccctggccttcaccctggagtgaaattccggaacgacatccaaacccctgggctcgccaacgtagccgcaaccgtgatgaacctccacggatttgaggctcctgctgactacgagcaaaccctcattgaagtggctgacaactaaacactggccacctgtgtccaattttggttatatgtagttctgagaatggacattcaataatttatgtttgcaagcacgttgctcaaactcaccaaaacatcgagggatgccttttgactttggcatttacagcattttcgtttggctttaatccttatcggtttctattgcttctgtttcatttctatgtatcatagctgcagtagttcgaacaactgtctttgcacaactcattagatgctctatttatataccgttgacgattgcctcctgtgctgtcttttagtctgaggcc

SEQ ID NO: 78250 - DNA, 2009 bp, Zea Mays
ataaactattaaaataaaacatctcatcttttgtgcgatgcgacctttcccgtccctcgcagcaccgatcctgccgtccacctgttaataaatcgcctgagtttagtcgaaacacaatcgttaaaatgcagtaaagtaattcacgacccccgggcgcccccgtctccgctcctttattaatatcgccgcggcctcgcacctccatctgttctatatcgccccattgctcgctcgccaagagttcttcttgttaggcaaggcaaaagcagaagcaaaaagagaaagggcgctcctgagaaatggagactagtgaaggctcatggaacagctgtgggcctcccatctgatgatgacatgggcaacagtgaagttggtcacaatgcacttggtgctggtcgaattttcgcccaaggtgctaagcttgtcgatcaagctcttgcctccggaaagatttatgatggagatgggttcaactacatcaaagaatcttttgaaagtggtactcttcaccttattgggttgttgagtgatggtggtgtccactcccgtcttgatcaactgcagtattggtttcgtggagaccctagagaatgatcttttggagcttagagcgaagggtgttgatgcacaaattgcatctggtggtggaaggatgtatgttacgatggaccgttatgagaatgactgggatgtggttaaacgtggttgggatgcccaagtgcttggagaagcaccctacaaattcaaaagtgcacttgaggctgtgaaaacactgagagcacagcccaaagccaatgatcagtacttgcccccatttgtgatagttgatgacagtggcaatgctgttgggcctgtattagatggtgatgcagttgtcactatcaacttccgagctgatcgcatggttatgcttgcgaaagcactagagtatgcagattttgacaactttgaccgtgttcgtgtccccaaaatccgatatgctgggatgcttcagtatgatggtgagttgaagcttccaagccgttaccttgtttccccaccagagatagatagaacatctggggagtacttggtgaagaatggcatccgcacctttgcttgcagtgagacagttaaatttggccatgtcacatttttctggaacggtaaccgttcgggatactttgatgcaactaaggaggagtatgtagaagtacctagtgacagtggtattacattcaatgttgcacccaatatgaaggcgcttgaaattgctgagaaagccagggatgctctcctaagtggaaagtttgaccaggtacgtgtcaacctgccaaatggtgacatggttggtcacactggtgatattgaggccaccgtagttgcttgcaaggcagctgatgaagctgttaagattattttggatgctgtcgagcaagttggtggtatttaccttgttaccgccgatcatggcaatgctgaggatatggtgaaaaggaacaagtctggcaagccgttgctcgacaagaatgaccgtatccagattcttacctcgcatacccttcagccggtcccggttgccattggaggccctggccttcaccctggagtgaaattccggaacgacatccaaacccctgggctcgccaacgtagccgcaaccgtgatgaacctccacggatttgaggctcctgctgactacgagcaaaccctcattgaagtggctgacaactaaacactggccacctgtgtccaattttggttatatgtagttctgagaatggacattcaataatttatgtttgcaagcacgttgctcaaactcaccaaaacatcgagggatgccttttgactttggcatttacagcattttcgtttggctttaatccttatcggtttctattgcttctgtttcatttctatgtatcatagctgcagtagttcgaacaactgtctttgcacaactcattagatgctctatttatataccgttgacgattgcctcctgtgctgtcttttagtctgaggcc

SEQ ID NO: 78251 - DNA, 3011 bp, Zea Mays
cttgtcctagcgcatccgccgcacacgccccgagcggtcaagcctcgctctcgctgccacgtccctgggacgtaacgcgcgtggcagaggcacacacacaaagcagagagcgagacgccgagcagagcttcgttccggtgaccgcctgaccggcgaggagccgccaagatggacgccacgccgatcaccgaagagctgccgcccaacatcacggagcagatgcgcaacgcgacgacgctgcccaaggcgtccagcaccgtggtgtgctactcgcccatgatgataaccaccaacggcatctggcaagggttcaacccgctcgagttctccctcccgctcttcatcctccagacggccgtcatcgtcgtcaccacccgcttgctcgtccttgtgctcaggcccttccgccagccccgcgtcatcgctgagatcctcatagagacctgggcgaccatggtgttcccgatgcgcagcctgctcacgctggagacggtggcgcacctcggcctcctctatttcctcttcctggtcggcctggagatggacatcgacgtgatccggcggtcgggcaagaaggcgctgttcgtcgccttagcgggcatggcgctgccgttctgcatgggcatcgccacgtccttcatcttccggcaccaggtgtcgcggaacgtgcaccaggcgtccttcctcctcttcctcggcgtcgcgctctccgtcacggcgttcccggtgctcgcccgaatcctcgccgagatcaagctgctcggcaccgacctcggccagatcgccatgtccgccgccatcgtcaacgacatgtgcgcgtggatcctgctcgccatcgccatcgccatctcggaggtgagcagcgccgcgctgtcgtccacgtgggtgctcctctccggggcgctcttcgtcctcttctgcttctacgtcgtgcgccccggcatgtggtggctcatccgccgcacccccgagggcgagggcatcagcgacatgcaggtctccctcatcctcaccggcgtcatgctcgccggcgtgtgcaccgacgccatcggcatacactctgtcttcggcgccttcgtgtacgggctggtcattccgaccgggccgctcggcgtggtgctgatcgagaagatcgaggacttcgtcaccggcctgctcctgccgctcttcttcgccatcagcggcctgcgcaccaacgtccggaagattagggaccccgtcactgttggccttctcgtgctcgtgttcgtcatggccagctttgcaaagatcatgggcaccatcatcatcgccgcgctctacaccatgccgtttcgcgagggcatcgccctcggcttcctcatgaacaccaggggcctcgtggaaatgatcgtgctcaacattggaagagacaaagaggtgttggatgacgagtcgtttgcggtgatggtgctggtgtcggtggccatgacaaccctggtgacgccggtggtgaccagcgtgtaccggccgtcccggcgcctcgtcggctacaagcggcggaacctgcagcgcatccggcacgacagcgagctccgcatgctggcctgcgtgcacaccacccgcaacgtgccgtccgtgctgtcgctgctcgagctctcgaacccaaacaagcgctcaccgatcttcatctacgcgctccacctcgtcgagctcacgggacgtgcgtccaacatgctcgccgccgccgcggcctccgcctccaagcagagccggggcggatcgggatcctccctgccccccgtgacggagcacatcttcaacgccttcgagaactacgagaggctcactggaggcgtgtccatccagacgctcgcggcggtgtccccgtaccaaagcatgcacgaggacgtgtccgtgctcgccgaggacaagcacgtctcgctaatcgtggtcccgttccacaagcagcagacggtggacggcggcatggagccgatcaacccgcacgtccgcggcttcaacgagagcctcctctccacgtccccgtgctccgtcgccatcctcgtcgaccgcgggctcagcgccgcggcggcgcggatggccaccgagcaccacgtagcgctcttcttcttcggcgggcccgacgaccgcgaggcgctcgcgtacgcgtggaggatggtcgagcaccccggcgtcaccctcagcatcgtgcggttcgtcccgccggactaccgggcgcggaccgtctcttgctcggcttaccgcccgccggccgactcggactcgcgcgccatcaccatcaacacggagggcaagagcgagctggagatggacgaggactacctcagcgagttccgggcgcgcaaccacggcaacatcgccatcacctacgccaccaggacggtggccaacagcgaggaaacggtggcggccatacgggccatggacaacaacctgcaagagctgtacatcgtgggccggcgccccggcgaggtcaggtcgccgatgacggcggcgctggaggagtggatggagaacccggagctggggcccatcggcgacatgctcgtgtcgtccgacttctccatgtcagtgtcggtgctggtggtgcagcagtacgtggtggccgcagcgcccgcccccgtccccgcgccggcagcgagcagcgaccccgtgcgccagtacgtgagcaacgctaaccaacgggcggcggcggcggcgtccggggcataccggacgagtgcggcgtcagcagccaatagcaggtggtctggctctggtggcaccgtaggcttctgaggatcgtgtacttcctagcttgttaaggcatgtaggtacttcatcgttttgattcaggaggttgtttttcattgtttctgtagtctatgtatactgctgtattcgattttcgatctggcaggcttatatgaccagtgccatgtatggggttcgtgtctgttttgttgcactgccatggactgatatgtgacaaccaaaaggacagctaacttctctccgttttggcaatgatattctcttatataacaaga

SEQ ID NO: 78252 - DNA, 2933 bp, Zea Mays
caacgacatattatctctccaagctccgtccgccgcaccgtgccacccgcgcggcccgcctgctacaccccatccggccgtccccaagccgggagcggaggcgcaaaaccctccttccgctgctccggcgccatgggcggcgcctccaagctgctctcctccttcctcctcacctcttccccgctccgcctccgacccgctactgccgccgccgccgcgctgttcctatccccgcccgcggcggcctcgcgccgcctgttcctgctctccttaccctccccgcaccgtaccctctacatctcgtccgcttccgcctcccttccgcacggctccagctcggcctgcccgccgccaccgctccgagcgcctttccccgagtggtcccgcctcgtcgaccgacttgccgccaccggatacggctccggcctgcccttttccgctgacgatctcgccctcgtgtccggatgcgtcctgtcggacggggagcaggccgctgtctccacctgcctcgccttcgcgcgcgaccggcctgacctcctgagttcgcttcaaaggaaggacgtggaggtcctggtgggcaatgtggcgccgtctctgttcaaggacggggaggcatcaggacagcggcttcggcgctaccttgctggggaagaaaccgacgtcactgtttcagagagagctggaactgttgatattgttcgatatctgctaagttacatatacggttcttctgacatctgctcagaagacaaggaactcactgatttggccgtgagaaatatcatggttgagttagtgagttttagtgctctttcccagtcttccacttctgtggaattaactcccaaccaaatttgctcgagtcagcatgaacaattttccaggcctccagggcaaaatatcgaaatgaagcgaggtgattggatttgcacaagatgtagcttcatgaacttcgcaagaaacgttaggtgccttgagtgcaatgagcagaggccaaagaagatgttgactggtggagagtgggaatgccctcagtgtgatttctataactatgggaggaatatgtcatgcttaaaatgtgattgcaagaggccagcaacaatcccaccgcatcctacatctgttggtgctgatttaggtggtgtggtacagcagcttctcaaggtaacaacaagtgttggtaaatctgaaattgagagaaaacttgctgaaaatgatgaaaaggcagagagatggttgagcaaagtatctcaacttcatgattcagcagacttaagtagtctagcagaagatgaggactttcctgagattatgcctatgcgcaagggggtgaataagtttgtggttagcacacgcaaaacaccactggagagaaggcttgcaaatgcacagtacagcagtaacaatatcctcacattgtccgacccaaagataagtcaaactttggacaggatacttgggagttcagctcctactgcagccccaaacaatcaatctgttactagtgatgcaactatggaagctccgaagaaatcaatagatcacctcagtggcattgaccctgttccctttgagcccctgtctgcagatctctttgctaaaccagagagtaatgatcgacagagaaatgagaatgaaaaaaacaatgtagaagatggcagttctatggcaaataatacagtgcctttacctgagaggcgaagtatggaatcattagatactgctgagaaatggtccgagaaagtagcagaacttgacaatgtaaaggattctccaagtgcaatttccgatgaaaattttcctgagattatgccaataaggaaaggtgaaaatcgatttgttgttagtaagaaaaaagatcgctcattgacatcacagcagtacaaaaggcgcagtattctcgagcaggcagacagttctgattttgtcccatttgttccttttcctcctggctactttggcaagaaagatacgccaatagagagtactacacacacaggaattatgtcaggagacggtcagccaaaaggtaacctgaataatgagaactggaacaggaattactatcaatatcaatcacaatctcaagaatttaggcctagtggtaatgcatatactggctctgggaacacaggcaactccgaggggaacattaatgggagtaggggcgaatctacttaccatgaagctaactttgaaaagcgatcttattataactcaggttatagcaacaacggttattggagcagcgataacaataacagcaacaatgcctggagtgacaactctaattataacaacaataatgcttggagtggtaacaattcctataacgggtgtattaggaacgacaataccagctgcaacagcaatcgtgattataactacaatgatacatggagtgccagcagcaacagtgcatggagcagcagcaacaacaataaccagagtggtccatttgctgacaatagcaatgccactagaagcagtagttccgtgaatgctaatcactcggttcacagctcaggttatggaggaaactcgaacagaggttatactggaaagagcttggaaggatctgctgtgaaggatcctgatcctctagacatgtctgaggaagctaaggctgagagatggtttaggagggcagctcagataaaggacatctctgagctggcgaatattcccgacgaggacttccctgagataatgccgatgaggaagggggtgaatagattcgtcgtgagtaagaggaagacgccattggagaggagattaacatccccgcaatacagaaggaacctgccaatcgttagttctgaaacggacaaagatgccaactgaaaacagagcttagataaagagaagtcggcattcagcaggtggtgccgatgaaccagcttggtgcttgcctcctgcactggttggtcctg

SEQ ID NO: 78253 - DNA, 843 bp, Zea Mays
gcagcttttccttggaacggataaacggccgccgcacgcaggccgcattgccgagatgtgaagttgtcaacgcggccggacgtaccacggcttcctgcgctccctgcaccagttggtcagatgacagcgtcatacactcgtactcccagcgaccccgcacgagctgtcacctgagagtgacaaaggaaaaaatttcaagcttgtccgacacaaaagtgatcaacgggatgagcaccgaacaagagacgagcgacgaaagcgatagagacccctaggattcacatcaggctagatgacaactgctccatccctctctctctctcgttaccgactcaacagttgtacacacatcagatggtccaacaggagaaatacatcgcagtggccgtgactctgctgctcttgaccggcaaacacacactgatggatggctgcacctgcacaagctgaggactgctctcgatccgtgatcaaatgagagagtttctccatcaaagtccttatactactccctatttcaaactttaatttgtaaacagcagtgcaaaacagttctttacatactagtcgtttacaaggcgggagatagtttcagcgccgctggctccgtttccgcgatcctgtgtttgtgggcatgtgagctgatcacacggcatgggtggccaaacggagttcaaggtcggttgcagctgcaggtccagggaattaacaagtttctcgcttgactcttgctggcttcgatcgacacctgtgacacgatcacacgagaccctgtctcggcacgccggccgggttcccgttcttttcctggtgttgtgcgcagggagggagacttggtcagac

SEQ ID NO: 78254 - DNA, 1067 bp, Zea Mays
gaccgcaccgcggccacagcctcgcgtcgtcgccccacagccacgcgagccttcgccgatccgcgagcgcagatcgccgaagccaggcggcggagagggagctcgaggcggcggaggaaggcgttcgccacagtcgctgatttccctggggaagagatgggtctctcctttgggaagctgttcagccgcctcttcgccaagaaggagatgaggattctcatggtcgggctcgatgccgccggtaagaccaccatcctctacaagctcaagctcggcgagatcgtcaccaccatccccactatcggattcaatgttgaaactgttgagtataagaacattagcttcactgtttgggatgttggtggccaggacaaggcccctgtggaggcactactttcagaacacacagggacttatttttgttgtagacagcaacgacagggaacgtgttgttgaggctagagatgagctccacaggatgctgaatgaggatgagctgcgtgacgctgtgctgcttgtatttgcaaacaaacaagatcttcccaatgctatgaatgctgctgaaattactgacaagcttggtctgcattccctgcgacagcggcactggtacatccagagcacttgtgctacatctggtgaagggttgtatgaggggcttgactggctttccagcaacatctccagcaagtcttgaagcttttcggcagggctcctagcgagaggatgtctgaacaacttatggctgctttttttttacatattattactaagacacaagctacagcagatatagtacttgtgaaaaaaagaaacttctgagctcttttgagggattgatactagattggattgtgtttttgtttttgggtcgataccatcgcctgttcggttccacaaaattgactgtcaactatatttacctatgttcggagattgtatggtaaattaaattgacatgctttagcgtaggtctccaccgatccagtgttgtgctagatgtgagttgctagattttgtttatagatgagtatatgcttattttcatccatgcatgatttagagca

SEQ ID NO: 78255 - DNA, 756 bp, Zea Mays
agaaaaaagcccgcccgtcagaccgcaccgcggccacagcctcgcgtcgtcgccccacagccacgcgagccttcgccgatccgcgagcgcagatcgccgaagccaggcggcggagagggagctcgaggcggcggaggaaggcgttcgccacagtcgctgatttccctggggaagagatgggtctctcctttgggaagctgttcagccgcctcttcgccaagaaggagatgaggattctcatggtcgggctcgatgccgccggtaagaccaccatcctctacaagctcaagctcggcgagatcgtcaccaccatccccactatcggattcaatgttgaaactgttgagtataagaacattagcttcactgtttgggatgttggtggccaggacaagatcaggcccctgtggaggcactactttcagaacacacagggacttatttttgttgtagacagcaacgacagggaacgtgttgttgaggctagagatgagctccacaggatgctgaatgaggatgagctgcgtgacgctgtgctgcttgtatttgcaaacaaacaagatcttcccaatgctatgaatgctgctgaaattactgacaagcttggtctgcattccctgcgacagcggcactggtacatccagagcacttgtgctacatctggtgaagggttgtatgaggggcttgactggctttccagcaacatctccagcaagcctcggtatagttgggatttcagtgcttcgataggcatag

SEQ ID NO: 78256 - DNA, 2346 bp, Zea Mays
atctctttctctttctctctctctctctcctgaaatctctctctcgctgacctgagagttatccaaatactctggtatggcgagatccccctcctcgggttcccactcaactgctgtatcgtagtagtcgactacttccctgcaatccgttggtcagctcacaatagcagatgagtccattggaggagttcgactagtctccaccgctgctgcgagattccgccagattataaaacttctgcccgagcaaagcggccgaccaagttaccacagagcaagtcagcgaggcgaaataggcgaccaagtcccaaccgagtaagaaagggagacgaaactgccgaccaagtctctaggcccacaagagccaggcggagggcgagggcgagggcaaggacgagatgatgtcgcaggaccagatggactcgccggtggacaacgatgtcagcagcagccgcaggtcgcctcgcaggggcgtcggggcgcccctgaagaaagggccctggacggacgcggaggacgccatcctgatagactacgttaagaagcacggcgtgggcaactggaacgcggtgcggaagaacaccgagctattgcgctgcggcaagagctgccgcctcaggtgggcgaaccacctcaggcccaacctcaagaaggaggccttcaccccggaggaggagcgcctcatcatccagctccacgccaagctggggaacaagtggtcgaggatggctattcatttgccagggcgtactgacaacgaaataaaaaactactggaacacacgaaaaaagagatgtgaacgagctagccttcctatctatcctgctggtgtacgtaatcaatcttcaaatgaagaccagcaattgtctggtgatttgaacggtggcgagaacatgtccaatgatcttctatccggaaacagcctttgtctaccagattttaacaatgacagtttccgtgcgaaactgaaggctttaccaccacagctgccagctgtttcaataagcaatttgctcggccaaagctttgcatcaaaaggttgtagcttcatggatcaggtagaccaagcagggatgctgaaacaatctggcagtgcgcttcctacattgagcgatgccattgacgatgtgatttcctcggttgatcaattttcaaatgactctgagaagctcatgcagactttaggttttggttatctcaatgaagccaacgctaccagcaagagtattgcgccttttggggttgcacttactggcagccatgcccctttaaatggtattttctctgcatctaggctcacaaatggtccttcgaagatggagcccccttcagtccaaaatagcaggctcaagtatactgtggatcctgcaatgcagcctactgagttagtagatccttacatgcagtctctatcagcgaccccttcagtgaaatcagagtgtgcatcgccgagaaacagtggtcttttcgaagagctgcttcatgaacctcatgcactaagatctgggaagagccaacaaccatcggtccgaagttcaagttcttctgctggcacaccttatgggactatggttagctcagaatttgatatgggtcaggaatattgggaagaacagcccggttctctcctcagcgaatatgctcacttcagtgggaattatttggctgaatgcgctcctcctgttagcgctgcatcaactgatatctttccgctccccaagatttctcctgaaagcccttcaatgggctctggcgagcaggcgttagagcctaaacatgagtcagcagcttcacgtacgtcatcttggaaacttgaggcatgatgcattattctctgggaacacagcccattcatccagtttcaacgataccatagcaatgctcatcggcgatgtacctgttcttggtgatggaattgtgctcgattcttcctcatgggacaacatgccacatgcttttcaaatggcggaattcaaatgagttccatataatttctttgtgatgctgaagggcttcttcctgcttgttttggggtcaatatcagggaacgccccactgattgtgacgctgcattcctgacagagatccttgtgatcttcatgcggatagtccttttgtctaattaagtgcatggaagataacctggatattatttttaattttttgctttgtattagagaaccgtttttgccatccctgacagcatttctgttggaaacgtgtcatgacttttgtttgaacaatttaaatatcggttatagataatgtgatgtgtgccatcccttgatgcaattgcatgtggtagcaaattgttgaagtatacgctgtcattgctgctgtgctggc

SEQ ID NO: 78257 - DNA, 2255 bp, Zea Mays
atctctttctctttctctctctctctctcctgaaatctctctctcgctgacctgagagttatccaaatactctggtatggcgagatccccctcctcgggttcccactcaactgctgtatcgtagtagtcgactacttccctgcaatccgttggtcagctcacaatagcagatgagtccattggaggagttcgactagtctccaccgctgctgcgagattccgccaggttccgcgcataccctgacggcaagccatgtaccgggtgaagagccaggcggagggcgagggcgagggcaaggacgagatgatgtcgcaggaccagatggactcgccggtggacaacgatgtcagcagcagccgcaggtcgcctcgcaggggcgtcggggcgcccctgaagaaagggccctggacggacgcggaggacgccatcctgatagactacgttaagaagcacggcgtgggcaactggaacgcggtgcggaagaacaccgagctattgcgctgcggcaagagctgccgcctcaggtgggcgaaccacctcaggcccaacctcaagaaggaggccttcaccccggaggaggagcgcctcatcatccagctccacgccaagctggggaacaagtggtcgaggatggctattcatttgccagggcgtactgacaacgaaataaaaaactactggaacacacgaaaaaagagatgtgaacgagctagccttcctatctatcctgctggtgtacgtaatcaatcttcaaatgaagaccagcaattgtctggtgatttgaacggtggcgagaacatgtccaatgatcttctatccggaaacagcctttgtctaccagattttaacaatgacagtttccgtgcgaaactgaaggctttaccaccacagctgccagctgtttcaataagcaatttgctcggccaaagctttgcatcaaaaggttgtagcttcatggatcaggtagaccaagcagggatgctgaaacaatctggcagtgcgcttcctacattgagcgatgccattgacgatgtgatttcctcggttgatcaattttcaaatgactctgagaagctcatgcagactttaggttttggttatctcaatgaagccaacgctaccagcaagagtattgcgccttttggggttgcacttactggcagccatgcccctttaaatggtattttctctgcatctaggctcacaaatggtccttcgaagatggagcccccttcagtccaaaatagcaggctcaagtatactgtggatcctgcaatgcagcctactgagttagtagatccttacatgcagtctctatcagcgaccccttcagtgaaatcagagtgtgcatcgccgagaaacagtggtcttttcgaagagctgcttcatgaacctcatgcactaagatctgggaagagccaacaaccatcggtccgaagttcaagttcttctgctggcacaccttatgggactatggttagctcagaatttgatatgggtcaggaatattgggaagaacagcccggttctctcctcagcgaatatgctcacttcagtgggaattatttggctgaatgcgctcctcctgttagcgctgcatcaactgatatctttccgctccccaagatttctcctgcagaaagcccttcaatgggctctggcgagcaggcgttagagcctaaacatgagtcagcagcttcacgtacgtcatcttggaaacttgaggcatgatgcattattctctgggaacacagcccattcatccagtttcaacgataccatagcaatgctcatcggcgatgtacctgttcttggtgatggaattgtgctcgattcttcctcatgggacaacatgccacatgcttttcaaatggcggaattcaaatgagttccatataatttctttgtgatgctgaagggcttcttcctgcttgttttggggtcaatatcagggaacgccccactgattgtgacgctgcattcctgacagagatccttgtgatcttcatgcggatagtccttttgtctaattaagtgcatggaagataacctggatattatttttaattttttgctttgtattagagaaccgtttttgccatccctgacagcatttctgttggaaacgtgtcatgacttttgtttgaacaatttaaatatcggttatagataatgtgatgtgtgccatcccttgatgcaattgcatgtggtagcaaattgttgaagtatacgctgtcattgctgctgtgctggc

SEQ ID NO: 78258 - DNA, 2887 bp, Zea Mays
atctctttctctttctctctctctctctcctgaaatctctctctcgctgacctgagagttatccaaatactctggtatggcgagatccccctcctcgggttcccactcaactgctgtatcgtagtagtcgactacttccctgcaatccgttggtcagctcacaatagcagatgagtccattggaggagttcgactagtctccaccgctgctgcgagattccgccaggtacaccgctgaatttccatttggtttgggcgtccaggtgtgatctgaggggggtggggatgctggattttggcctcctcctcacccttctccgttccaatcctgtctgaacctccgagaattgccgttctccggacgcggggagtgctgttcacggcattagtgctttgatctgtgaactttggcagacggaacctaccttttctctcttgcctttaccccgaaatctcgtgtcaactgtgggtcatagtgataccgctgcggttgtttagagttcttagacttatccacccctataccagccgttagctttgggtaatctgctgtactctccaatgagaagtcctatatttgaaccctaaaaattaatataaagtctaatttagagtgtttaggtctaaaaacatttggaactccaatatttaagttctatatcaagtcattggaaaataattcatatttgtgtggtacctatgaacatgcactcgaagtgaagattataaaacttctgcccgagcaaagcggccgaccaagttaccacagagcaagtcagcgaggcgaaataggcgaccaagtcccaaccgagtaagaaagggagacgaaactgccgaccaagtctctaggcccacaaggttccgcgcataccctgacggcaagccatgtaccgggtgaagagccaggcggagggcgagggcgagggcaaggacgagatgatgtcgcaggaccagatggactcgccggtggacaacgatgtcagcagcagccgcaggtcgcctcgcaggggcgtcggggcgcccctgaagaaagggccctggacggacgcggaggacgccatcctgatagactacgttaagaagcacggcgtgggcaactggaacgcggtgcggaagaacaccgagctattgcgctgcggcaagagctgccgcctcaggtgggcgaaccacctcaggcccaacctcaagaaggaggccttcaccccggaggaggagcgcctcatcatccagctccacgccaagctggggaacaagtggtcgaggatggctattcatttgccagggcgtactgacaacgaaataaaaaactactggaacacacgaaaaaagagatgtgaacgagctagccttcctatctatcctgctggtgtacgtaatcaatcttcaaatgaagaccagcaattgtctggtgatttgaacggtggcgagaacatgtccaatgatcttctatccggaaacagcctttgtctaccagattttaacaatgacagtttccgtgcgaaactgaaggctttaccaccacagctgccagctgtttcaataagcaatttgctcggccaaagctttgcatcaaaaggttgtagcttcatggatcaggtagaccaagcagggatgctgaaacaatctggcagtgcgcttcctacattgagcgatgccattgacgatgtgatttcctcggttgatcaattttcaaatgactctgagaagctcatgcagactttaggttttggttatctcaatgaagccaacgctaccagcaagagtattgcgccttttggggttgcacttactggcagccatgcccctttaaatggtattttctctgcatctaggctcacaaatggtccttcgaagatggagcccccttcagtccaaaatagcaggctcaagtatactgtggatcctgcaatgcagcctactgagttagtagatccttacatgcagtctctatcagcgaccccttcagtgaaatcagagtgtgcatcgccgagaaacagtggtcttttcgaagagctgcttcatgaacctcatgcactaagatctgggaagagccaacaaccatcggtccgaagttcaagttcttctgctggcacaccttatgggactatggttagctcagaatttgatatgggtcaggaatattgggaagaacagcccggttctctcctcagcgaatatgctcacttcagtgggaattatttggctgaatgcgctcctcctgttagcgctgcatcaactgatatctttccgctccccaagatttctcctgcagaaagcccttcaatgggctctggcgagcaggcgttagagcctaaacatgagtcagcagcttcacgtacgtcatcttggaaacttgaggcatgatgcattattctctgggaacacagcccattcatccagtttcaacgataccatagcaatgctcatcggcgatgtacctgttcttggtgatggaattgtgctcgattcttcctcatgggacaacatgccacatgcttttcaaatggcggaattcaaatgagttccatataatttctttgtgatgctgaagggcttcttcctgcttgttttggggtcaatatcagggaacgccccactgattgtgacgctgcattcctgacagagatccttgtgatcttcatgcggatagtccttttgtctaattaagtgcatggaagataacctggatattatttttaattttttgctttgtattagagaaccgtttttgccatccctgacagcatttctgttggaaacgtgtcatgacttttgtttgaacaatttaaatatcggttatagataatgtgatgtgtgccatcccttgatgcaattgcatgtggtagcaaattgttgaagtatacgctgtcattgctgctgtgctggc

SEQ ID NO: 78259 - DNA, 894 bp, Zea Mays
ttctatgattcttattgatcaagccacggtgtttgtgaaaaggactgttgttgggatcaagtgcaaagatggcattgttctgggtgtcgagaagctggtaacctcaaagatgatgctggaggggtcaaatcggaggatccattcagtgcaccggcattcgggcttgcagatggcagacaaattgtttcaagggccaaatcagaagctgccagttatgaaaaggtctatggagaacccattcctgtgaaggatttggcagatcgtgtagcaagttatgttcatctttgcacgctgtactggtggctcagaccttttggttgcggtgttattcttggaggttatgatagggatggaccacagctttacatgatagagccctcaggagtttcctataaatactttggtgctgcattggggaagggaaggcaggccgcaaagactgagatagaaaagttgaaactttcggagcttacctgccgagaaggcattgttgaagttgcaaagataatttatggagtgcatgacgaatccaaggacaaagcttttgagttggagttgagctggatctgtgatgaatcgaaccgccagcatcagaaggttccgaatgaattgttggagcaggccaaagctgctgctcaggcagctcttgaggagatggatgctgactaagaaacatgacaaatatgcccatgcttcatgtttttgtgctgttgatatctttgatccctttggggtgacaccgtgacagactggacattgccaatttgttggattttatttggatgtcatgtaaaactccattcatggaagtttgaatctggattgactgatataagagctgtggtgttttttacattctggtttagtcacgggctcacggcgctcgcgttcttt

SEQ ID NO: 78260 - DNA, 891 bp, Zea Mays
ttctatgattcttattgatcaagccacggtgtttgtgaaaaggactgttgttgggatcaagtgcaaagatggcattgttctgggtgtcgagaagctggtaacctcaaagatgatgctggaggggtcaaatcggaggatccattcagtgcaccggcattcgggcttgatggcagacaaattgtttcaagggccaaatcagaagctgccagttatgaaaaggtctatggagaacccattcctgtgaaggatttggcagatcgtgtagcaagttatgttcatctttgcacgctgtactggtggctcagaccttttggttgcggtgttattcttggaggttatgatagggatggaccacagctttacatgatagagccctcaggagtttcctataaatactttggtgctgcattggggaagggaaggcaggccgcaaagactgagatagaaaagttgaaactttcggagcttacctgccgagaaggcattgttgaagttgcaaagataatttatggagtgcatgacgaatccaaggacaaagcttttgagttggagttgagctggatctgtgatgaatcgaaccgccagcatcagaaggttccgaatgaattgttggagcaggccaaagctgctgctcaggcagctcttgaggagatggatgctgactaagaaacatgacaaatatgcccatgcttcatgtttttgtgctgttgatatctttgatccctttggggtgacaccgtgacagactggacattgccaatttgttggattttatttggatgtcatgtaaaactccattcatggaagtttgaatctggattgactgatataagagctgtggtgttttttacattctggtttagtcacgggctcacggcgctcgcgttcttt

SEQ ID NO: 78261 - DNA, 889 bp, Zea Mays
ttctatgattcttattgatcaagccacggtgtttgtgaaaaggactgttgttgggatcaagtgcaaagatggcattgttctgggtgtcgagaagctggtaacctcaaagatgatgctggaggggtcaaatcggaggatccattcagtgcaccggcattcgggcttggttgttgctggtttggcagcagatggcagacaaattgtttcaagggccaaatcagaagctgccagttatgaaaaggtctatggagaacccattcctgtgaaggatttggcagatcgtgtagcaagttatgttcatctttgcacgctgtactggtggctcagaccttttggttgcggtgttattcttggaggttatgatagggatggaccacagctttacatgatagagccctcaggagtttcctataaatactttggtgctgcattggggaagggaaggcaggccgcaaagactgagatagaaaagttgaaactttcggagcttacctgccgagaaggcattgttgaagttgcaaagataatttatggagtgcatgacgaatccaaggacaaagcttttgagttggagttgagctggatctgtgatgaatcgaaccgccagcatcagaaggccaaagctgctgctcaggcagctcttgaggagatggatgctgactaagaaacatgacaaatatgcccatgcttcatgtttttgtgctgttgatatctttgatccctttggggtgacaccgtgacagactggacattgccaatttgttggattttatttggatgtcatgtaaaactccattcatggaagtttgaatctggattgactgatataagagctgtggtgttttttacattctggtttagtcacgggctcacggcgctcgcgttcttt

SEQ ID NO: 78262 - DNA, 756 bp, Zea Mays
gtcaagcattgtgctgttcataagcgatagttgtgcatacgagctttaactgtggcgtctcaatggcaatcatttgactgggcccatcccaagggaactcgctggaatatctagtctcaaagttgttgatgtttcaagtaatgatttgtgcgggacgattcccacgtctggaccatttgagcatattcctctgagcaactttgagaagaacccgcgcttggaaggtccagagctacaaggcctggccatatacgacaccaactgctagagggcaccacgaagaaaagaactgctagaaagtaacgagcgaacaaggttaccagaaattgggcgatatagatttactaggtctggatctgtaatcctccctgcatagctcttattcgtaactcgctgtcggcacgaaagttggtgtgtgttttagcagaatgctttctgtccgtgaaagtaaacttgaaactgcttattacgactgaaatgatattgtcgttcccccctgcgcccctgccatgagttttgggttcctttgtgttttgtacactgaacttgtcggaagtacggttcagtgaactagtttatccctgctgtggcaaatttatggaaggtggccgtgatatcgatcgactaaaccatggcacaaaagaagcaacaggcaatgatgtcctgtctggtggcgtctgcattaaggtagcaccggcaattcttgaacttgatgatcccttggttttacggacaatgcggtttgctgcaagctaa

SEQ ID NO: 78263 - DNA, 1124 bp, Zea Mays
cccccccccccccccccccccccccccctgcgcagcacctgcacttcctcctcctcctcctccatggctgcaccttgcgacctgatccgccatgccctgcgtgtcctttcgaaaacggctgtcgacactgcccctctcgctcgctttccactcgattccagcaggcgtgcgtgcgtgcgtggcccaagtacccaacgcaccaccagagatcttggtaatttgaacttatctggtcatctggtgcctgagcttgggaaactggagcatcttcagtatctggaactttataagaataacattcaaggaacaatcccttctgagcttggcaatttgaagaatctaataagcttcgacttgtacaagaacaacatttcggggacaatacctcctgcccttggaaagttgaagtcccttgtattcttgcgtctcaatggcaatcatttgactgggcccatcccaagggaactcgctggaatatctagtctcaaagttgttgatgtttcaagtaatgatttgtgcgggacgattcccacgtctggaccatttgagcatattcctctgagcaactttgagaagaacccgcgcttggaaggtccagagctacaaggcctggccatatacgacaccaactgctagagggcaccacgaagaaaagaactgctagaaagtaacgagcgaacaaggttaccagaaattgggcgatatagatttactaggtctggatctgtaatcctccctgcatagctcttattcgtaactcgctgtcggcacgaaagttggtgtgtgttttagcagaatgctttctgtccgtgaaagtaaacttgaaactgcttattacgactgaaatgatattgtcgttcccccctgcgcccctgccatgagttttgggttcctttgtgttttgtacactgaacttgtcggaagtacggttcagtgaactagtttatccctgctgtggcaaatttatggaaggtggccgtgatatcgatcgactaaaccatggcacaaaagaagcaacaggcaatgatgtcctgtctggtggcgtctgcattaaggtagcaccggcaattcttgaacttgatgatcccttggttttacggacaatgcggtttgctgcaagctaa

SEQ ID NO: 78264 - DNA, 1595 bp, Zea Mays
cctgtccccgcctctgccaacgctcctgccccgcacacccacccgccgctcccgcgttgtccgcccccgtcatgaattgccctcttccatgtgcaccacagaaatctcggcgcgagatccccccgaaacctcgccataccctactgcgaggcgtaccattcggcagcgaggccctccttggcgggaacggcgtggtagtcatggaggctaagacgctccacctcgacgtgtgcgttgaaccacacgctgtgcttgtccttgcataacctggtgaggatttggccgcatcgtcccgctgagcatcacgtgcgacggcaggccctgctgctcccaggtgtcggtgcgagataggagagcgcgaacctggccgagctccatgtgaggcagtcccagggcacacgggcctcgcggtggcccaaggacgtcgggcggaagtcgcgccgagctacttccctgtctacgccaaggacgcccaacgcagagaagaggatgcccaccagcgacgtcccgtgctgcgaccgccacgcgaagaaggctgacggcatgccccgctccgatatgcccaacagctgggaccgggaaaaagacatgggacaaatagaagacatctaaagctttccaaggcagatgcctccagaggatatctactctctggtcatatgatcgatgcatagatcacttcagacaatcaaataacagtagtatacatagaaatgcaacatagaacactcaagtctcccaactgcccgcctgccgaggttggatgtggctccaccagctctgcctccctacttcctctactgctgcggctactgctacatcatctatcgtgcctgtttttctaggaatcttaatggcatcaggctggcattttgttcaactcattagctggttacagtaacaaggaaccaccattttaatgcaaaggagcagatgcgacaggatcacaagtaggaggagcggcgacgatgctgtagcgagagacacgggtgccaaggtcgttgtgctgcggtggtggcaggacaggaaggaaacgaaaaagcaggagccagggctgttcaacaacgtgaccgagtcgctgaggcgaggaagagtaaggtgaaggcactcgtcgacgcctttgagactgacagagcgtcatctcgctgcaggaaaccagcaagcctgctgctgctccagctatgaaagtaggtgtcgtgccatgagtgcttcttgacctgcagtgtgcatgatcacctttcttggaatttttggtcttttttggttgttagtgaccgtaaaagtggcgcttgttgaggtttgctcgttcccatgtaaactgagttttctcatgggagtttccatacttttgtagtgctagaaaaaaggaaagtctgtacaggttttgtgtctatgcaaggcttgagaagttggcattgtactgataagtgataagtaaacaagttattgtaatgatttaaactagattgttttgaaaggaaatggaatgcataaagcaaattaaactttgtattatgttactaattcatgaaaaatggtactaaacttccgtcaacgtttttatgtttctcatttcactcgctctatttttcgtt

SEQ ID NO: 78265 - DNA, 1636 bp, Zea Mays
cctgtccccgcctctgccaacgctcctgccccgcacacccacccgccgctcccgcgttgtccgcccccgtcatgaattgccctcttccatgtgcaccacagaaatctcggcgcgagatccccccgaaacctcgccataccctactgcgaggcgtaccattcggcagcgaggccctccttggcgggaacggcgtggtagtcatggaggctaagacgctccacctcgacgtgtgcgttgaaccacacgctgtgcttgtccttgcataacctggtgaggatttggccgcatcgtcccgctgagcatcacgtgcgacggcaggccctgctgctcccaggtgtcggtgcgagataggagagcgcgaacctggccgagctccatgtgaggcagtcccagggcacacgggcctcgcggtggcccaaggacgtcgggcggaagtcgcgccgagctacttccctgtctacgccaaggacgcccaacgcagagaagaggatgcccaccagcgacgtcccgtgctgcgaccgccacgcgaagaaggctgacggcatgccccgctccgatatgcccaacagctgggaccgggaaaaagacatgggacaaatagaagacatctaaagctttccaaggcagatgcctccagaggatatctactctctggtcatatgatcgatgcatagatcacttcagacaatcaaataacagtagtatacatagaaatgcaacattacatggaagcaaggtttatgatcagatttttgtataccagagaacactcaagtctcccaactgcccgcctgccgaggttggatgtggctccaccagctctgcctccctacttcctctactgctgcggctactgctacatcatctatcgtgcctgtttttctaggaatcttaatggcatcaggctggcattttgttcaactcattagctggttacagtaacaaggaaccaccattttaatgcaaaggagcagatgcgacaggatcacaagtaggaggagcggcgacgatgctgtagcgagagacacgggtgccaaggtcgttgtgctgcggtggtggcaggacaggaaggaaacgaaaaagcaggagccagggctgttcaacaacgtgaccgagtcgctgaggcgaggaagagtaaggtgaaggcactcgtcgacgcctttgagactgacagagcgtcatctcgctgcaggaaaccagcaagcctgctgctgctccagctatgaaagtaggtgtcgtgccatgagtgcttcttgacctgcagtgtgcatgatcacctttcttggaatttttggtcttttttggttgttagtgaccgtaaaagtggcgcttgttgaggtttgctcgttcccatgtaaactgagttttctcatgggagtttccatacttttgtagtgctagaaaaaaggaaagtctgtacaggttttgtgtctatgcaaggcttgagaagttggcattgtactgataagtgataagtaaacaagttattgtaatgatttaaactagattgttttgaaaggaaatggaatgcataaagcaaattaaactttgtattatgttactaattcatgaaaaatggtactaaacttccgtcaacgtttttatgtttctcatttcactcgctctatttttcgtt
